(19) United States
(12) Patent Application Publication
(10) Pub. No.: US 2023/0392155 A1
(43) Pub. Date: Dec. 7, 2023

(54) METHODS AND COMPOSITIONS FOR TREATING PRIMARY HYPEROXALURIA

(71) Applicant: Alnylam Pharmaceuticals, Inc., Cambridge, MA (US)

(72) Inventors: Gabriel Robbie, Brookline, MA (US); Varun Goel, Cambridge, MA (US)

(21) Appl. No.: 18/302,855

(22) Filed: Apr. 19, 2023

Related U.S. Application Data
(63) Continuation of application No. PCT/US2021/055712, filed on Oct. 20, 2021.
(60) Provisional application No. 63/094,427, filed on Oct. 21, 2020.

(51) Int. Cl. C12N 15/113; A61P 3/00

(52) U.S. Cl. CPC C12N 15/1137; C12Y 101/03015; A61P 3/00; C12N 2310/14; C12N 2320/35; C12N 2310/351

(57) ABSTRACT

The present invention provides methods and compositions for treating a pediatric subject having primary hyperoxaluria and methods for preventing at least one symptom in a pediatric subject having primary hyperoxaluria. The methods include administering to the subject a therapeutically effective amount or a prophylactically effective amount of an RNAi agent, e.g., double-stranded RNAi agent, targeting HAO1.

### RELATED APPLICATIONS

[0001] This application is a 35 § U.S.C. 111(a) continuation application which claims the benefit of priority to PCT/US2021/055712, filed on Oct. 20, 2021, which, in turn, claims the benefit of priority to U.S. Provisional Application No. 63/094,427, filed on Oct. 21, 2020. The entire contents of each of the foregoing applications are incorporated herein by reference.

### SEQUENCE LISTING

[0002] The instant application contains a Sequence Listing which has been submitted electronically in XML file format and is hereby incorporated by reference in its entirety. Said XML copy, created on Apr. 16, 2023, is named 121301-13802_SL.xml and is 21,781,435 bytes in size.

### BACKGROUND OF THE INVENTION

[0003] Primary hyperoxaluria (PH) is a group of inherited disorders of the liver characterized by increased urinary excretion of oxalate, an end-product of metabolism. Oxalate (C2O42-) is the salt-forming ion of oxalic acid (C2H2O4) that is widely distributed in both plants and animals. It is a component of human diet and is ubiquitously found in plants and plant-derived foods. Oxalate can also be synthesized endogenously via the metabolic pathway that occurs primarily in the liver.

[0004] Glyoxylate is an immediate precursor to oxalate and is derived from the oxidation of glycolate by the enzyme glycolate oxidase (GO), also known, and referred to herein, as hydroxyacid oxidase (HAO1), or by catabolism of hydroxyproline, a component of collagen. Transamination of glyoxylate with alanine by the enzyme alanine/glyoxylate aminotransferase (AGT) results in the formation of pyruvate and glycine. Excess glyoxylate will be converted to oxalate by glycolate oxidase or lactate dehydrogenase.

[0005] High levels of oxalate are toxic because oxalate cannot be broken down by the human body and accumulates in the kidneys. Oxalate can bind with calcium in the kidney, and hyperoxaluria can lead to urinary CaOx supersaturation, resulting in the formation and deposition CaOx crystals in renal tissue. These CaOx crystals may contribute to the formation of diffuse renal calcifications (nephrocalcinosis) and stones (nephrolithiasis). Moreover, when the innate renal defense mechanisms are suppressed, injury and progressive inflammation caused by these CaOx crystals, together with secondary complications such as tubular obstruction, may lead to decreased renal function and in severe cases even to end-stage renal failure. Furthermore, systemic deposition of CaOx (systemic oxalosis) may occur in extrarenal tissues, which can lead to early death if left untreated.

[0006] There are 3 types of PH: type 1 (PH1), type 2 (PH2), and type 3 (PH3). PH1 is the most common and the most severe form, accounting for 70% to 80% of all cases. PH1 is an ultra-rare, inherited disease in which excessive amounts of oxalate are produced by the liver. PH1 affects approximately 4 individuals per million in the United States and Europe, with an estimated 1,300 to 2,100 diagnosed cases. In some regions, such as the Middle East and North Africa, the genetic prevalence of PH1 is higher. Currently, the only curative treatment for PH1 is a liver transplant.

[0007] Accordingly, there is a need in the art for effective methods for treating primary hyperoxaluria.

### SUMMARY OF THE INVENTION

[0008] The present invention provides methods and compositions for treating or preventing primary hyperoxaluria in a pediatric subject, e.g., a subject between 0-6 years old, and/or a subject having a body weight less than about 20 kg. The methods comprise administering to the subject an RNAi agent, e.g., a double-stranded RNAi agent, targeting HAO1.

[0009] In one aspect, the present invention provides a method for treating a pediatric subject having primary hyperoxaluria, The method includes administering to the subject a therapeutically effective amount of a double stranded RNAi agent that inhibits expression of HAO1, or salt thereof, wherein the pediatric subject is between about 0 to about 1 year of age and/or has a body weight of less than about 10 kg, wherein the double stranded RNAi agent, or salt thereof, is administered in a dosing regimen comprising a loading phase followed by a maintenance phase, wherein the loading phase comprises administering a dose of about 4 mg/kg to about 8 mg/kg of the double stranded RNAi agent, or salt thereof, to the subject about once a month for about three months, and the maintenance phase comprises administering a dose of about 1 mg/kg to about 5 mg/kg of the double stranded RNAi agent, or salt thereof, to the subject about once a month, wherein the double stranded RNAi agent comprises a sense strand and an antisense strand forming a double stranded region, thereby treating the pediatric subject having primary hyperoxaluria.

[0010] In one embodiment, the subject is further administered a dose of about 4 mg/kg to about 8 mg/kg of the double stranded RNAi agent, or salt thereof, about once every three months when the subject has become between about 1 year to about 6 years of age and/or has a body weight of about 10 kg to about 20 kg.

[0011] In another embodiment, the subject is further administered a dose of about 1 mg/kg to about 5 mg/kg of the double stranded RNAi agent, or salt thereof, about once every three months when the subject has become older than about 6 years of age and/or has a body weight of about 20 kg or greater.

[0012] In another aspect, the present invention provides a method of treating a pediatric subject having primary hyperoxaluria. The method includes administering to the subject a therapeutically effective amount of a double stranded RNAi agent that inhibits expression of HAO1, or salt thereof, wherein the pediatric subject is between about 1 year to about 6 years of age and/or has a body weight of about 10 kg to about 20 kg, wherein the double stranded RNAi agent, or salt thereof, is administered in a dosing regimen comprising a loading phase followed by a maintenance phase, wherein the loading phase comprises administering a dose of about 4 mg/kg to about 8 mg/kg of the double stranded RNAi agent, or salt thereof, to the subject about once a month for about three months, and the maintenance phase comprises administering a dose of about 4 mg/kg to about 8 mg/kg of the double stranded RNAi agent, or salt thereof, to the subject about once every three months, wherein the double stranded RNAi agent comprises a sense strand and an antisense strand forming a double stranded region, thereby treating the pediatric subject having primary hyperoxaluria.

[0013] In one embodiment, the subject is further administered a dose of about 1 mg/kg to about 5 mg/kg of the double stranded RNAi agent, or salt thereof, about once every three months when the subject has become older than about 6 years of age and/or has a body weight of about 20 kg or greater.

[0014] In one aspect, the present invention provides a method of preventing at least one symptom in a pediatric subject having primary hyperoxaluria, comprising administering to the subject a prophylactically effective amount of a double stranded RNAi agent that inhibits expression of HAO1, or salt thereof, wherein the pediatric subject is between about 0 to about 1 year of age and/or has a body weight of less than about 10 kg, wherein the double stranded RNAi agent, or salt thereof, is administered in a dosing regimen comprising a loading phase followed by a maintenance phase, wherein the loading phase comprises administering a dose of about 4 mg/kg to about 8 mg/kg of the double stranded RNAi agent, or salt thereof, to the subject about once a month for about three months, and the maintenance phase comprises administering a dose of about 1 mg/kg to about 5 mg/kg of the double stranded RNAi agent, or salt thereof, to the subject about once a month, wherein the double stranded RNAi agent comprises a sense strand and an antisense strand forming a double stranded region, thereby preventing at least one symptom in the pediatric subject having primary hyperoxaluria.

[0015] In one embodiment, the subject is further administered a dose of about 4 mg/kg to about 8 mg/kg of the double stranded RNAi agent, or salt thereof, about once every three months when the subject has become between about 1 year to about 6 years of age and/or has a body weight of about 10 kg to about 20 kg.

[0016] In another embodiment, the subject is further administered a dose of about 1 mg/kg to about 5 mg/kg of the double stranded RNAi agent, or salt thereof, about once every three months when the subject has become older than about 6 years of age and/or has a body of about 20 kg or greater.

[0017] In another aspect, the present invention provides a method of preventing at least one symptom in a pediatric subject having primary hyperoxaluria. The method includes administering to the subject a prophylactically effective amount of a double stranded RNAi agent that inhibits expression of HAO1, or salt thereof, wherein the pediatric subject is between about 1 year to about 6 years of age and/or has a body weight of about 10 kg to about 20 kg, wherein the double stranded RNAi agent, or salt thereof, is administered in a dosing regimen comprising a loading phase followed by a maintenance phase, wherein the loading phase comprises administering a dose of about 4 mg/kg to about 8 mg/kg of the double stranded RNAi agent, or salt thereof, to the subject about once a month for about three months, and the maintenance phase comprises administering a dose of about 4 mg/kg to about 8 mg/kg of the double stranded RNAi agent, or salt thereof, to the subject about once every three months, wherein the double stranded RNAi agent comprises a sense strand and an antisense strand forming a double stranded region, thereby preventing at least one symptom in the pediatric subject having primary hyperoxaluria.

[0018] In one embodiment, the subject is further administered a dose of about 1 mg/kg to about 5 mg/kg of the double stranded RNAi agent, or salt thereof, about once every three months when the subject has become older than about 6 years of age and/or has a body weight of about 20 kg or greater.

[0019] In another embodiment, the loading phase dose administered to the subject is about 6 mg/kg of the double stranded RNAi agent and the maintenance phase dose administered to the pediatric subject is about 3 mg/kg of the double stranded RNAi agent.

[0020] In one embodiment, the loading phase dose administered to the subject is about 6 mg/kg of the double stranded RNAi agent and the maintenance phase dose administered to the pediatric subject is about 6 mg/kg of the double stranded RNAi agent.

[0021] In one embodiment, the dose administered to the subject is about 6 mg/kg of the double stranded RNAi agent.

[0022] In one embodiment, the dose administered to the subject is about 3 mg/kg of the double stranded RNAi agent.

[0023] In one embodiment, the RNAi agent, or salt thereof, is administered in a pharmaceutical composition.

[0024] In one embodiment, the double stranded RNAi agent is in a salt form.

[0025] In one embodiment, the methods of the invention further comprise administering an additional therapeutic agent to the subject.

[0026] In one embodiment, the subject is a human.

[0027] In one embodiment, the primary hyperoxaluria type is primary hyperoxaluria type I (PH1).

[0028] In one embodiment, the double stranded RNAi agent is administered to the subject subcutaneously.

[0029] In one embodiment, the sense strand comprises a nucleotide sequence comprising at least 15 contiguous nucleotides, with 0, 1, 2, or 3 mismatches, of a portion of any one of the nucleotide sequences of SEQ ID NOs: 1, 2, 5, 6, and 2986-2988, or a nucleotide sequence having at least 90% nucleotide sequence identity to a portion of any one of the nucleotide sequences of SEQ ID Nos 1, 2, 5, 6, and 2986-2988, and the antisense strand comprises at least 15 contiguous nucleotides, with 0, 1, 2, or 3 mismatches, of the corresponding portion of any one of the nucleotide sequences of SEQ ID NOs:3, 4, 7, 8, and 2989-2992, or a nucleotide sequence having at least 90% nucleotide sequence identity to the corresponding portion of any one of the nucleotide sequences of SEQ ID NOs:3, 4, 7, 8, and 2989-2992.

[0030] In one embodiment, the antisense strand comprises at least 15 contiguous nucleotides differing by no more than 3 nucleotides from the nucleotide sequence of any one of the antisense nucleotide sequences in any one of Tables 1a, 1b, 2a, 2b, 2c, 10-13, and 15.

[0031] In one embodiment, the double stranded RNAi agent comprises at least one modified nucleotide.

[0032] In one embodiment, no more than five of the nucleotides of the sense strand and no more than five of the nucleotides of the antisense strand are unmodified nucleotides.

[0033] In another embodiment, all of the nucleotides of the sense strand and all of the nucleotides of the antisense strand comprise a modification.

[0034] In one embodiment, at least one of the modified nucleotides is selected from the group a deoxy-nucleotide, a 3′-terminal deoxy-thymine (dT) nucleotide, a 2′-O-methyl modified nucleotide, a 2′-fluoro modified nucleotide, a 2′-deoxy-modified nucleotide, a locked nucleotide, an unlocked nucleotide, a conformationally restricted nucleotide, a constrained ethyl nucleotide, an abasic nucleotide, a 2′-amino-modified nucleotide, a 2′-O-allyl-modified nucleotide, 2′-C-alkyl-modified nucleotide, a 2′-methoxyethyl modified nucleotide, a 2′-O-alkyl-modified nucleotide, a morpholino nucleotide, a phosphoramidate, a non-natural base comprising nucleotide, a tetrahydropyran modified nucleotide, a 1,5-anhydrohexitol modified nucleotide, a cyclohexenyl modified nucleotide, a nucleotide comprising a 5′-phosphorothioate group, a nucleotide comprising a 5′-methylphosphonate group, a nucleotide comprising a 5′ phosphate or 5′ phosphate mimic, a nucleotide comprising vinyl phosphonate, a nucleotide comprising adenosine-glycol nucleic acid (GNA), a nucleotide comprising thymidine-glycol nucleic acid (GNA)S-Isomer, a nucleotide comprising 2-hydroxymethyl-tetrahydrofurane-5-phosphate, a nucleotide comprising 2′-deoxythymidine-3′ phosphate, a nucleotide comprising 2′-deoxyguanosine-3′-phosphate, a 2′-0 hexadecyl nucleotide, a nucleotide comprising a 2′-phosphate, a cytidine-2′-phosphate nucleotide, a guanosine-2′-phosphate nucleotide, a 2′-O-hexadecyl-cytidine-3′-phosphate nucleotide, a 2′-O-hexadecyl-adenosine-3′-phosphate nucleotide, a 2′-O-hexadecyl-guanosine-3′-phosphate nucleotide, a 2′-O-hexadecyl-uridine-3′-phosphate nucleotide, a 5′-vinyl phosphonate (VP), a 2′-deoxyadenosine-3′-phosphate nucleotide, a 2′-deoxycytidine-3′-phosphate nucleotide, a 2′-deoxyguanosine-3′-phosphate nucleotide, a 2′-deoxythymidine-3′-phosphate nucleotide, a 2′-deoxyuridine nucleotide, and a terminal nucleotide linked to a cholesteryl derivative and a dodecanoic acid bisdecylamide group; and combinations thereof.

[0035] In one embodiment, at least one strand comprises a 3′ overhang of at least 1 nucleotide.

[0036] In another embodiment, at least one strand comprises a 3′ overhang of at least 2 nucleotides.

[0037] In one embodiment, the sense strand and the antisense strand are each independently 15-30 nucleotides in length.

[0038] In one embodiment, the double stranded region is 17-23 nucleotide pairs in length.

[0039] In another embodiment, the double stranded region is 17-25 nucleotide pairs in length.

[0040] In yet another embodiment, the double stranded region is 23-27 nucleotide pairs in length.

[0041] In one embodiment, the double stranded region is 19-21 nucleotide pairs in length.

[0042] In one another, the double stranded region is 21-23 nucleotide pairs in length.

[0043] In one embodiment, each strand is independently 19-30 nucleotides in length.

[0044] In another embodiment, each strand is independently 19-23 nucleotides in length.

[0045] In one embodiment, each strand is independently 21-23 nucleotides in length.

[0046] In one embodiment, the RNAi agent further comprises at least one phosphorothioate or methylphosphonate internucleotide linkage.

[0047] In one embodiment, the phosphorothioate or methylphosphonate internucleotide linkage is at the 3′-terminus of one strand.

[0048] In one embodiment, the strand is the antisense strand.

[0049] In another embodiment, the strand is the sense strand.

[0050] In another embodiment, the phosphorothioate or methylphosphonate internucleotide linkage is at the 5′-terminus of one strand.

[0051] In one embodiment, the strand is the antisense strand.

[0052] In another embodiment, the strand is the sense strand.

[0053] In one embodiment, the phosphorothioate or methylphosphonate internucleotide linkage is at both the 5′- and the 3′-terminus of one strand.

[0054] In one embodiment, the strand is the antisense strand.

[0055] In one embodiment, the RNAi agent comprises 6-8 phosphorothioate internucleotide linkages.

[0056] In one embodiment, the double stranded RNAi agent comprises a ligand attached at the 3′-terminus of said sense strand.

[0057] In one embodiment, the ligand is one or more GalNAc derivatives attached through a bivalent or trivalent branched linker.

[0058] In one embodiment, the ligand is

[chemical structure]

[0059] In one embodiment, the RNAi agent is conjugated to the ligand as shown in the following schematic

[chemical structure]

wherein X is O or S.

[0060] In one embodiment, the antisense strand comprises at least 15 contiguous nucleotides from the nucleotide sequence of 5′-UAUAUUUCCAGGAUGAAAGUCCA-3′ (SEQ ID NO:706).

[0061] In one embodiment, the antisense strand comprises the nucleotide sequence of 5′-UAUAUUUCCAGGAUGAAAGUCCA-3′ (SEQ ID NO:706).

[0062] In one embodiment, the sense strand comprises the nucleotide sequence 5′-GACUUUCAUCCUGGAAAUAUA-3′ (SEQ ID NO:589) and the antisense strand comprises the nucleotide sequence 5′-UAUAUUUCCAGGAUGAAAGUCCA-3′ (SEQ ID NO:706).

[0063] In one embodiment, the sense strand comprises the nucleotide sequence 5′-gsascuuuCfaUfCfCfuggaaauaua-3′ (SEQ ID NO:213) and the antisense strand comprises the nucleotide sequence 5′-usAfsuauUfuCfCfaggaUfgAfaagucscsa-3′ (SEQ ID NO:330), wherein a, g, c, and u are 2′-O-methyl (2′-OMe) A, G, C, and U, respectively; Af, Gf, Cf, and Uf are 2′-fluoro A, G, C, and U, respectively; and s is a phosphorothioate linkage.

[0064] In one embodiment, the double stranded RNAi agent further comprises a ligand attached at the 3′-terminus of the sense strand.

[0065] In one embodiment, the ligand is one or more GalNAc derivatives attached through a bivalent or trivalent branched linker.

[0066] In one embodiment, the ligand is

[chemical structure]

[0067] In one embodiment, the RNAi agent is conjugated to the ligand as shown in the following schematic

[chemical structure]

wherein X is O.

[0068] In one embodiment, the RNAi agent or salt thereof is administered in a pharmaceutical composition.

[0069] In one embodiment, the double stranded RNAi agent is in a salt form.

[0070] In one embodiment, the pediatric subject has intact renal function.

[0071] In another embodiment, the pediatric subject has impaired renal function.

### BRIEF DESCRIPTION OF THE DRAWINGS

[0072] FIG. 1 depicts the nucleotide sequence of Homo sapiens HAO1 mRNA (SEQ ID NO:1).

[0073] FIG. 2 depicts the nucleotide sequence of Mus musculus HAO1 mRNA (SEQ ID NO:2).

[0074] FIG. 3A is a graph depicting the results of in vitro screening of GO (HAO) GalNac-siRNA conjugates in primary cynomologous monkey hepatocytes.

[0075] FIG. 3B is a graph depicting the dose response curve of a GO (HAO) GalNac-siRNA conjugate in primary cynomologous monkey hepatocytes.

[0076] FIG. 4A is a graph depicting the results of an in vivo evaluation of GO (HAO) GalNac-siRNA conjugates in C57B6 mice after a single dose.

[0077] FIG. 4B is a graph depicting the results of an in vivo evaluation of GO (HAO) GalNac-siRNA conjugates in C57B6 mice after a repeat dose.

[0078] FIG. 5A is a graph depicting urinary oxalate levels in AGXT knock out (KO) mice after treatment with GO (HAO) GalNac-siRNA conjugates.

[0079] FIG. 5B is a graph depicting urinary glycolate levels in AGXT KO mice after treatment with GO (HAO) GalNac-siRNA conjugates.

[0080] FIG. 6A is a graph depicting AGXT mRNA levels in a rat model of PH1 72 hours after a single dose of an AGXT siRNA.

[0081] FIG. 6B is a graph depicting urinary oxalate levels in a rat model of PH1 72 hours after treatment with a GO (HAO) GalNac-siRNA conjugate.

[0082] FIG. 6C is a graph depicting urinary oxalate levels in a rat model of PH1 followed for 49 days with continued weekly dosing on days 14 and 21 of both AF-011-63102 and AD-62994 and 24 hour urine collections as shown.

[0083] FIG. 6D is a graph depicting duration of HAO1 knockdown in rats. Shown are mRNA levels either one week or four weeks after the last of 4 doses (corresponding to days 28 and 49 in FIG. 6C) and expressed relative to levels seen in rats treated with PBS FIG. 7 depicts the reverse complement of the nucleotide sequence of Homo sapiens HAO1 mRNA (SEQ ID NO:3).

[0084] FIG. 8 depicts the reverse complement of the nucleotide sequence of Mus musculus HAO1 mRNA (SEQ ID NO:4).

[0085] FIG. 9 depicts the nucleotide sequence of Macaca fascicularis HAO1 mRNA (SEQ ID NO:5).

[0086] FIG. 10 depicts the nucleotide sequence of Rattus norvegicus HAO1 mRNA (SEQ ID NO:6).

[0087] FIG. 11 depicts the reverse complement of the nucleotide sequence of Macaca fascicularis HAO1 mRNA (SEQ ID NO:7).

[0088] FIG. 12 depicts the reverse complement of the nucleotide sequence of Rattus norvegicus HAO1 mRNA (SEQ ID NO:8).

[0089] FIG. 13 depicts in vivo screening of GO GalNAc conjugates.

[0090] FIG. 14 is a graph depicting an in vivo evaluation of GO-GalNAc conjugates in mice.

[0091] FIG. 15 is a graph depicting a dose-response evaluation of GO-GalNAc conjugates in mice.

[0092] FIG. 16 is a graph depicting a dose-response evaluation of GO-GalNAc conjugates in mice.

[0093] FIG. 17 is a graph depicting a dose response evaluation in mice.

[0094] FIG. 18 is two graphs depicting the relationship of mRNA knockdown to serum glycolate levels in mice.

[0095] FIG. 19 is two graphs depicting relationship of mRNA knockdown to serum glycolate levels in rats.

[0096] FIG. 20 is a graph depicting dose dependent inhibition of HAO1 mRNA by ALN-65585 in primary cyno hepatocytes.

[0097] FIG. 21 is two graphs depicting HAO1 mRNA and serum glycolate levels following single does treatment with ALN-GO1 in mice.

[0098] FIG. 22 is a graph depicting duration of HAO1 mRNA silencing following single dose treatment with ALN-GO1 in mice.

[0099] FIG. 23 is a graph depicting HAO1 mRNA and serum glycolate levels following single dose treatment with ALN-GO1 in rats.

[0100] FIG. 24 is two graphs depicting urinary oxalate and glycolate levels in a mouse model of primary hyperoxaluria type I after a single dose of ALN-GO1.

[0101] FIG. 25A is a graph depicting HAO1 mRNA levels in a rat model of primary hyperoxaluria type I after a single dose of ALN-GO1.

[0102] FIG. 25B is a graph depicting urinary oxalate levels in a rat model of primary hyperoxaluria type I after a single dose of ALN-GO1.

[0103] FIG. 26 is two graphs depicting HAO1 mRNA and urinary oxalate levels in a rat model of primary hyperoxaluria type I after repeat dosing of ALN-GO1.

[0104] FIG. 27 is two graphs depicting HAO1 mRNA and serum glycolate levels after repeat dosing in non-human primates.

[0105] FIG. 28 is a schematic of the endogenous pathway for oxalate synthesis (from Robijn, et al. (2011) Kidney International 80:1146-1158).

### DETAILED DESCRIPTION OF THE INVENTION

[0106] The present invention provides methods for treating pediatric subjects having primary hyperoxaluria. The present invention also provides methods for preventing at least one symptom in a pediatric subject having primary hyperoxaluria. The methods include administering to the pediatric subject a therapeutically effective amount or a prophylactically effective amount of an RNAi agent, e.g., a double-stranded RNAi agent, targeting HAO1, as described herein.

[0107] The present inventors surprisingly discovered weight based dosing regimens, e.g., to treat, pediatric subjects having primary hyperoxaluria, e.g., PH1, that potently, durably, and effectively inhibit HAO1 expression, lower urinary oxalate (UOx) levels, and achieve sufficient RISC loading. The present inventors have also surprisingly discovered that the weight based dosing regimens of the invention are effective regardless of whether the subject's kidney function is intact or impaired.

### I. Definitions

[0108] In order that the present invention may be more readily understood, certain terms are first defined. In addition, it should be noted that whenever a value or range of values of a parameter are recited, it is intended that values and ranges intermediate to the recited values are also intended to be part of this invention.

[0109] The articles “a” and “an” are used herein to refer to one or to more than one (i.e., to at least one) of the grammatical object of the article. By way of example, “an element” means one element or more than one element, e.g., a plurality of elements.

[0110] The term “including” is used herein to mean, and is used interchangeably with, the phrase “including but not limited to”.

[0111] The term “or” is used herein to mean, and is used interchangeably with, the term “and/or,” unless context clearly indicates otherwise.

[0112] The term “about” is used herein to mean within the typical ranges of tolerances in the art. For example, “about” can be understood as about 2 standard deviations from the mean. In certain embodiments, about means+10%. In certain embodiments, about means+5%. When about is present before a series of numbers or a range, it is understood that “about” can modify each of the numbers in the series or range.

[0113] The term “at least” prior to a number or series of numbers is understood to include the number adjacent to the term “at least”, and all subsequent numbers or integers that could logically be included, as clear from context. For example, the number of nucleotides in a nucleic acid molecule must be an integer. For example, “at least 18 nucleotides of a 21 nucleotide nucleic acid molecule” means that 18, 19, 20, or 21 nucleotides have the indicated property. When at least is present before a series of numbers or a range, it is understood that “at least” can modify each of the numbers in the series or range.

[0114] As used herein, “no more than” or “less than” is understood as the value adjacent to the phrase and logical lower values or integers, as logical from context, to zero. For example, a duplex with an overhang of “no more than 2 nucleotides” has a 2, 1, or 0 nucleotide overhang. When “no more than” is present before a series of numbers or a range, it is understood that “no more than” can modify each of the numbers in the series or range.

[0115] As used herein, the term “primary hyperoxaluria” refers to a group of relatively rare autosomal recessive disorders of glyoxylate metabolism, which are characterized by markedly increased endogenous oxalate levels. There are three types of primary hyperoxalurias, which may be of type 1 (PH1), type 2 (PH2) and type 3. All three types are characterized by the inability to remove glyoxylate, as is shown in FIG. 1.

[0116] PH1, accounting for the majority of cases (70-80%), results from the absence or deficiency of the peroxisomal liver enzyme AGT, the activity of which depends on pyridoxal phosphate. As AGT catalyzes the transamination of glyoxylate to glycine, its deficiency in PH1 allows glyoxylate to be reduced to glycolate and to be oxidized to oxalate by the enzyme glycolate oxidase (GO), also known as hydroxyacid oxidase (HAO1).

[0117] PH2 results from the deficiency of the cytosolic liver enzyme glyoxylate reductase/hydroxypyruvate reductase (GRHPR). Severe hyperoxaluria is the clinical hallmark of PH1 and PH2, with reported urine oxalate levels ranging between 88 and 352 mg per 24 h (1-4 mmol per 24 h) for PH1 and 88 and 176 mg per 24 h (1-2 mmol per 24 h) for PH2.

[0118] In a third form of hyperoxaluria, PH3, patients present with normal AGT and GRHPR enzyme activities. Without wishing to be bound by a specific theory, it is believed that mutations in DHDPSL are responsible for PH3. It is assumed that DHDPSL encodes a 4-hydroxy-2-oxoglutarate aldolase which catalyzes the final step in the metabolism of hydroxyproline (see FIG. 1).

[0119] As used herein, “hydroxyacid oxidase,” used interchangeably with the terms “HAO1”, “glycolate oxidase” and “GO”, refers to the well-known gene and polypeptide, also known in the art as glycolate oxidase and (S)-2-hydroxy-acid oxidase. HAO1 catalyzes the oxidation of glycolate to glyoxylate, the immediate precursor to oxalate.

[0120] The term “HAO1” includes human HAO1, the amino acid and complete coding sequence of which may be found in for example, GenBank Accession No. GI: 11184232 (NM_017545.2; SEQ ID NO:1); Macaca fascicularis HAO1, the amino acid and complete coding sequence of which may be found in for example, GenBank Accession No. GI: 544464345 (XM_005568381.1: SEQ ID NO: 2986); mouse (Mus musculus) HAO1, the amino acid and complete coding sequence of which may be found in for example, GenBank Accession No. GI: 133893166 (NM_010403.2; SEQ ID NO: 2987); and rat HAO1 (Rattus norvegicus) HAO1 the amino acid and complete coding sequence of which may be found in for example, for example GenBank Accession No. GI: 166157785 (NM_001107780; SEQ ID NO: 2988).

[0121] Additional examples of HAO1 mRNA sequences are readily available using publicly available databases, e.g., GenBank, UniProt, OMIM, and the Macaca genome project web site.

[0122] Exemplary HAO1 nucleotide sequences may also be found in SEQ ID NOs: 1, 2, 5, 6, and 2986-2988. SEQ ID NOs: 3, 4, 7, 8, and 2989-2992 are the reverse complement sequences of SEQ ID NOs: 1, 2, 5, 6, and 2986-2988, respectively.

[0123] Further information on HAO1 is provided, for example in the NCBI Gene database at https://www.nbci.nlm.nih.gov/gene/54363.

[0124] The entire contents of each of the foregoing GenBank Accession numbers and the Gene database numbers are incorporated herein by reference as of the date of filing this application.

[0125] The term “HAO1,” as used herein, also refers to naturally occurring DNA sequence variations of the HAO1 gene, such as a single nucleotide polymorphism (SNP) in the HAO1 gene. Exemplary SNPs may be found in the dbSNP database available at www.ncbi.nlm.nih.gov/projects/SNP/.

[0126] As used herein, “target sequence” refers to a contiguous portion of the nucleotide sequence of an mRNA molecule formed during the transcription of a HAO1 gene, including mRNA that is a product of RNA processing of a primary transcription product.

[0127] As used herein, the term “strand comprising a sequence” refers to an oligonucleotide comprising a chain of nucleotides that is described by the sequence referred to using the standard nucleotide nomenclature.

[0128] “G,” “C,” “A” and “U” each generally stand for a nucleotide that contains guanine, cytosine, adenine, and uracil as a base, respectively. “T” and “dT” are used interchangeably herein and refer to a deoxyribonucleotide wherein the nucleobase is thymine, e.g., deoxyribothymine, 2′-deoxythymidine or thymidine. However, it will be understood that the term “ribonucleotide” or “nucleotide” or “deoxyribonucleotide” can also refer to a modified nucleotide, as further detailed below, or a surrogate replacement moiety. The skilled person is well aware that guanine, cytosine, adenine, and uracil may be replaced by other moieties without substantially altering the base pairing properties of an oligonucleotide comprising a nucleotide bearing such replacement moiety. For example, without limitation, a nucleotide comprising inosine as its base may base pair with nucleotides containing adenine, cytosine, or uracil. Hence, nucleotides containing uracil, guanine, or adenine may be replaced in the nucleotide sequences of the invention by a nucleotide containing, for example, inosine. Sequences comprising such replacement moieties are embodiments of the invention.

[0129] The terms “iRNA”, “RNAi agent,” “iRNA agent,”, “RNA interference agent” as used interchangeably herein, refer to an agent that contains RNA as that term is defined herein, and which mediates the targeted cleavage of an RNA transcript via an RNA-induced silencing complex (RISC) pathway. iRNA directs the sequence-specific degradation of mRNA through a process as RNA interference (RNAi). The iRNA modulates, e.g., inhibits, the expression of HAO1 in a cell, e.g., a cell within a subject, such as a mammalian subject.

[0130] In one embodiment, an RNAi agent of the invention includes a single stranded RNA that interacts with a target RNA sequence, e.g., a HAO1 target mRNA sequence, to direct the cleavage of the target RNA. Without wishing to be bound by theory, it is believed that long double stranded RNA introduced into cells is broken down into siRNA by a Type III endonuclease known as Dicer (Sharp et al. (2001) Genes Dev. 15:485). Dicer, a ribonuclease-III-like enzyme, processes the dsRNA into 19-23 base pair short interfering RNAs with characteristic two base 3′ overhangs (Bernstein, et al., (2001) Nature 409:363). The siRNAs are then incorporated into an RNA-induced silencing complex (RISC) where one or more helicases unwind the siRNA duplex, enabling the complementary antisense strand to guide target recognition (Nykanen, et al., (2001) Cell 107:309). Upon binding to the appropriate target mRNA, one or more endonucleases within the RISC cleave the target to induce silencing (Elbashir, et al., (2001) Genes Dev. 15:188). Thus, in one aspect the invention relates to a single stranded RNA (siRNA) generated within a cell and which promotes the formation of a RISC complex to effect silencing of the target gene, i.e., a HAO1 gene. Accordingly, the term “siRNA” is also used herein to refer to an RNAi as described above.

[0131] In another embodiment, the RNAi agent may be a single-stranded siRNA that is introduced into a cell or organism to inhibit a target mRNA. Single-stranded RNAi agents bind to the RISC endonuclease Argonaute 2, which then cleaves the target mRNA. The single-stranded siRNAs are generally 15-30 nucleotides and are chemically modified. The design and testing of single-stranded siRNAs are described in U.S. Pat. No. 8,101,348 and in Lima et al., (2012) Cell 150: 883-894, the entire contents of each of which are hereby incorporated herein by reference. Any of the antisense nucleotide sequences described herein may be used as a single-stranded siRNA as described herein or as chemically modified by the methods described in Lima et al., (2012) Cell 150; 883-894.

[0132] In yet another embodiment, the present invention provides single-stranded antisense oligonucleotide molecules targeting HAO1. A “single-stranded antisense oligonucleotide molecule” is complementary to a sequence within the target mRNA (i.e., HAO1). Single-stranded antisense oligonucleotide molecules can inhibit translation in a stoichiometric manner by base pairing to the mRNA and physically obstructing the translation machinery, see Dias, N. et al., (2002) Mol Cancer Ther 1:347-355. Alternatively, the single-stranded antisense oligonucleotide molecules inhibit a target mRNA by hydridizing to the target and cleaving the target through an RNaseH cleavage event. The single-stranded antisense oligonucleotide molecule may be about 10 to about 30 nucleotides in length and have a sequence that is complementary to a target sequence. For example, the single-stranded antisense oligonucleotide molecule may comprise a sequence that is at least about 10, 11, 12, 13, 14, 15, 16, 17, 18, 19, 20, or more contiguous nucleotides from any one of the antisense nucleotide sequences described herein, e.g., the sequences provided in any one of Tables 1a, 1b, 2a, 2b, 2c, 10-13, and 15, or bind any of the target sites described herein. The single-stranded antisense oligonucleotide molecules may comprise modified RNA, DNA, or a combination thereof.

[0133] In another embodiment, an “iRNA” for use in the compositions, uses, and methods of the invention is a double-stranded RNA and is referred to herein as a “double stranded RNAi agent,” “double-stranded RNA (dsRNA) molecule,” “dsRNA agent,” or “dsRNA”. The term “dsRNA”, refers to a complex of ribonucleic acid molecules, having a duplex structure comprising two anti-parallel and substantially complementary nucleic acid strands, referred to as having “sense” and “antisense” orientations with respect to a target RNA, i.e., a HAO1 gene. In some embodiments of the invention, a double-stranded RNA (dsRNA) triggers the degradation of a target RNA, e.g., an mRNA, through a post-transcriptional gene-silencing mechanism referred to herein as RNA interference or RNAi.

[0134] In general, the majority of nucleotides of each strand of a dsRNA molecule are ribonucleotides, but as described in detail herein, each or both strands can also include one or more non-ribonucleotides, e.g., a deoxyribonucleotide and/or a modified nucleotide. In addition, as used in this specification, an “RNAi agent” may include ribonucleotides with chemical modifications; an RNAi agent may include substantial modifications at multiple nucleotides. Such modifications may include all types of modifications disclosed herein or known in the art. Any such modifications, as used in a siRNA type molecule, are encompassed by “RNAi agent” for the purposes of this specification and claims.

[0135] The two strands forming the duplex structure may be different portions of one larger RNA molecule, or they may be separate RNA molecules. Where the two strands are part of one larger molecule, and therefore are connected by an uninterrupted chain of nucleotides between the 3′-end of one strand and the 5′-end of the respective other strand forming the duplex structure, the connecting RNA chain is referred to as a “hairpin loop.” Where the two strands are connected covalently by means other than an uninterrupted chain of nucleotides between the 3′-end of one strand and the 5′-end of the respective other strand forming the duplex structure, the connecting structure is referred to as a “linker.” The RNA strands may have the same or a different number of nucleotides. The maximum number of base pairs is the number of nucleotides in the shortest strand of the dsRNA minus any overhangs that are present in the duplex. In addition to the duplex structure, an RNAi agent may comprise one or more nucleotide overhangs.

[0136] In one embodiment, an RNAi agent of the invention is a dsRNA of 24-30 nucleotides that interacts with a target RNA sequence, e.g., a HAO1 target mRNA sequence, to direct the cleavage of the target RNA. Without wishing to be bound by theory, long double stranded RNA introduced into cells is broken down into siRNA by a Type III endonuclease known as Dicer (Sharp et al. (2001) Genes Dev. 15:485). Dicer, a ribonuclease-III-like enzyme, processes the dsRNA into 19-23 base pair short interfering RNAs with characteristic two base 3′ overhangs (Bernstein, et al., (2001) Nature 409:363). The siRNAs are then incorporated into an RNA-induced silencing complex (RISC) where one or more helicases unwind the siRNA duplex, enabling the complementary antisense strand to guide target recognition (Nykanen, et al., (2001) Cell 107:309). Upon binding to the appropriate target mRNA, one or more endonucleases within the RISC cleave the target to induce silencing (Elbashir, et al., (2001) Genes Dev. 15:188).

[0137] As used herein, a “nucleotide overhang” refers to the unpaired nucleotide or nucleotides that protrude from the duplex structure of an RNAi agent when a 3′-end of one strand of the RNAi agent extends beyond the 5′-end of the other strand, or vice versa. “Blunt” or “blunt end” means that there are no unpaired nucleotides at that end of the double stranded RNAi agent, i.e., no nucleotide overhang. A “blunt ended” RNAi agent is a dsRNA that is double-stranded over its entire length, i.e., no nucleotide overhang at either end of the molecule. The RNAi agents of the invention include RNAi agents with nucleotide overhangs at one end (i.e., agents with one overhang and one blunt end) or with nucleotide overhangs at both ends.

[0138] The term “antisense strand” refers to the strand of a double stranded RNAi agent which includes a region that is substantially complementary to a target sequence (e.g., a human HAO1 mRNA). As used herein, the term “region complementary to part of an mRNA encoding HAO1” refers to a region on the antisense strand that is substantially complementary to part of a HAO1 mRNA sequence. Where the region of complementarity is not fully complementary to the target sequence, the mismatches are most tolerated in the terminal regions and, if present, are generally in a terminal region or regions, e.g., within 6, 5, 4, 3, or 2 nucleotides of the 5′ and/or 3′ terminus.

[0139] The term “sense strand,” as used herein, refers to the strand of a dsRNA that includes a region that is substantially complementary to a region of the antisense strand.

[0140] As used herein, the term “cleavage region” refers to a region that is located immediately adjacent to the cleavage site. The cleavage site is the site on the target at which cleavage occurs. In some embodiments, the cleavage region comprises three bases on either end of, and immediately adjacent to, the cleavage site. In some embodiments, the cleavage region comprises two bases on either end of, and immediately adjacent to, the cleavage site. In some embodiments, the cleavage site specifically occurs at the site bound by nucleotides 10 and 11 of the antisense strand, and the cleavage region comprises nucleotides 11, 12 and 13.

[0141] As used herein, and unless otherwise indicated, the term “complementary,” when used to describe a first nucleotide sequence in relation to a second nucleotide sequence, refers to the ability of an oligonucleotide or polynucleotide comprising the first nucleotide sequence to hybridize and form a duplex structure under certain conditions with an oligonucleotide or polynucleotide comprising the second nucleotide sequence, as will be understood by the skilled person. Such conditions can, for example, be stringent conditions, where stringent conditions may include: 400 mM NaCl, 40 mM PIPES pH 6.4, 1 mM EDTA, 50° C. or 70° C. for 12-16 hours followed by washing. Other conditions, such as physiologically relevant conditions as may be encountered inside an organism, can apply. For example, a complementary sequence is sufficient to allow the relevant function of the nucleic acid to proceed, e.g., RNAi. The skilled person will be able to determine the set of conditions most appropriate for a test of complementarity of two sequences in accordance with the ultimate application of the hybridized nucleotides.

[0142] Sequences can be “fully complementary” with respect to each when there is base-pairing of the nucleotides of the first nucleotide sequence with the nucleotides of the second nucleotide sequence over the entire length of the first and second nucleotide sequences. However, where a first sequence is referred to as “substantially complementary” with respect to a second sequence herein, the two sequences can be fully complementary, or they may form one or more, but generally not more than 4, 3 or 2 mismatched base pairs upon hybridization, while retaining the ability to hybridize under the conditions most relevant to their ultimate application. However, where two oligonucleotides are designed to form, upon hybridization, one or more single stranded overhangs, such overhangs shall not be regarded as mismatches with regard to the determination of complementarity. For example, a dsRNA comprising one oligonucleotide 21 nucleotides in length and another oligonucleotide 23 nucleotides in length, wherein the longer oligonucleotide comprises a sequence of 21 nucleotides that is fully complementary to the shorter oligonucleotide, may yet be referred to as “fully complementary” for the purposes described herein.

[0143] “Complementary” sequences, as used herein, may also include, or be formed entirely from, non-Watson-Crick base pairs and/or base pairs formed from non-natural and modified nucleotides, in as far as the above requirements with respect to their ability to hybridize are fulfilled. Such non-Watson-Crick base pairs includes, but not limited to, G:U Wobble or Hoogstein base pairing.

[0144] The terms “complementary,” “fully complementary” and “substantially complementary” herein may be used with respect to the base matching between the sense strand and the antisense strand of a dsRNA, or between the antisense strand of a dsRNA and a target sequence, as will be understood from the context of their use.

[0145] As used herein, a polynucleotide that is “substantially complementary to at least part of” a messenger RNA (mRNA) refers to a polynucleotide that is substantially complementary to a contiguous portion of the mRNA of interest (e.g., an mRNA encoding HAO1) including a 5′ UTR, an open reading frame (ORF), or a 3′ UTR. For example, a polynucleotide is complementary to at least a part of a HAO1 mRNA if the sequence is substantially complementary to a non-interrupted portion of an mRNA encoding HAO1.

[0146] The term “inhibiting,” as used herein, is used interchangeably with “reducing,” “silencing,” “downregulating,” “suppressing” and other similar terms, and includes any level of inhibition.

[0147] The phrase “inhibiting expression of a HAO1,” as used herein, includes inhibition of expression of any HAO1 gene (such as, e.g., a mouse HAO1 gene, a rat HAO1 gene, a monkey HAO1 gene, or a human HAO1 gene) as well as variants, (e.g., naturally occurring variants), or mutants of a HAO1 gene. Thus, the HAO1 gene may be a wild-type HAO1 gene, a mutant HAO1 gene, or a transgenic HAO1 gene in the context of a genetically manipulated cell, group of cells, or organism.

[0148] “Inhibiting expression of a HAO1 gene” includes any level of inhibition of a HAO1 gene, e.g., at least partial suppression of the expression of a HAO1 gene, such as an inhibition of at least about 5%, at least about 10%, at least about 15%, at least about 20%, at least about 25%, at least about 30%, at least about 35%, at least about 40%, at least about 45%, at least about 50%, at least about 55%, at least about 60%, at least about 65%, at least about 70%, at least about 75%, at least about 80%, at least about 85%, at least about 90%, at least about 91%, at least about 92%, at least about 93%, at least about 94%. at least about 95%, at least about 96%, at least about 97%, at least about 98%, or at least about 99%.

[0149] The expression of a HAO1 gene may be assessed based on the level of any variable associated with HAO1 gene expression, e.g., HAO1 mRNA level or HAO1 protein level, in, e.g., tissues and/or urinary oxalate levels. Inhibition may be assessed by a decrease in an absolute or relative level of one or more of these variables compared with a control level. The control level may be any type of control level that is utilized in the art, e.g., a pre-dose baseline level, or a level determined from a similar subject, cell, or sample that is untreated or treated with a control (such as, e.g., buffer only control or inactive agent control).

[0150] The phrase “contacting a cell with a double stranded RNAi agent,” as used herein, includes contacting a cell by any possible means. Contacting a cell with a double stranded RNAi agent includes contacting a cell in vitro with the RNAi agent or contacting a cell in vivo with the RNAi agent. The contacting may be done directly or indirectly. Thus, for example, the RNAi agent may be put into physical contact with the cell by the individual performing the method, or alternatively, the RNAi agent may be put into a situation that will permit or cause it to subsequently come into contact with the cell.

[0151] Contacting a cell in vitro may be done, for example, by incubating the cell with the RNAi agent. Contacting a cell in vivo may be done, for example, by injecting the RNAi agent into or near the tissue where the cell is located, or by injecting the RNAi agent into another area, the bloodstream or the subcutaneous space, such that the agent will subsequently reach the tissue where the cell to be contacted is located. For example, the RNAi agent may contain and/or be coupled to a ligand, e.g., a GalNAc3 ligand, that directs the RNAi agent to a site of interest, e.g., the liver. Combinations of in vitro and in vivo methods of contacting are also possible. In connection with the methods of the invention, a cell might also be contacted in vitro with an RNAi agent and subsequently transplanted into a subject.

[0152] As used herein, a “subject” is an animal, such as a mammal, including a primate (such as a human, a non-human primate, e.g., a monkey, and a chimpanzee), a non-primate (such as a cow, a pig, a camel, a llama, a horse, a goat, a rabbit, a sheep, a hamster, a guinea pig, a cat, a dog, a rat, a mouse, a horse, and a whale), or a bird (e.g., a duck or a goose). In an embodiment, the subject is a human, such as a human being treated or assessed for a disease, disorder or condition that would benefit from reduction in HAO1 expression; a human at risk for a disease, disorder or condition that would benefit from reduction in HAO1 expression; a human having a disease, disorder or condition that would benefit from reduction in HAO1 expression; and/or human being treated for a disease, disorder or condition that would benefit from reduction in HAO1 expression as described herein.

[0153] A “patient” or “subject,” as used herein, is intended to include either a human or non-human animal, preferably a mammal, e.g., human or a monkey. Most preferably, the subject or patient is a human.

[0154] A “pediatric subject” or a “pediatric patient” as used herein are subjects between about 0 years of age to about 6 years or age and/or subjects having a body weight of about 20 kg or less. For example, such subjects can be 0-1, 0-2, 0-3, 0-4, 0-5, 1-2, 1-3, 1-4, 1-5, 1-6, 2-3, 2-4, 2-5, 2-6, 3-4, 3-5, 3-6, 4-5, 4-6 or 5-6 years old and may have a body weight of about 20 kg or less, 10 kg or less, 5 kg or less, 10-20 kg, 15-20 kg or 5-15 kg.

[0155] “Therapeutically effective amount,” as used herein, is intended to include the amount of an RNAi agent that, when administered to a patient for treating primary hyperoxaluria, is sufficient to effect treatment of the disease (e.g., by diminishing, ameliorating or maintaining the existing disease or one or more symptoms of disease). The “therapeutically effective amount” may vary depending on the RNAi agent, how the agent is administered, the disease and its severity and the history, age, weight, family history, genetic makeup, stage of pathological processes mediated by HAO1 expression, the types of preceding or concomitant treatments, if any, and other individual characteristics of the patient to be treated.

[0156] “Prophylactically effective amount,” as used herein, is intended to include the amount of an RNAi agent that, when administered to a subject who does not yet experience or display symptoms of primary hyperoxaluria, but who may be predisposed to the disease, is sufficient to prevent or ameliorate the disease or one or more symptoms of the disease. Ameliorating the disease includes slowing the course of the disease or reducing the severity of later-developing disease. The “prophylactically effective amount” may vary depending on the RNAi agent, how the agent is administered, the degree of risk of disease, and the history, age, weight, family history, genetic makeup, the types of preceding or concomitant treatments, if any, and other individual characteristics of the patient to be treated.

[0157] A “therapeutically-effective amount” or “prophylactically effective amount” also includes an amount of an RNAi agent that produces some desired local or systemic effect at a reasonable benefit/risk ratio applicable to any treatment. RNAi gents employed in the methods of the present invention may be administered in a sufficient amount to produce a reasonable benefit/risk ratio applicable to such treatment.

[0158] As used herein, the terms “treating” or “treatment” refer to a beneficial or desired result including, but not limited to, alleviation or amelioration of one or more symptoms associated with unwanted HAO1 expression, e.g., hyperoxaluria, nephrocalcinosis and/or nephrolithiasis. “Treatment” can also mean prolonging survival as compared to expected survival in the absence of treatment.

[0159] The term “lower” in the context of the level of HAO1 in a subject or a disease marker or symptom refers to a statistically significant decrease in such level. The decrease can be, for example, at least 10%, at least 15%, at least 20%, at least 25%, at least 30%, at least 35%, at least 40%, at least 45%, at least 50%, at least 55%, at least 60%, at least 65%, at least 70%, at least 75%, at least 80%, at least 85%, at least 90%, at least 95%, or more. In certain embodiments, a decrease is at least 20%. “Lower” in the context of the level of HAO1 in a subject is preferably down to a level accepted as within the range of normal for an individual without such disorder.

[0160] As used herein, “prevention” or “preventing,” when used in reference to a disease, disorder or condition thereof, that would benefit from a reduction in expression of an HAO1 gene, refers to a reduction in the likelihood that a subject will develop a symptom associated with such a disease, disorder, or condition, e.g., a symptom associated with primary hyperoxaluria, e.g., hyperoxaluria, nephrocalcinosis and/or nephrolithiasis. The likelihood of developing hyperoxaluria is reduced, for example, when an individual having one or more risk factors for hyperoxaluria either fails to develop hyperoxaluria or develops hyperoxaluria with less severity relative to a population having the same risk factors and not receiving treatment as described herein. The failure to develop a disease, disorder or condition, or the reduction in the development of a symptom associated with such a disease, disorder or condition (e.g., by at least about 10% on a clinically accepted scale for that disease or disorder), or the exhibition of delayed symptoms delayed (e.g., by days, weeks, months or years) is considered effective prevention.

[0161] The term “sample,” as used herein, includes a collection of similar fluids, cells, or tissues isolated from a subject, as well as fluids, cells, or tissues present within a subject. Examples of biological fluids include blood, serum and serosal fluids, plasma, cerebrospinal fluid, ocular fluids, lymph, urine, saliva, and the like. Tissue samples may include samples from tissues, organs or localized regions. For example, samples may be derived from particular organs, parts of organs, or fluids or cells within those organs. In certain embodiments, samples may be derived from the liver (e.g., whole liver or certain segments of liver or certain types of cells in the liver, such as, e.g., hepatocytes). In some embodiments, a “sample derived from a subject” refers to blood or plasma drawn from the subject. In further embodiments, a “sample derived from a subject” refers to liver tissue (or subcomponents thereof) derived from the subject.

### II. Methods of the Invention

[0162] The present invention provides methods for treating pediatric subjects having primary hyperoxaluria. The present invention also provides methods for preventing at least one symptom in a pediatric subject having primary hyperoxaluria. The methods include administering to the pediatric subject a therapeutically effective amount or a prophylactically effective amount of an RNAi agent, e.g., a double-stranded RNAi agent, targeting HAO1, as described herein.

[0163] The methods of the invention also include dosing regimens which include a loading phase “loading phase” of closely spaced administrations that may be followed by a “maintenance phase”, in which the RNAi agent is administered at longer spaced intervals. Such dosing regimens vary based on the age and/or weight of the subject at the initiation of treatment. In addition, as the pediatric subject ages and/or gains weight, the dose of the maintenance phase of the RNAi agent is changed. Such dosing regimens are not varied based on the kidney function of the pediatric subject.

[0164] As used herein, “pediatric subjects” are subjects between about 0 years of age to about 6 years or age and/or subjects having a body weight of about 20 kg or less.

[0165] Accordingly, in one aspect, the present invention provides a method for treating a pediatric subject having primary hyperoxaluria. The method includes administering to the subject a therapeutically effective amount of a double stranded RNAi agent that inhibits expression of HAO1, or salt thereof, wherein the pediatric subject is between about 0 to about 1 year of age and/or has a body weight of less than about 10 kg, wherein the double stranded RNAi agent, or salt thereof, is administered in a dosing regimen comprising a loading phase followed by a maintenance phase, wherein the loading phase comprises administering a dose of about 4 mg/kg to about 8 mg/kg, e.g., about 4, 4.5, 5, 5.5, 6, 6.5, 7. 7.5, or about 8 mg/kg, of the RNAi agent, or salt thereof, to the subject about once a month for about three months, and the maintenance phase comprises administering a dose of about 1 mg/kg to about 5 mg/kg, e.g., about 1, 1.5, 2, 2.5, 3, 3.5, 4, 4.5, or about 5 mg/kg, of the RNAi agent, or salt thereof, to the subject about once a month, thereby treating the pediatric subject having primary hyperoxaluria.

[0166] In certain embodiments, as the subject ages and/or increases in weight, e.g., when the subject is between about 1 year to about 6 years of age and/or has a body weight of about 10 kg to about 20 kg, the subject is administered a dose of about 4 mg/kg to about 8 mg/kg, e.g., about 4, 4.5, 5, 5.5, 6, 6.5, 7. 7.5, or about 8 mg/kg, of the RNAi agent, or salt thereof, about once every three months.

[0167] In other embodiments, as the subject further ages and/or further increases in weight, e.g., when the subject is older than about 6 years of age and/or has a body weight of about 20 kg or greater, the subject is administered a dose of about 1 mg/kg to about 5 mg/kg, e.g., about 1, 1.5, 2, 2.5, 3, 3.5, 4, 4.5, or about 5 mg/kg, of the RNAi agent, or salt thereof, about once every three months.

[0168] In another aspect, the present invention provides a method of treating a pediatric subject having primary hyperoxaluria. The method includes administering to the subject a therapeutically effective amount of a double stranded RNAi agent that inhibits expression of HAO1, or salt thereof, wherein the pediatric subject is between about 1 year to about 6 years of age and/or has a body weight of about 10 kg to about 20 kg, wherein the double stranded RNAi agent, or salt thereof, is administered in a dosing regimen comprising a loading phase followed by a maintenance phase, wherein the loading phase comprises administering a dose of about 4 mg/kg to about 8 mg/kg, e.g., about 4, 4.5, 5, 5.5, 6, 6.5, 7. 7.5, or about 8 mg/kg, of the RNAi agent, or salt thereof, to the subject about once a month for about three months, and the maintenance phase comprises administering a dose of about 4 mg/kg to about 8 mg/kg, e.g., about 4, 4.5, 5, 5.5, 6, 6.5, 7. 7.5, or about 8 mg/kg, of the RNAi agent, or salt thereof, to the subject about once every three months, thereby treating the pediatric subject having primary hyperoxaluria.

[0169] In some embodiments, as the subject ages and/or increases in weight, e.g., when the subject is older than about 6 years of age and/or has a body weight of about 20 kg or greater, the subject is administered a dose of about 1 mg/kg to about 5 mg/kg, e.g., about 1, 1.5, 2, 2.5, 3, 3.5, 4, 4.5, or about 5 mg/kg, of the RNAi agent, or salt thereof, about once every three months.

[0170] In one aspect, the present invention provides a method of preventing at least one symptom in a pediatric subject having primary hyperoxaluria. The method includes administering to the subject a prophylactically effective amount of a double stranded RNAi agent that inhibits expression of HAO1, or salt thereof, wherein the pediatric subject is between about 0 to about 1 year of age and/or has a body weight of less than about 10 kg, wherein the double stranded RNAi agent, or salt thereof, is administered in a dosing regimen comprising a loading phase followed by a maintenance phase, wherein the loading phase comprises administering a dose of about 4 mg/kg to about 8 mg/kg, e.g., about 4, 4.5, 5, 5.5, 6, 6.5, 7. 7.5, or about 8 mg/kg, of the RNAi agent, or salt thereof, to the subject about once a month for about three months, and the maintenance phase comprises administering a dose of about 1 mg/kg to about 5 mg/kg, e.g., about 1, 1.5, 2, 2.5, 3, 3.5, 4, 4.5, or about 5 mg/kg, of the RNAi agent, or salt thereof, to the subject about once a month, thereby preventing at least one symptom in the pediatric subject having primary hyperoxaluria.

[0171] In some embodiments, as the subject ages and/or increases in weight, e.g., when the subject is between about 1 year to about 6 years of age and/or has a body weight of about 10 kg to about 20 kg, the subject is administered a dose of about 4 mg/kg to about 8 mg/kg, e.g., about 4, 4.5, 5, 5.5, 6, 6.5, 7. 7.5, or about 8 mg/kg, of the RNAi agent, or salt thereof, about once every three months.

[0172] In other embodiments, as the subject ages and/or increases in weight, e.g., when the subject is older than about 6 years of age and/or has a body of about 20 kg or greater, the subject is administered a dose of about 1 mg/kg to about 5 mg/kg, e.g., about 1, 1.5, 2, 2.5, 3, 3.5, 4, 4.5, or about 5 mg/kg, of the RNAi agent, or salt thereof, about once every three months.

[0173] In another aspect, the present invention provides a method of preventing at least one symptom in a pediatric subject having primary hyperoxaluria. The method includes administering to the subject a prophylactically effective amount of a double stranded RNAi agent that inhibits expression of HAO1, or salt thereof, wherein the pediatric subject is between about 1 year to about 6 years of age and/or has a body weight of about 10 kg to about 20 kg, wherein the double stranded RNAi agent, or salt thereof, is administered in a dosing regimen comprising a loading phase followed by a maintenance phase, wherein the loading phase comprises administering a dose of about 4 mg/kg to about 8 mg/kg, e.g., about 4, 4.5, 5, 5.5, 6, 6.5, 7. 7.5, or about 8 mg/kg, of the RNAi agent, or salt thereof, to the subject about once a month for about three months, and the maintenance phase comprises administering a dose of about 4 mg/kg to about 8 mg/kg, e.g., about 4, 4.5, 5, 5.5, 6, 6.5, 7. 7.5, or about 8 mg/kg, of the RNAi agent, or salt thereof, to the subject about once every three months, thereby preventing at least one symptom in the pediatric subject having primary hyperoxaluria.

[0174] In one embodiment, as the subject ages and/or increases in weight, e.g., when the subject is older than about 6 years of age and/or has a body weight of about 20 kg or greater, the subject is administered a dose of about 1 mg/kg to about 5 mg/kg, e.g., about 1, 1.5, 2, 2.5, 3, 3.5, 4, 4.5, or about 5 mg/kg, of the RNAi agent, or salt thereof, about once every three months.

[0175] In one embodiment, the loading phase dose administered to the pediatric subject is about 6 mg/kg and the maintenance phase dose administered to the pediatric subject is about 3 mg/kg.

[0176] In another embodiment, the loading phase dose administered to the pediatric subject is about 6 mg/kg and the maintenance phase dose administered to the pediatric subject is about 6 mg/kg.

[0177] In one embodiment, the dose administered to the pediatric subject is about 6 mg/kg.

[0178] In another embodiment, the dose administered to the pediatric subject is about 3 mg/kg.

[0179] Any of these schedules may optionally be repeated for one or more iterations. The number of iterations may depend on the achievement of a desired effect, e.g., the suppression of a HAO1 gene, and/or the achievement of a therapeutic or prophylactic effect, e.g., reducing oxalate levels or reducing a symptom of PH1.

[0180] The double stranded RNAi agent, or salt thereof, may be administered in a pharmaceutical composition.

[0181] In some embodiments, the subject is between about 0 years to about 1 year of age, e.g., about 1 month old, about 2 months old, about 3 months old, about 4 months old, about 5 months old, about 6 months old, about 7 months old, about 8 months old, about 9 months old, about 10 months old, about 11 months old or about 12 months old. In other embodiments, the subject is between about 1 year old to about 6 years old, e.g., about 1 year old, about 13 months old, about 14 months old, about 15 months old, about 16 months old, about 17 months old, about 18 months old, about 19 months old, about 20 months old, about 21 months old, about 22 months old, about 23 months old, about 24 months old, about 2 years old, about 25 months old, about 26 months old, about 27 months old, about 28 months old, about 29 months old, about 30 months old, about 31 months old, about 32 months old, about 33 months old, about 34 months old, about 35 months old, about 36 months old, about 3 years old, about 37 months old, about 38 months old, about 39 months old, about 40 months old, about 41 months old, about 42 months old, about 43 months old, about 44 months old, about 45 months old, about 46 months old, about 47 months old, about 48 months old, about 4 years old, about 49 months old, about 50 months old, about 51 months old, about 52 months old, about 53 months old, about 54 months old, about 55 months old, about 56 months old, about 57 months old, about 58 months old, about 59 months old, about 60 months od, about 5 years old, about 61 months old, about 62 months old, about 63 months old, about 64 months old, about 65 months old, about 66 months old, about 67 months old, about 68 months old, about 69 months old, about 70 months old, about 71 months old, about 72 months old, or about 6 years old.

[0182] “Therapeutically effective amount,” as used herein, is intended to include the amount of a dsRNA agent, that, when administered to a subject having primary hyperoxaluria, is sufficient to effect treatment of the disease (e.g., by diminishing, ameliorating or maintaining the existing disease or one or more symptoms of disease). The “therapeutically effective amount” may vary depending on the dsRNA agent or the other agent(s) for treatment of primary hyperoxaluria, how the agent is administered, the disease and its severity and the history, age, weight, family history, genetic makeup, the types of preceding or concomitant treatments, if any, and other individual characteristics of the subject to be treated.

[0183] “Prophylactically effective amount,” as used herein, is intended to include the amount of a dsRNA agent, that, when administered to a subject having primary hyperoxaluria but not yet (or currently) experiencing or displaying symptoms of the disease, and/or a subject at risk of developing primary hyperoxaluria, e.g., a subject who carries a mutation in the AGXT gene, is sufficient to prevent or ameliorate the disease or one or more symptoms of the disease. Ameliorating the disease includes slowing the course of the disease or reducing the severity of later-developing disease. The “prophylactically effective amount” may vary depending on the dsRNA agent or agent(s) for treatment of primary hyperoxaluria, how the agent(s) is administered, the degree of risk of disease, and the history, age, weight, family history, genetic makeup, the types of preceding or concomitant treatments, if any, and other individual characteristics of the patient to be treated.

[0184] A “therapeutically effective amount” or “prophylactically effective amount” also includes an amount of a dsRNA agent that produces some desired local or systemic effect at a reasonable benefit/risk ratio applicable to any treatment. dsRNA agents employed in the methods of the present invention may be administered in a sufficient amount to produce a reasonable benefit/risk ratio applicable to such treatment.

[0185] In another aspect, the present invention provides uses of a therapeutically effective amount of a dsRNA agent of the invention for treating a pediatric subject, e.g., a subject having primary hyperoxaluria.

[0186] In another aspect, the present invention provides uses of a therapeutically effective amount of a dsRNA agent of the invention and an additional therapeutic agent(s) for treatment of primary hyperoxaluria for treating a pediatric subject, e.g., a subject having primary hyperoxaluria.

[0187] In yet another aspect, the present invention provides use of a dsRNA agent of the invention targeting an HAO1 gene or a pharmaceutical composition comprising a dsRNA agent targeting an HAO1 gene in the manufacture of a medicament for treating a pediatric subject, e.g., a subject having primary hyperoxaluria.

[0188] In another aspect, the present invention provides uses of a dsRNA agent of the invention targeting an HAO1 gene or a pharmaceutical composition comprising a dsRNA agent targeting an HAO1 gene in the manufacture of a medicament for use in combination with an additional therapeutic agent for treatment of primary hyperoxaluria, such as vitamin B6 (pyridoxine) and/or potassium citrate, or a combination of any of the foregoing, for treating a subject, e.g., a pediatric subject having primary hyperoxaluria.

[0189] In another aspect, the invention provides uses of a dsRNA agent of the invention for preventing at least one symptom in a pediatric subject suffering from primary hyperoxaluria.

[0190] In yet another aspect, the invention provides uses of a dsRNA agent of the invention, and an additional therapeutic agent for treatment of primary hyperoxaluria, such as vitamin B6 (pyridoxine) and/or potassium citrate, or a combination of any of the foregoing, for preventing at least one symptom in a pediatric subject suffering from primary hyperoxaluria.

[0191] In a further aspect, the present invention provides uses of a dsRNA agent of the invention in the manufacture of a medicament for preventing at least one symptom in a pediatric subject suffering from primary hyperoxaluria.

[0192] In a further aspect, the present invention provides uses of a dsRNA agent of the invention in the manufacture of a medicament for use in combination with an additional therapeutic agent, such as vitamin B6 (pyridoxine) and/or potassium citrate, or a combination of any of the foregoing, for preventing at least one symptom in a pediatric subject suffering from primary hyperoxaluria.

[0193] In one embodiment, a dsRNA agent targeting HAO1 is administered to a pediatric subject having primary hyperoxaluria such that HAO1 levels, e.g., in a cell, tissue, blood, urine or other tissue or fluid of the subject are reduced by at least about 10%, 11%, 12%, 13%, 14%, 15%, 16%, 17%, 18%, 19%, 20%, 21%, 22%, 23%, 24%, 25%, 26%, 27%, 28%, 29%, 30%, 31%, 32%, 33%, 34%, 35%, 36%, 37%, 38%, 39%, 40%, 41%, 42%, 43%, 44%, 45%, 46%, 47%, 48%, 49%, 50%, 51%, 52%, 53%, 54%, 55%, 56%, 57%, 58%, 59%, 60%, 61%, 62%, 62%, 64%, 65%, 66%, 67%, 68%, 69%, 70%, 71%, 72%, 73%, 74%, 75%, 76%, 77%, 78%, 79%, 80%, 81%, 82%, 83%, 84%, 85%, 86%, 87%, 88%, 89%, 90%, 91%, 92%, 93%, 94%, 95%, 96%, 97%, 98%, or at least about 99% or more and, subsequently, an additional therapeutic (as described below) is administered to the subject.

[0194] The additional therapeutic agent for the treatment of primary hyperoxaluria may be, for example, vitamin B6 (pyridoxine) and/or potassium citrate.

[0195] Administration of the dsRNA agent according to the methods and uses of the invention may result in a reduction of the severity, signs, symptoms, and/or markers of such diseases or disorders in a patient with primary hyperoxaluria. By “reduction” in this context is meant a statistically significant decrease in such level. The reduction can be, for example, at least about 5%, 10%, 15%, 20%, 25%, 30%, 35%, 40%, 45%, 50%, 55%, 60%, 65%, 70%, 75%, 80%, 85%, 90%, 95%, or about 100%.

[0196] Efficacy of treatment or prevention of disease can be assessed, for example by measuring disease progression, disease remission, symptom severity, reduction in pain, quality of life, dose of a medication required to sustain a treatment effect, level of a disease marker or any other measurable parameter appropriate for a given disease being treated or targeted for prevention. It is well within the ability of one skilled in the art to monitor efficacy of treatment or prevention by measuring any one of such parameters, or any combination of parameters. For example, efficacy of treatment of primary hyperoxaluria may be assessed, for example, by periodic monitoring of oxalate levels in the subject being treated. Comparisons of the later measurements with the initial measurements provide a physician an indication of whether the treatment is effective. It is well within the ability of one skilled in the art to monitor efficacy of treatment or prevention by measuring such a parameter, or any combination of parameters. In connection with the administration of a dsRNA agent targeting HAO1 or pharmaceutical composition thereof, “effective against” primary hyperoxaluria indicates that administration in a clinically appropriate manner results in a beneficial effect for at least a statistically significant fraction of patients, such as improvement of symptoms, a cure, a reduction in disease, extension of life, improvement in quality of life, or other effect generally recognized as positive by medical doctors familiar with treating primary hyperoxaluria and the related causes.

[0197] A treatment or preventive effect is evident when there is a statistically significant improvement in one or more parameters of disease status, or by a failure to worsen or to develop symptoms where they would otherwise be anticipated. As an example, a favorable change of at least 10% in a measurable parameter of disease, and preferably at least 20%, 30%, 40%, 50% or more can be indicative of effective treatment. Efficacy for a given dsRNA agent drug or formulation of that drug can also be judged using an experimental animal model for the given disease as known in the art.

[0198] When using an experimental animal model, efficacy of treatment is evidenced when a statistically significant reduction in a marker or symptom is observed.

[0199] Any positive change resulting in e.g., lessening of severity of disease measured using the appropriate scale, represents adequate treatment using a dsRNA agent or dsRNA agent formulation as described herein.

[0200] In another aspect, the invention features, a method of instructing an end user, e.g., a caregiver or a subject, on how to administer an iRNA agent described herein. The method includes, optionally, providing the end user with one or more doses of the iRNA agent, and instructing the end user to administer the iRNA agent on a regimen described herein, thereby instructing the end user.

[0201] The in vivo methods and uses of the invention may include administering to a pediatric subject a composition containing a dsRNA agent, where the dsRNA agent includes a nucleotide sequence that is complementary to at least a part of an RNA transcript of the HAO1 gene of the mammal to be treated. When the organism to be treated is a mammal such as a human, the composition can be administered by any means known in the art including, but not limited to subcutaneous, intravenous, oral, intraperitoneal, or parenteral routes, including intracranial (e.g., intraventricular, intraparenchymal and intrathecal), intramuscular, transdermal, airway (aerosol), nasal, rectal, and topical (including buccal and sublingual) administration. In certain embodiments, the compositions are administered by subcutaneous or intravenous infusion or injection.

[0202] In some embodiments, the administration is via a depot injection. A depot injection may release the dsRNA agent in a consistent way over a prolonged time period. Thus, a depot injection may reduce the frequency of dosing needed to obtain a desired effect, e.g., a desired inhibition of HAO1, or a therapeutic or prophylactic effect. A depot injection may also provide more consistent serum concentrations. Depot injections may include subcutaneous injections or intramuscular injections. In preferred embodiments, the depot injection is a subcutaneous injection.

[0203] In some embodiments, the administration is via a pump. The pump may be an external pump or a surgically implanted pump. In certain embodiments, the pump is a subcutaneously implanted osmotic pump. In other embodiments, the pump is an infusion pump. An infusion pump may be used for intravenous, subcutaneous, arterial, or epidural infusions. In preferred embodiments, the infusion pump is a subcutaneous infusion pump. In other embodiments, the pump is a surgically implanted pump that delivers the dsRNA agent to the liver.

[0204] Other modes of administration include epidural, intracerebral, intracerebroventricular, nasal administration, intraarterial, intracardiac, intraosseous infusion, intrathecal, and intravitreal, and pulmonary. The mode of administration may be chosen based upon whether local or systemic treatment is desired and based upon the area to be treated. The route and site of administration may be chosen to enhance targeting.

[0205] In general, the iRNA agent does not activate the immune system, e.g., it does not increase cytokine levels, such as TNF-alpha or IFN-alpha levels. For example, when measured by an assay, such as an in vitro PBMC assay, such as described herein, the increase in levels of TNF-alpha or IFN-alpha, is less than 30%, 20%, or 10% of control cells treated with a control dsRNA, such as a dsRNA that does not target HAO1.

[0206] A patient in need of a HAO1 RNAi agent may be identified by taking a family history. A healthcare provider, such as a doctor, nurse, or family member, can take a family history before prescribing or administering a HAO1 dsRNA. A DNA test may also be performed on the patient to identify a mutation in the AGT1 gene, before a HAO1 RNAi agent is administered to the patient. Diagnosis of PH1 can be confirmed by any test well-known to one of skill in the art.

[0207] A treatment or preventive effect is evident when there is a statistically significant improvement in one or more parameters of disease status, or by a failure to worsen or to develop symptoms where they would otherwise be anticipated. As an example, a favorable change of at least 10% in a measurable parameter of disease, and preferably at least 20%, 30%, 40%, 50% or more can be indicative of effective treatment. Efficacy for a given iRNA agent of the invention or formulation of that iRNA agent can also be judged using an experimental animal model for the given disease as known in the art. When using an experimental animal model, efficacy of treatment is evidenced when a statistically significant reduction in a marker or symptom is observed.

[0208] Owing to the inhibitory effects on HAO1 expression, a composition according to the invention or a pharmaceutical composition prepared therefrom can enhance the quality of life.

[0209] A dsRNA agent of the invention may be administered in “naked” form, or as a “free dsRNA agent.” A naked dsRNA agent is administered in the absence of a pharmaceutical composition. The naked dsRNA agent may be in a suitable buffer solution. The buffer solution may comprise acetate, citrate, prolamine, carbonate, or phosphate, or any combination thereof. In one embodiment, the buffer solution is phosphate buffered saline (PBS). The pH and osmolarity of the buffer solution containing the dsRNA agent can be adjusted such that it is suitable for administering to a subject.

[0210] Alternatively, a dsRNA agent of the invention may be administered as a pharmaceutical composition, such as a dsRNA agent liposomal formulation.

[0211] Subjects that would benefit from a reduction and/or inhibition of HAO1 gene expression are those having primary hyperoxaluria as described herein.

[0212] Treatment of a pediatric subject that would benefit from a reduction and/or inhibition of HAO1 gene expression includes therapeutic and prophylactic treatment (e.g., the subject carries a mutation in the AGTX gene and has PH1).

[0213] The invention further provides methods and uses of a dsRNA agent or a pharmaceutical composition thereof (including methods and uses of a dsRNA agent or a pharmaceutical composition comprising a dsRNA agent and an for treatment of primary hyperoxaluria) for treating a pediatric subject that would benefit from reduction and/or inhibition of HAO1 expression, e.g., a subject having primary hyperoxaluria, in combination with other pharmaceuticals and/or other therapeutic methods, e.g., with known pharmaceuticals and/or known therapeutic methods, such as, for example, those which are currently employed for treating these disorders. For example, in certain embodiments, a dsRNA agent targeting HAO1 is administered in combination with, e.g., an agent useful in treating primary hyperoxaluria as described elsewhere herein.

[0214] For example, additional therapeutics and therapeutic methods suitable for treating a subject that would benefit from reduction in HAO1 expression, e.g., a pediatric subject having primary hyperoxaluria, include vitamin B6 (pyridoxine) and/or potassium citrate, or a combination of any of the foregoing.

[0215] The dsRNA agent (and/or agent(s) for treatment of primary hyperoxaluria) and an additional therapeutic agent and/or treatment may be administered at the same time and/or in the same combination, e.g., parenterally, or the additional therapeutic agent can be administered as part of a separate composition or at separate times and/or by another method known in the art or described herein.

### III. Delivery of an iRNA Agent for Use in the Methods of the Invention

[0216] The delivery of an iRNA agent to a cell e.g., a cell within a subject, such as a human subject (e.g., a subject in need thereof, such as a subject having primary hyperoxaluria), for use in the methods of the invention, can be achieved in a number of different ways. For example, delivery may be performed by contacting a cell with an iRNA of the invention either in vitro or in vivo. In vivo delivery may also be performed directly by administering a composition comprising an iRNA, e.g., a dsRNA, to a subject. Alternatively, in vivo delivery may be performed indirectly by administering one or more vectors that encode and direct the expression of the iRNA. These alternatives are discussed further below.

[0217] In general, any method of delivering a nucleic acid molecule (in vitro or in vivo) can be adapted for use with an iRNA of the invention (see e.g., Akhtar S. and Julian R L. (1992) Trends Cell. Biol. 2(5):139-144 and WO94/02595, which are incorporated herein by reference in their entireties). For in vivo delivery, factors to consider in order to deliver an iRNA molecule include, for example, biological stability of the delivered molecule, prevention of non-specific effects, and accumulation of the delivered molecule in the target tissue. The non-specific effects of an iRNA can be minimized by local administration, for example, by direct injection or implantation into a tissue or topically administering the preparation. Local administration to a treatment site maximizes local concentration of the agent, limits the exposure of the agent to systemic tissues that can otherwise be harmed by the agent or that can degrade the agent, and permits a lower total dose of the iRNA molecule to be administered. Several studies have shown successful knockdown of gene products when an iRNA is administered locally. For example, intraocular delivery of a VEGF dsRNA by intravitreal injection in cynomolgus monkeys (Tolentino, M J., et al (2004) Retina 24:132-138) and subretinal injections in mice (Reich, S J., et al (2003) Mol. Vis. 9:210-216) were both shown to prevent neovascularization in an experimental model of age-related macular degeneration. In addition, direct intratumoral injection of a dsRNA in mice reduces tumor volume (Pille, J., et al (2005) Mol. Ther. 11:267-274) and can prolong survival of tumor-bearing mice (Kim, W J., et al (2006) Mol. Ther. 14:343-350; Li, S., et al (2007) Mol. Ther. 15:515-523). RNA interference has also shown success with local delivery to the CNS by direct injection (Dorn, G., et al. (2004) Nucleic Acids 32:e49; Tan, P H., et al (2005) Gene Ther. 12:59-66; Makimura, H., et al (2002) BMC Neurosci. 3:18; Shishkina, G T., et al (2004) Neuroscience 129:521-528; Thakker, E R., et al (2004) Proc. Natl. Acad. Sci. U.S.A. 101:17270-17275; Akaneya, Y., et al (2005) J. Neurophysiol. 93:594-602) and to the lungs by intranasal administration (Howard, K A., et al (2006) Mol. Ther. 14:476-484; Zhang, X., et al (2004) J. Biol. Chem. 279:10677-10684; Bitko, V., et al (2005) Nat. Med. 11:50-55). For administering an iRNA systemically for the treatment of a disease, the RNA can be modified or alternatively delivered using a drug delivery system; both methods act to prevent the rapid degradation of the dsRNA by endo- and exo-nucleases in vivo. Modification of the RNA or the pharmaceutical carrier can also permit targeting of the iRNA composition to the target tissue and avoid undesirable off-target effects. iRNA molecules can be modified by chemical conjugation to lipophilic groups such as cholesterol to enhance cellular uptake and prevent degradation. For example, an iRNA directed against ApoB conjugated to a lipophilic cholesterol moiety was injected systemically into mice and resulted in knockdown of apoB mRNA in both the liver and jejunum (Soutschek, J., et al (2004) Nature 432:173-178). Conjugation of an iRNA to an aptamer has been shown to inhibit tumor growth and mediate tumor regression in a mouse model of prostate cancer (McNamara, J O., et al (2006) Nat. Biotechnol. 24:1005-1015). In an alternative embodiment, the iRNA can be delivered using drug delivery systems such as a nanoparticle, a dendrimer, a polymer, liposomes, or a cationic delivery system. Positively charged cationic delivery systems facilitate binding of an iRNA molecule (negatively charged) and also enhance interactions at the negatively charged cell membrane to permit efficient uptake of an iRNA by the cell. Cationic lipids, dendrimers, or polymers can either be bound to an iRNA, or induced to form a vesicle or micelle (see e.g., Kim S H., et al (2008) Journal of Controlled Release 129(2):107-116) that encases an iRNA. The formation of vesicles or micelles further prevents degradation of the iRNA when administered systemically. Methods for making and administering cationic-iRNA complexes are well within the abilities of one skilled in the art (see e.g., Sorensen, D R., et al (2003) J. Mol. Biol 327:761-766; Verma, U N., et al (2003) Clin. Cancer Res. 9:1291-1300; Arnold, A S et al (2007) J. Hypertens. 25:197-205, which are incorporated herein by reference in their entirety). Some non-limiting examples of drug delivery systems useful for systemic delivery of iRNAs include DOTAP (Sorensen, D R., et al (2003), supra; Verma, U N., et al (2003), supra), Oligofectamine, “solid nucleic acid lipid particles” (Zimmermann, T S., et al (2006) Nature 441:111-114), cardiolipin (Chien, P Y., et al (2005) Cancer Gene Ther. 12:321-328; Pal, A., et al (2005) Int J. Oncol. 26:1087-1091), polyethyleneimine (Bonnet M E., et al (2008) Pharm. Res. August 16 Epub ahead of print; Aigner, A. (2006) J. Biomed. Biotechnol. 71659), Arg-Gly-Asp (RGD) peptides (Liu, S. (2006) Mol. Pharm. 3:472-487), and polyamidoamines (Tomalia, D A., et al (2007) Biochem. Soc. Trans. 35:61-67; Yoo, H., et al (1999) Pharm. Res. 16:1799-1804). In some embodiments, an iRNA forms a complex with cyclodextrin for systemic administration. Methods for administration and pharmaceutical compositions of iRNAs and cyclodextrins can be found in U.S. Pat. No. 7,427,605, which is herein incorporated by reference in its entirety.

[0218] A. Vector Encoded iRNAs for Use in the Methods of the Invention

[0219] iRNA targeting the HAO1 gene can be expressed from transcription units inserted into DNA or RNA vectors (see, e.g., Couture, A, et al., TIG. (1996), 12:5-10; Skillern, A., et al., International PCT Publication No. WO 00/22113, Conrad, International PCT Publication No. WO 00/22114, and Conrad, U.S. Pat. No. 6,054,299). Expression can be transient (on the order of hours to weeks) or sustained (weeks to months or longer), depending upon the specific construct used and the target tissue or cell type. These transgenes can be introduced as a linear construct, a circular plasmid, or a viral vector, which can be an integrating or non-integrating vector. The transgene can also be constructed to permit it to be inherited as an extrachromosomal plasmid (Gassmann, et al., Proc. Natl. Acad. Sci. USA (1995) 92:1292).

[0220] The individual strand or strands of an iRNA can be transcribed from a promoter on an expression vector. Where two separate strands are to be expressed to generate, for example, a dsRNA, two separate expression vectors can be co-introduced (e.g., by transfection or infection) into a target cell. Alternatively each individual strand of a dsRNA can be transcribed by promoters both of which are located on the same expression plasmid. In one embodiment, a dsRNA is expressed as inverted repeat polynucleotides joined by a linker polynucleotide sequence such that the dsRNA has a stem and loop structure.

[0221] iRNA expression vectors are generally DNA plasmids or viral vectors. Expression vectors compatible with eukaryotic cells, preferably those compatible with vertebrate cells, can be used to produce recombinant constructs for the expression of an iRNA as described herein. Eukaryotic cell expression vectors are well known in the art and are available from a number of commercial sources. Typically, such vectors are provided containing convenient restriction sites for insertion of the desired nucleic acid segment. Delivery of iRNA expressing vectors can be systemic, such as by intravenous or intramuscular administration, by administration to target cells ex-planted from the patient followed by reintroduction into the patient, or by any other means that allows for introduction into a desired target cell.

[0222] iRNA expression plasmids can be transfected into target cells as a complex with cationic lipid carriers (e.g., Oligofectamine) or non-cationic lipid-based carriers (e.g., Transit-TKO™). Multiple lipid transfections for iRNA-mediated knockdowns targeting different regions of a target RNA over a period of a week or more are also contemplated by the invention. Successful introduction of vectors into host cells can be monitored using various known methods. For example, transient transfection can be signaled with a reporter, such as a fluorescent marker, such as Green Fluorescent Protein (GFP). Stable transfection of cells ex vivo can be ensured using markers that provide the transfected cell with resistance to specific environmental factors (e.g., antibiotics and drugs), such as hygromycin B resistance.

[0223] Viral vector systems which can be utilized with the methods and compositions described herein include, but are not limited to, (a) adenovirus vectors; (b) retrovirus vectors, including but not limited to lentiviral vectors, moloney murine leukemia virus, etc.; (c) adeno-associated virus vectors; (d) herpes simplex virus vectors; (e) SV 40 vectors; (f) polyoma virus vectors; (g) papilloma virus vectors; (h) picornavirus vectors; (i) pox virus vectors such as an orthopox, e.g., vaccinia virus vectors or avipox, e.g. canary pox or fowl pox; and (j) a helper-dependent or gutless adenovirus. Replication-defective viruses can also be advantageous. Different vectors will or will not become incorporated into the cells' genome. The constructs can include viral sequences for transfection, if desired. Alternatively, the construct can be incorporated into vectors capable of episomal replication, e.g. EPV and EBV vectors. Constructs for the recombinant expression of an iRNA will generally require regulatory elements, e.g., promoters, enhancers, etc., to ensure the expression of the iRNA in target cells. Other aspects to consider for vectors and constructs are further described below.

[0224] Vectors useful for the delivery of an iRNA will include regulatory elements (promoter, enhancer, etc.) sufficient for expression of the iRNA in the desired target cell or tissue. The regulatory elements can be chosen to provide either constitutive or regulated/inducible expression.

[0225] Expression of the iRNA can be precisely regulated, for example, by using an inducible regulatory sequence that is sensitive to certain physiological regulators, e.g., circulating glucose levels, or hormones (Docherty et al., 1994, FASEB J. 8:20-24). Such inducible expression systems, suitable for the control of dsRNA expression in cells or in mammals include, for example, regulation by ecdysone, by estrogen, progesterone, tetracycline, chemical inducers of dimerization, and isopropyl-beta-D1-thiogalactopyranoside (IPTG). A person skilled in the art would be able to choose the appropriate regulatory/promoter sequence based on the intended use of the iRNA transgene.

[0226] Viral vectors that contain nucleic acid sequences encoding an iRNA can be used. For example, a retroviral vector can be used (see Miller et al., Meth. Enzymol. 217:581-599 (1993)). These retroviral vectors contain the components necessary for the correct packaging of the viral genome and integration into the host cell DNA. The nucleic acid sequences encoding an iRNA are cloned into one or more vectors, which facilitate delivery of the nucleic acid into a patient. More detail about retroviral vectors can be found, for example, in Boesen et al., Biotherapy 6:291-302 (1994), which describes the use of a retroviral vector to deliver the mdrl gene to hematopoietic stem cells in order to make the stem cells more resistant to chemotherapy. Other references illustrating the use of retroviral vectors in gene therapy are: Clowes et al., J. Clin. Invest. 93:644-651 (1994); Kiem et al., Blood 83:1467-1473 (1994); Salmons and Gunzberg, Human Gene Therapy 4:129-141 (1993); and Grossman and Wilson, Curr. Opin. in Genetics and Devel. 3:110-114 (1993). Lentiviral vectors contemplated for use include, for example, the HIV based vectors described in U.S. Pat. Nos. 6,143,520; 5,665,557; and 5,981,276, which are herein incorporated by reference.

[0227] Adenoviruses are also contemplated for use in delivery of iRNAs of the invention. Adenoviruses are especially attractive vehicles, e.g., for delivering genes to respiratory epithelia. Adenoviruses naturally infect respiratory epithelia where they cause a mild disease. Other targets for adenovirus-based delivery systems are liver, the central nervous system, endothelial cells, and muscle. Adenoviruses have the advantage of being capable of infecting non-dividing cells. Kozarsky and Wilson, Current Opinion in Genetics and Development 3:499-503 (1993) present a review of adenovirus-based gene therapy. Bout et al., Human Gene Therapy 5:3-10 (1994) demonstrated the use of adenovirus vectors to transfer genes to the respiratory epithelia of rhesus monkeys. Other instances of the use of adenoviruses in gene therapy can be found in Rosenfeld et al., Science 252:431-434 (1991); Rosenfeld et al., Cell 68:143-155 (1992); Mastrangeli et al., J. Clin. Invest. 91:225-234 (1993); PCT Publication WO94/12649; and Wang, et al., Gene Therapy 2:775-783 (1995). A suitable AV vector for expressing an iRNA featured in the invention, a method for constructing the recombinant AV vector, and a method for delivering the vector into target cells, are described in Xia H et al. (2002), Nat. Biotech. 20: 1006-1010.

[0228] Adeno-associated virus (AAV) vectors may also be used to delivery an iRNA of the invention (Walsh et al., Proc. Soc. Exp. Biol. Med. 204:289-300 (1993); U.S. Pat. No. 5,436,146). In one embodiment, the iRNA can be expressed as two separate, complementary single-stranded RNA molecules from a recombinant AAV vector having, for example, either the U6 or H1 RNA promoters, or the cytomegalovirus (CMV) promoter. Suitable AAV vectors for expressing the dsRNA featured in the invention, methods for constructing the recombinant AV vector, and methods for delivering the vectors into target cells are described in Samulski R et al. (1987), J. Virol. 61: 3096-3101; Fisher K J et al. (1996), J. Virol, 70: 520-532; Samulski R et al. (1989), J. Virol. 63: 3822-3826; U.S. Pat. Nos. 5,252,479; 5,139,941; International Patent Application No. WO 94/13788; and International Patent Application No. WO 93/24641, the entire disclosures of which are herein incorporated by reference.

[0229] Another viral vector suitable for delivery of an iRNA of the invention is a pox virus such as a vaccinia virus, for example an attenuated vaccinia such as Modified Virus Ankara (MVA) or NYVAC, an avipox such as fowl pox or canary pox.

[0230] The tropism of viral vectors can be modified by pseudotyping the vectors with envelope proteins or other surface antigens from other viruses, or by substituting different viral capsid proteins, as appropriate. For example, lentiviral vectors can be pseudotyped with surface proteins from vesicular stomatitis virus (VSV), rabies, Ebola, Mokola, and the like. AAV vectors can be made to target different cells by engineering the vectors to express different capsid protein serotypes; see, e.g., Rabinowitz J E et al. (2002), J Virol 76:791-801, the entire disclosure of which is herein incorporated by reference.

[0231] The pharmaceutical preparation of a vector can include the vector in an acceptable diluent, or can include a slow release matrix in which the gene delivery vehicle is imbedded. Alternatively, where the complete gene delivery vector can be produced intact from recombinant cells, e.g., retroviral vectors, the pharmaceutical preparation can include one or more cells which produce the gene delivery system.

### IV. Double Stranded iRNA Agents for Use in the Methods of the Invention

[0232] Suitable double-stranded RNAi agents for use on the methods of the invention include an antisense strand having a region of complementarity which is complementary to at least a part of an mRNA formed in the expression of a HAO1 gene. The region of complementarity is about 19-30 nucleotides in length (e.g., about 30, 29, 28, 27, 26, 25, 24, 23, 22, 21, 20, or 19 nucleotides in length). Upon contact with a cell expressing the HAO1 gene, the iRNA inhibits the expression of the gene (e.g., a human, a primate, a non-primate, or a rat HAO1 gene) by at least about 50% as assayed by, for example, a PCR or branched DNA (bDNA)-based method, or by a protein-based method, such as by immunofluorescence analysis, using, for example, western blotting or flow cytometric techniques. In preferred embodiments, inhibition of expression is determined by the qPCR method with the siRNA at a 10 nM concentration in an appropriate organism cell line provided therein. In preferred embodiments, inhibition of expression in vivo is determined by knockdown of the human gene in a rodent expressing the human gene, e.g., a mouse or an AAV-infected mouse expressing the human target gene, e.g., when administered a single dose, e.g., at 3 mg/kg at the nadir of RNA expression. RNA expression in liver is determined using the PCR methods.

[0233] A dsRNA includes two RNA strands that are complementary and hybridize to form a duplex structure under conditions in which the dsRNA will be used. One strand of a dsRNA (the antisense strand) includes a region of complementarity that is substantially complementary, and generally fully complementary, to a target sequence. The target sequence can be derived from the sequence of an mRNA formed during the expression of a HAO1 gene. The other strand (the sense strand) includes a region that is complementary to the antisense strand, such that the two strands hybridize and form a duplex structure when combined under suitable conditions. As described elsewhere herein and as known in the art, the complementary sequences of a dsRNA can also be contained as self-complementary regions of a single nucleic acid molecule, as opposed to being on separate oligonucleotides.

[0234] In some embodiment, the dsRNAi agent comprises a sense strand and an antisense strand forming a double stranded region, wherein the sense strand comprises at least 15 contiguous nucleotides differing by no more than 1, 2, or 3 nucleotides from the nucleotide sequence of any one of SEQ ID NOs:1, 2, 5, 6, and 2986-2988 and the antisense strand comprises at least 15 contiguous nucleotides differing by no more than 1, 2, or 3 nucleotides from the nucleotide sequence of any one of SEQ ID NOs: 3, 4, 7, 8, and 2989-2992.

[0235] Generally, the duplex structure is 19 to 30 base pairs in length. Similarly, the region of complementarity to the target sequence is 19 to 30 nucleotides in length.

[0236] In some embodiments, the dsRNA is about 19 to about 23 nucleotides in length, or about 25 to about 30 nucleotides in length. In general, the dsRNA is long enough to serve as a substrate for the Dicer enzyme. For example, it is well-known in the art that dsRNAs longer than about 21-23 nucleotides in length may serve as substrates for Dicer. As the ordinarily skilled person will also recognize, the region of an RNA targeted for cleavage will most often be part of a larger RNA molecule, often an mRNA molecule. Where relevant, a “part” of an mRNA target is a contiguous sequence of an mRNA target of sufficient length to allow it to be a substrate for RNAi-directed cleavage (i.e., cleavage through a RISC pathway).

[0237] One of skill in the art will also recognize that the duplex region is a primary functional portion of a dsRNA, e.g., a duplex region of about 19 to about 30 base pairs, e.g., about 19-30, 19-29, 19-28, 19-27, 19-26, 19-25, 19-24, 19-23, 19-22, 19-21, 19-20, 20-30, 20-29, 20-28, 20-27, 20-26, 20-25, 20-24, 20-23, 20-22, 20-21, 21-30, 21-29, 21-28, 21-27, 21-26, 21-25, 21-24, 21-23, or 21-22 base pairs. Thus, in one embodiment, to the extent that it becomes processed to a functional duplex, of e.g., 15-30 base pairs, that targets a desired RNA for cleavage, an RNA molecule or complex of RNA molecules having a duplex region greater than 30 base pairs is a dsRNA. Thus, an ordinarily skilled artisan will recognize that in one embodiment, a miRNA is a dsRNA. In another embodiment, a dsRNA is not a naturally occurring miRNA. In another embodiment, an iRNA agent useful to target expression of a HAO1 gene, is not generated in the target cell by cleavage of a larger dsRNA.

[0238] A dsRNA as described herein can further include one or more single-stranded nucleotide overhangs e.g., 1-4, 2-4, 1-3, 2-3, 1, 2, 3, or 4 nucleotides. dsRNAs having at least one nucleotide overhang can have superior inhibitory properties relative to their blunt-ended counterparts. A nucleotide overhang can comprise or consist of a nucleotide/nucleoside analog, including a deoxynucleotide/nucleoside. The overhang(s) can be on the sense strand, the antisense strand, or any combination thereof. Furthermore, the nucleotide(s) of an overhang can be present on the 5′-end, 3′-end, or both ends of an antisense or sense strand of a dsRNA.

[0239] The overhangs can be the result of one strand being longer than the other, or the result of two strands of the same length being staggered. The overhang can form a mismatch with the target mRNA or it can be complementary to the gene sequences being targeted or can be another sequence. The first and second strands can also be joined, e.g., by additional bases to form a hairpin, or by other non-base linkers.

[0240] In one embodiment, the nucleotides in the overhang region of the RNAi agent can each independently be a modified or unmodified nucleotide including, but not limited to 2′-sugar modified, such as, 2-F, 2′-O-methyl, thymidine (T), 2′-O-methoxyethyl-5-methyluridine (Teo), 2′-O-methoxyethyladenosine (Aeo), 2′-O-methoxyethyl-5-methylcytidine (m5Ceo), and any combinations thereof. For example, TT can be an overhang sequence for either end on either strand. The overhang can form a mismatch with the target mRNA or it can be complementary to the gene sequences being targeted or can be another sequence.

[0241] The 5′- or 3′-overhangs at the sense strand, antisense strand or both strands of the RNAi agent may be phosphorylated. In some embodiments, the overhang region(s) contains two nucleotides having a phosphorothioate between the two nucleotides, where the two nucleotides can be the same or different. In one embodiment, the overhang is present at the 3′-end of the sense strand, antisense strand, or both strands. In one embodiment, this 3′-overhang is present in the antisense strand. In one embodiment, this 3′-overhang is present in the sense strand.

[0242] The RNAi agent may contain only a single overhang, which can strengthen the interference activity of the RNAi, without affecting its overall stability. For example, the single-stranded overhang may be located at the 3′-terminal end of the sense strand or, alternatively, at the 3′-terminal end of the antisense strand. The RNAi may also have a blunt end, located at the 5′-end of the antisense strand (or the 3′-end of the sense strand) or vice versa. Generally, the antisense strand of the RNAi has a nucleotide overhang at the 3′-end, and the 5′-end is blunt. While not wishing to be bound by theory, the asymmetric blunt end at the 5′-end of the antisense strand and 3′-end overhang of the antisense strand favor the guide strand loading into RISC process.

[0243] In some embodiments, the double-stranded RNAi agents for use in the methods of the present invention are unmodified. In other embodiments, the double-stranded RNAi agents for use in the methods of the present invention are modified, e.g., comprise chemical modifications capable of inhibiting the expression of a target gene (i.e., a HAO1 gene) in vivo.

[0244] As described in more detail below, in certain aspects of the invention, substantially all of the nucleotides of an iRNA of the invention are modified. In other embodiments of the invention, all of the nucleotides of an iRNA of the invention are modified. iRNAs of the invention in which “substantially all of the nucleotides are modified” are largely but not wholly modified and can include not more than 5, 4, 3, 2, or 1 unmodified nucleotides.

[0245] Any of the nucleic acids, e.g., RNAi, featured in the invention can be synthesized and/or modified by methods well established in the art, such as those described in “Current protocols in nucleic acid chemistry,” Beaucage, S. L. et al. (Edrs.), John Wiley & Sons, Inc., New York, NY, USA, which is hereby incorporated herein by reference. Modifications include, for example, end modifications, e.g., 5′-end modifications (phosphorylation, conjugation, inverted linkages) or 3′-end modifications (conjugation, DNA nucleotides, inverted linkages, etc.); base modifications, e.g., replacement with stabilizing bases, destabilizing bases, or bases that base pair with an expanded repertoire of partners, removal of bases (abasic nucleotides), or conjugated bases; sugar modifications (e.g., at the 2′-position or 4′-position) or replacement of the sugar; and/or backbone modifications, including modification or replacement of the phosphodiester linkages. Specific examples of iRNA compounds useful in the embodiments described herein include, but are not limited to RNAs containing modified backbones or no natural internucleoside linkages. RNAs having modified backbones include, among others, those that do not have a phosphorus atom in the backbone. For the purposes of this specification, and as sometimes referenced in the art, modified RNAs that do not have a phosphorus atom in their internucleoside backbone can also be considered to be oligonucleosides. In some embodiments, a modified iRNA will have a phosphorus atom in its internucleoside backbone.

[0246] Modified RNA backbones include, for example, phosphorothioates, chiral phosphorothioates, phosphorodithioates, phosphotriesters, aminoalkylphosphotriesters, methyl and other alkyl phosphonates including 3′-alkylene phosphonates and chiral phosphonates, phosphinates, phosphoramidates including 3′-amino phosphoramidate and aminoalkylphosphoramidates, thionophosphoramidates, thionoalkylphosphonates, thionoalkylphosphotriesters, and boranophosphates having normal 3′-5′ linkages, 2′-5′-linked analogs of these, and those having inverted polarity wherein the adjacent pairs of nucleoside units are linked 3′-5′ to 5′-3′ or 2′-5′ to 5′-2′. Various salts, mixed salts and free acid forms are also included.

[0247] Representative U.S. patents that teach the preparation of the above phosphorus-containing linkages include, but are not limited to, U.S. Pat. Nos. 3,687,808; 4,469,863; 4,476,301; 5,023,243; 5,177,195; 5,188,897; 5,264,423; 5,276,019; 5,278,302; 5,286,717; 5,321,131; 5,399,676; 5,405,939; 5,453,496; 5,455,233; 5,466,677; 5,476,925; 5,519,126; 5,536,821; 5,541,316; 5,550,111; 5,563,253; 5,571,799; 5,587,361; 5,625,050; 6,028,188; 6,124,445; 6,160,109; 6,169,170; 6,172,209; 6,239,265; 6,277,603; 6,326,199; 6,346,614; 6,444,423; 6,531,590; 6,534,639; 6,608,035; 6,683,167; 6,858,715; 6,867,294; 6,878,805; 7,015,315; 7,041,816; 7,273,933; 7,321,029; and U.S. Pat. RE39464, the entire contents of each of which are hereby incorporated herein by reference.

[0248] Modified RNA backbones that do not include a phosphorus atom therein have backbones that are formed by short chain alkyl or cycloalkyl internucleoside linkages, mixed heteroatoms and alkyl or cycloalkyl internucleoside linkages, or one or more short chain heteroatomic or heterocyclic internucleoside linkages. These include those having morpholino linkages (formed in part from the sugar portion of a nucleoside); siloxane backbones; sulfide, sulfoxide and sulfone backbones; formacetyl and thioformacetyl backbones; methylene formacetyl and thioformacetyl backbones; alkene containing backbones; sulfamate backbones; methyleneimino and methylenehydrazino backbones; sulfonate and sulfonamide backbones; amide backbones; and others having mixed N, O, S and CH₂ component parts.

[0249] Representative U.S. patents that teach the preparation of the above oligonucleosides include, but are not limited to, U.S. Pat. Nos. 5,034,506; 5,166,315; 5,185,444; 5,214,134; 5,216,141; 5,235,033; 5,64,562; 5,264,564; 5,405,938; 5,434,257; 5,466,677; 5,470,967; 5,489,677; 5,541,307; 5,561,225; 5,596,086; 5,602,240; 5,608,046; 5,610,289; 5,618,704; 5,623,070; 5,663,312; 5,633,360; 5,677,437; and, 5,677,439, the entire contents of each of which are hereby incorporated herein by reference.

[0250] In other embodiments, suitable RNA mimetics are contemplated for use in iRNAs, in which both the sugar and the internucleoside linkage, i.e., the backbone, of the nucleotide units are replaced with novel groups. The base units are maintained for hybridization with an appropriate nucleic acid target compound. One such oligomeric compound, an RNA mimetic that has been shown to have excellent hybridization properties, is referred to as a peptide nucleic acid (PNA). In PNA compounds, the sugar backbone of an RNA is replaced with an amide containing backbone, in particular an aminoethylglycine backbone. The nucleobases are retained and are bound directly or indirectly to aza nitrogen atoms of the amide portion of the backbone. Representative U.S. patents that teach the preparation of PNA compounds include, but are not limited to, U.S. Pat. Nos. 5,539,082; 5,714,331; and 5,719,262, the entire contents of each of which are hereby incorporated herein by reference. Additional PNA compounds suitable for use in the iRNAs of the invention are described in, for example, in Nielsen et al., Science, 1991, 254, 1497-1500.

[0251] Some embodiments featured in the invention include RNAs with phosphorothioate backbones and oligonucleosides with heteroatom backbones, and in particular —CH₂—NH—CH₂—, —CH₂—N(CH₃)—O—CH₂-[known as a methylene (methylimino) or MMI backbone], —CH₂—O—N(CH₃)—CH₂—, —CH₂—N(CH₃)—N(CH₃)—CH₂— and —N(CH₃)—CH₂—CH₂-[wherein the native phosphodiester backbone is represented as —O—P—O—CH₂-] of the above-referenced U.S. Pat. No. 5,489,677, and the amide backbones of the above-referenced U.S. Pat. No. 5,602,240. In some embodiments, the RNAs featured herein have morpholino backbone structures of the above-referenced U.S. Pat. No. 5,034,506.

[0252] Modified RNAs can also contain one or more substituted sugar moieties. The iRNAs, e.g., dsRNAs, featured herein can include one of the following at the 2′-position: OH; F; O-, S-, or N-alkyl; O-, S-, or N-alkenyl; O-, S- or N-alkynyl; or O-alkyl-O-alkyl, wherein the alkyl, alkenyl and alkynyl can be substituted or unsubstituted C₁ to C₁₀ alkyl or C₂ to C₁₀ alkenyl and alkynyl. Exemplary suitable modifications include O[(CH₂)ₙO]ₘCH₃, O(CH₂)·ₙOCH₃, O(CH₂)ₙNH₂, O(CH₂)ₙCH₃, O(CH₂)ₙONH₂, and O(CH₂)ₙON[(CH₂)ₙCH₃)]₂, where n and m are from 1 to about 10. In other embodiments, dsRNAs include one of the following at the 2′ position: C₁ to C₁₀ lower alkyl, substituted lower alkyl, alkaryl, aralkyl, O-alkaryl or O-aralkyl, SH, SCH₃, OCN, Cl, Br, CN, CF₃, OCF₃, SOCH₃, SO₂CH₃, ONO₂, NO₂, N₃, NH₂, heterocycloalkyl, heterocycloalkaryl, aminoalkylamino, polyalkylamino, substituted silyl, an RNA cleaving group, a reporter group, an intercalator, a group for improving the pharmacokinetic properties of an iRNA, or a group for improving the pharmacodynamic properties of an iRNA, and other substituents having similar properties. In some embodiments, the modification includes a 2′-methoxyethoxy (2′-O—CH₂CH₂OCH₃, also known as 2′-O-(2-methoxyethyl) or 2′-MOE) (Martin et al., Helv. Chim. Acta, 1995, 78:486-504) i.e., an alkoxy-alkoxy group. Another exemplary modification is 2′-dimethylaminooxyethoxy, i.e., a O(CH₂)₂ON(CH₃)₂ group, also known as 2′-DMAOE, as described in examples herein below, and 2′-dimethylaminoethoxyethoxy (also known in the art as 2′-O-dimethylaminoethoxyethyl or 2′-DMAEOE), i.e., 2′-O—CH₂—O—CH₂—N(CH₂)₂.

[0253] Other modifications include 2′-methoxy (2′-OCH₃), 2′-aminopropoxy (2′-OCH₂CH₂CH₂NH₂) and 2′-fluoro (2′-F). Similar modifications can also be made at other positions on the RNA of an iRNA, particularly the 3′ position of the sugar on the 3′ terminal nucleotide or in 2′-5′ linked dsRNAs and the 5′ position of 5′ terminal nucleotide. iRNAs can also have sugar mimetics such as cyclobutyl moieties in place of the pentofuranosyl sugar. Representative U.S. patents that teach the preparation of such modified sugar structures include, but are not limited to, U.S. Pat. Nos. 4,981,957; 5,118,800; 5,319,080; 5,359,044; 5,393,878; 5,446,137; 5,466,786; 5,514,785; 5,519,134; 5,567,811; 5,576,427; 5,591,722; 5,597,909; 5,610,300; 5,627,053; 5,639,873; 5,646,265; 5,658,873; 5,670,633; and 5,700,920, certain of which are commonly owned with the instant application. The entire contents of each of the foregoing are hereby incorporated herein by reference.

[0254] An iRNA can also include nucleobase (often referred to in the art simply as “base”) modifications or substitutions. As used herein, “unmodified” or “natural” nucleobases include the purine bases adenine (A) and guanine (G), and the pyrimidine bases thymine (T), cytosine (C) and uracil (U). Modified nucleobases include other synthetic and natural nucleobases such as deoxy-thymine (dT), 5-methylcytosine (5-me-C), 5-hydroxymethyl cytosine, xanthine, hypoxanthine, 2-aminoadenine, 6-methyl and other alkyl derivatives of adenine and guanine, 2-propyl and other alkyl derivatives of adenine and guanine, 2-thiouracil, 2-thiothymine and 2-thiocytosine, 5-halouracil and cytosine, 5-propynyl uracil and cytosine, 6-azo uracil, cytosine and thymine, 5-uracil (pseudouracil), 4-thiouracil, 8-halo, 8-amino, 8-thiol, 8-thioalkyl, 8-hydroxyl anal other 8-substituted adenines and guanines, 5-halo, particularly 5-bromo, 5-trifluoromethyl and other 5-substituted uracils and cytosines, 7-methylguanine and 7-methyladenine, 8-azaguanine and 8-azaadenine, 7-deazaguanine and 7-daazaadenine and 3-deazaguanine and 3-deazaadenine. Further nucleobases include those disclosed in U.S. Pat. No. 3,687,808, those disclosed in Modified Nucleosides in Biochemistry, Biotechnology and Medicine, Herdewijn, P. ed. Wiley-VCH, 2008; those disclosed in The Concise Encyclopedia Of Polymer Science And Engineering, pages 858-859, Kroschwitz, J. L, ed. John Wiley & Sons, 1990, these disclosed by Englisch et al., Angewandte Chemie, International Edition, 1991, 30, 613, and those disclosed by Sanghvi, Y S., Chapter 15, dsRNA Research and Applications, pages 289-302, Crooke, S. T. and Lebleu, B., Ed., CRC Press, 1993. Certain of these nucleobases are particularly useful for increasing the binding affinity of the oligomeric compounds featured in the invention. These include 5-substituted pyrimidines, 6-azapyrimidines and N-2, N-6 and 0-6 substituted purines, including 2-aminopropyladenine, 5-propynyluracil and 5-propynylcytosine. 5-methylcytosine substitutions have been shown to increase nucleic acid duplex stability by 0.6-1.2° C. (Sanghvi, Y. S., Crooke, S. T. and Lebleu, B., Eds., dsRNA Research and Applications, CRC Press, Boca Raton, 1993, pp. 276-278) and are exemplary base substitutions, even more particularly when combined with 2′-O-methoxyethyl sugar modifications.

[0255] Representative U.S. patents that teach the preparation of certain of the above noted modified nucleobases as well as other modified nucleobases include, but are not limited to, the above noted U.S. Pat. Nos. 3,687,808, 4,845,205; 5,130,30; 5,134,066; 5,175,273; 5,367,066; 5,432,272; 5,457,187; 5,459,255; 5,484,908; 5,502,177; 5,525,711; 5,552,540; 5,587,469; 5,594,121, 5,596,091; 5,614,617; 5,681,941; 5,750,692; 6,015,886; 6,147,200; 6,166,197; 6,222,025; 6,235,887; 6,380,368; 6,528,640; 6,639,062; 6,617,438; 7,045,610; 7,427,672; and 7,495,088, the entire contents of each of which are hereby incorporated herein by reference.

[0256] The RNA of an iRNA can also be modified to include one or more locked nucleic acids (LNA). A locked nucleic acid is a nucleotide having a modified ribose moiety in which the ribose moiety comprises an extra bridge connecting the 2′ and 4′ carbons. This structure effectively “locks” the ribose in the 3′-endo structural conformation. The addition of locked nucleic acids to siRNAs has been shown to increase siRNA stability in serum, and to reduce off-target effects (Elmen, J. et al., (2005) Nucleic Acids Research 33(1):439-447; Mook, O R. et al., (2007) Mol Canc Ther 6(3):833-843; Grunweller, A. et al., (2003) Nucleic Acids Research 31(12):3185-3193).

[0257] Representative U.S. patents that teach the preparation of locked nucleic acid nucleotides include, but are not limited to, the following: U.S. Pat. Nos. 6,268,490; 6,670,461; 6,794,499; 6,998,484; 7,053,207; 7,084,125; and 7,399,845, the entire contents of each of which are hereby incorporated herein by reference.

[0258] Potentially stabilizing modifications to the ends of RNA molecules can include N-(acetylaminocaproyl)-4-hydroxyprolinol (Hyp-C6-NHAc), N-(caproyl-4-hydroxyprolinol (Hyp-C6), N-(acetyl-4-hydroxyprolinol (Hyp-NHAc), thymidine-2′-O-deoxythymidine (ether), N-(aminocaproyl)-4-hydroxyprolinol (Hyp-C6-amino), 2-docosanoyl-uridine-3″-phosphate, inverted base dT(idT) and others. Disclosure of this modification can be found in PCT Publication No. WO 2011/005861.

[0259] A. Modified iRNAs Comprising Motifs of the Invention

[0260] In certain aspects of the invention, the double-stranded RNAi agents of the invention include agents with chemical modifications as disclosed, for example, in U.S. Provisional Application No. 61/561,710, filed on Nov. 18, 2011, or in PCT/US2012/065691, filed on Nov. 16, 2012, and published as WO2013075035 A1, the entire contents of each of which are incorporated herein by reference.

[0261] As shown herein and in Provisional Application No. 61/561,710, a superior result may be obtained by introducing one or more motifs of three identical modifications on three consecutive nucleotides into a sense strand and/or antisense strand of a RNAi agent, particularly at or near the cleavage site. In some embodiments, the sense strand and antisense strand of the RNAi agent may otherwise be completely modified. The introduction of these motifs interrupts the modification pattern, if present, of the sense and/or antisense strand. The RNAi agent may be optionally conjugated with a GalNAc derivative ligand, for instance on the sense strand. The resulting RNAi agents present superior gene silencing activity.

[0262] More specifically, it has been surprisingly discovered that when the sense strand and antisense strand of the double-stranded RNAi agent are modified to have one or more motifs of three identical modifications on three consecutive nucleotides at or near the cleavage site of at least one strand of an RNAi agent, the gene silencing activity of the RNAi agent was superiorly enhanced.

[0263] In one embodiment, the RNAi agent is a double ended bluntmer of 19 nucleotides in length, wherein the sense strand contains at least one motif of three 2′-F modifications on three consecutive nucleotides at positions 7, 8, 9 from the 5′ end. The antisense strand contains at least one motif of three 2′-O-methyl modifications on three consecutive nucleotides at positions 11, 12, 13 from the 5′ end.

[0264] In another embodiment, the RNAi agent is a double ended bluntmer of 20 nucleotides in length, wherein the sense strand contains at least one motif of three 2′-F modifications on three consecutive nucleotides at positions 8, 9, 10 from the 5′ end. The antisense strand contains at least one motif of three 2′-O-methyl modifications on three consecutive nucleotides at positions 11, 12, 13 from the 5′ end.

[0265] In yet another embodiment, the RNAi agent is a double ended bluntmer of 21 nucleotides in length, wherein the sense strand contains at least one motif of three 2′-F modifications on three consecutive nucleotides at positions 9, 10, 11 from the 5′ end. The antisense strand contains at least one motif of three 2′-O-methyl modifications on three consecutive nucleotides at positions 11, 12, 13 from the 5′ end.

[0266] In one embodiment, the RNAi agent comprises a 21 nucleotide sense strand and a 23 nucleotide antisense strand, wherein the sense strand contains at least one motif of three 2′-F modifications on three consecutive nucleotides at positions 9, 10, 11 from the 5′ end; the antisense strand contains at least one motif of three 2′-O-methyl modifications on three consecutive nucleotides at positions 11, 12, 13 from the 5′ end, wherein one end of the RNAi agent is blunt, while the other end comprises a 2 nucleotide overhang. Preferably, the 2 nucleotide overhang is at the 3′-end of the antisense strand. When the 2 nucleotide overhang is at the 3′-end of the antisense strand, there may be two phosphorothioate internucleotide linkages between the terminal three nucleotides, wherein two of the three nucleotides are the overhang nucleotides, and the third nucleotide is a paired nucleotide next to the overhang nucleotide. In one embodiment, the RNAi agent additionally has two phosphorothioate internucleotide linkages between the terminal three nucleotides at both the 5′-end of the sense strand and at the 5′-end of the antisense strand. In one embodiment, every nucleotide in the sense strand and the antisense strand of the RNAi agent, including the nucleotides that are part of the motifs are modified nucleotides. In one embodiment each residue is independently modified with a 2′-O-methyl or 3′-fluoro, e.g., in an alternating motif. Optionally, the RNAi agent further comprises a ligand (preferably GalNAc₃).

[0267] In one embodiment, the RNAi agent comprises sense and antisense strands, wherein the RNAi agent comprises a first strand having a length which is at least 25 and at most 29 nucleotides and a second strand having a length which is at most 30 nucleotides with at least one motif of three 2′-O-methyl modifications on three consecutive nucleotides at position 11, 12, 13 from the 5′ end; wherein the 3′ end of the first strand and the 5′ end of the second strand form a blunt end and the second strand is 1-4 nucleotides longer at its 3′ end than the first strand, wherein the duplex region which is at least 25 nucleotides in length, and the second strand is sufficiently complementary to a target mRNA along at least 19 nucleotide of the second strand length to reduce target gene expression when the RNAi agent is introduced into a mammalian cell, and wherein dicer cleavage of the RNAi agent preferentially results in an siRNA comprising the 3′ end of the second strand, thereby reducing expression of the target gene in the mammal. Optionally, the RNAi agent further comprises a ligand.

[0268] In one embodiment, the sense strand of the RNAi agent contains at least one motif of three identical modifications on three consecutive nucleotides, where one of the motifs occurs at the cleavage site in the sense strand.

[0269] In one embodiment, the antisense strand of the RNAi agent can also contain at least one motif of three identical modifications on three consecutive nucleotides, where one of the motifs occurs at or near the cleavage site in the antisense strand

[0270] For an RNAi agent having a duplex region of 17-23 nucleotides in length, the cleavage site of the antisense strand is typically around the 10, 11 and 12 positions from the 5′-end. Thus the motifs of three identical modifications may occur at the 9, 10, 11 positions; 10, 11, 12 positions; 11, 12, 13 positions; 12, 13, 14 positions; or 13, 14, 15 positions of the antisense strand, the count starting from the 1^{st} nucleotide from the 5′-end of the antisense strand, or, the count starting from the 1^{st} paired nucleotide within the duplex region from the 5′-end of the antisense strand. The cleavage site in the antisense strand may also change according to the length of the duplex region of the RNAi from the 5′-end.

[0271] The sense strand of the RNAi agent may contain at least one motif of three identical modifications on three consecutive nucleotides at the cleavage site of the strand; and the antisense strand may have at least one motif of three identical modifications on three consecutive nucleotides at or near the cleavage site of the strand. When the sense strand and the antisense strand form a dsRNA duplex, the sense strand and the antisense strand can be so aligned that one motif of the three nucleotides on the sense strand and one motif of the three nucleotides on the antisense strand have at least one nucleotide overlap, i.e., at least one of the three nucleotides of the motif in the sense strand forms a base pair with at least one of the three nucleotides of the motif in the antisense strand. Alternatively, at least two nucleotides may overlap, or all three nucleotides may overlap.

[0272] In one embodiment, the sense strand of the RNAi agent may contain more than one motif of three identical modifications on three consecutive nucleotides. The first motif may occur at or near the cleavage site of the strand and the other motifs may be a wing modification. The term “wing modification” herein refers to a motif occurring at another portion of the strand that is separated from the motif at or near the cleavage site of the same strand. The wing modification is either adjacent to the first motif or is separated by at least one or more nucleotides. When the motifs are immediately adjacent to each other than the chemistry of the motifs are distinct from each other and when the motifs are separated by one or more nucleotide than the chemistries can be the same or different. Two or more wing modifications may be present. For instance, when two wing modifications are present, each wing modification may occur at one end relative to the first motif which is at or near cleavage site or on either side of the lead motif.

[0273] Like the sense strand, the antisense strand of the RNAi agent may contain more than one motifs of three identical modifications on three consecutive nucleotides, with at least one of the motifs occurring at or near the cleavage site of the strand. This antisense strand may also contain one or more wing modifications in an alignment similar to the wing modifications that may be present on the sense strand.

[0274] In one embodiment, the wing modification on the sense strand or antisense strand of the RNAi agent typically does not include the first one or two terminal nucleotides at the 3′-end, 5′-end or both ends of the strand.

[0275] In another embodiment, the wing modification on the sense strand or antisense strand of the RNAi agent typically does not include the first one or two paired nucleotides within the duplex region at the 3′-end, 5′-end or both ends of the strand.

[0276] When the sense strand and the antisense strand of the RNAi agent each contain at least one wing modification, the wing modifications may fall on the same end of the duplex region, and have an overlap of one, two or three nucleotides.

[0277] When the sense strand and the antisense strand of the RNAi agent each contain at least two wing modifications, the sense strand and the antisense strand can be so aligned that two modifications each from one strand fall on one end of the duplex region, having an overlap of one, two or three nucleotides; two modifications each from one strand fall on the other end of the duplex region, having an overlap of one, two or three nucleotides; two modifications one strand fall on each side of the lead motif, having an overlap of one, two or three nucleotides in the duplex region.

[0278] In one embodiment, every nucleotide in the sense strand and antisense strand of the RNAi agent, including the nucleotides that are part of the motifs, may be modified. Each nucleotide may be modified with the same or different modification which can include one or more alteration of one or both of the non-linking phosphate oxygens and/or of one or more of the linking phosphate oxygens; alteration of a constituent of the ribose sugar, e.g., of the 2′ hydroxyl on the ribose sugar; wholesale replacement of the phosphate moiety with “dephospho” linkers; modification or replacement of a naturally occurring base; and replacement or modification of the ribose-phosphate backbone.

[0279] As nucleic acids are polymers of subunits, many of the modifications occur at a position which is repeated within a nucleic acid, e.g., a modification of a base, or a phosphate moiety, or a non-linking O of a phosphate moiety. In some cases the modification will occur at all of the subject positions in the nucleic acid but in many cases it will not. By way of example, a modification may only occur at a 3′ or 5′ terminal position, may only occur in a terminal region, e.g., at a position on a terminal nucleotide or in the last 2, 3, 4, 5, or 10 nucleotides of a strand. A modification may occur in a double strand region, a single strand region, or in both. A modification may occur only in the double strand region of a RNA or may only occur in a single strand region of a RNA. For example, a phosphorothioate modification at a non-linking O position may only occur at one or both termini, may only occur in a terminal region, e.g., at a position on a terminal nucleotide or in the last 2, 3, 4, 5, or 10 nucleotides of a strand, or may occur in double strand and single strand regions, particularly at termini. The 5′ end or ends can be phosphorylated.

[0280] It may be possible, e.g., to enhance stability, to include particular bases in overhangs, or to include modified nucleotides or nucleotide surrogates, in single strand overhangs, e.g., in a 5′ or 3′ overhang, or in both. For example, it can be desirable to include purine nucleotides in overhangs. In some embodiments all or some of the bases in a 3′ or 5′ overhang may be modified, e.g., with a modification described herein. Modifications can include, e.g., the use of modifications at the 2′ position of the ribose sugar with modifications that are known in the art, e.g., the use of deoxyribonucleotides, 2′-deoxy-2′-fluoro (2′-F) or 2′-O-methyl modified instead of the ribosugar of the nucleobase, and modifications in the phosphate group, e.g., phosphorothioate modifications. Overhangs need not be homologous with the target sequence.

[0281] In one embodiment, each residue of the sense strand and antisense strand is independently modified with LNA, HNA, CeNA, 2′-methoxyethyl, 2′-O-methyl, 2′-O-allyl, 2′-C-allyl, 2′-deoxy, 2′-hydroxyl, or 2′-fluoro. The strands can contain more than one modification. In one embodiment, each residue of the sense strand and antisense strand is independently modified with 2′-O-methyl or 2′-fluoro.

[0282] At least two different modifications are typically present on the sense strand and antisense strand. Those two modifications may be the 2′-O-methyl or 2′-fluoro modifications, or others.

[0283] In one embodiment, the Nₐ and/or N_{b} comprise modifications of an alternating pattern. The term “alternating motif” as used herein refers to a motif having one or more modifications, each modification occurring on alternating nucleotides of one strand. The alternating nucleotide may refer to one per every other nucleotide or one per every three nucleotides, or a similar pattern. For example, if A, B and C each represent one type of modification to the nucleotide, the alternating motif can be “ABABABABABAB . . . ,” “AABBAABBAABB . . . ,” “AABAABAABAAB . . . ,” “AAABAAABAAAB . . . ,” “AAABBBAAABBB . . . ,” or “ABCABCABCABC . . . ,” etc.

[0284] The type of modifications contained in the alternating motif may be the same or different. For example, if A, B, C, D each represent one type of modification on the nucleotide, the alternating pattern, i.e., modifications on every other nucleotide, may be the same, but each of the sense strand or antisense strand can be selected from several possibilities of modifications within the alternating motif such as “ABABAB . . . ”, “ACACAC . . . ” “BDBDBD . . . ” or “CDCDCD . . . ,” etc.

[0285] In one embodiment, the RNAi agent of the invention comprises the modification pattern for the alternating motif on the sense strand relative to the modification pattern for the alternating motif on the antisense strand is shifted. The shift may be such that the modified group of nucleotides of the sense strand corresponds to a differently modified group of nucleotides of the antisense strand and vice versa. For example, the sense strand when paired with the antisense strand in the dsRNA duplex, the alternating motif in the sense strand may start with “ABABAB” from 5′-3′ of the strand and the alternating motif in the antisense strand may start with “BABABA” from 5′-3′ of the strand within the duplex region. As another example, the alternating motif in the sense strand may start with “AABBAABB” from 5′-3′ of the strand and the alternating motif in the antisense strand may start with “BBAABBAA” from 5′-3′ of the strand within the duplex region, so that there is a complete or partial shift of the modification patterns between the sense strand and the antisense strand.

[0286] In one embodiment, the RNAi agent comprises the pattern of the alternating motif of 2′-O-methyl modification and 2′-F modification on the sense strand initially has a shift relative to the pattern of the alternating motif of 2′-O-methyl modification and 2′-F modification on the antisense strand initially, i.e., the 2′-O-methyl modified nucleotide on the sense strand base pairs with a 2′-F modified nucleotide on the antisense strand and vice versa. The 1 position of the sense strand may start with the 2′-F modification, and the 1 position of the antisense strand may start with the 2′-O-methyl modification.

[0287] The introduction of one or more motifs of three identical modifications on three consecutive nucleotides to the sense strand and/or antisense strand interrupts the initial modification pattern present in the sense strand and/or antisense strand. This interruption of the modification pattern of the sense and/or antisense strand by introducing one or more motifs of three identical modifications on three consecutive nucleotides to the sense and/or antisense strand surprisingly enhances the gene silencing activity to the target gene.

[0288] In one embodiment, when the motif of three identical modifications on three consecutive nucleotides is introduced to any of the strands, the modification of the nucleotide next to the motif is a different modification than the modification of the motif. For example, the portion of the sequence containing the motif is “ . . . NaYYYN_{b} . . . ,” where “Y” represents the modification of the motif of three identical modifications on three consecutive nucleotide, and “Nₐ” and “N_{b}” represent a modification to the nucleotide next to the motif “YYY” that is different than the modification of Y, and where Nₐ and N_{b} can be the same or different modifications. Alternatively, Nₐ and/or N_{b} may be present or absent when there is a wing modification present.

[0289] The RNAi agent may further comprise at least one phosphorothioate or methylphosphonate internucleotide linkage. The phosphorothioate or methylphosphonate internucleotide linkage modification may occur on any nucleotide of the sense strand or antisense strand or both strands in any position of the strand. For instance, the internucleotide linkage modification may occur on every nucleotide on the sense strand and/or antisense strand; each internucleotide linkage modification may occur in an alternating pattern on the sense strand and/or antisense strand; or the sense strand or antisense strand may contain both internucleotide linkage modifications in an alternating pattern. The alternating pattern of the internucleotide linkage modification on the sense strand may be the same or different from the antisense strand, and the alternating pattern of the internucleotide linkage modification on the sense strand may have a shift relative to the alternating pattern of the internucleotide linkage modification on the antisense strand.

[0290] In one embodiment, the RNAi comprises a phosphorothioate or methylphosphonate internucleotide linkage modification in the overhang region. For example, the overhang region may contain two nucleotides having a phosphorothioate or methylphosphonate internucleotide linkage between the two nucleotides. Internucleotide linkage modifications also may be made to link the overhang nucleotides with the terminal paired nucleotides within the duplex region. For example, at least 2, 3, 4, or all the overhang nucleotides may be linked through phosphorothioate or methylphosphonate internucleotide linkage, and optionally, there may be additional phosphorothioate or methylphosphonate internucleotide linkages linking the overhang nucleotide with a paired nucleotide that is next to the overhang nucleotide. For instance, there may be at least two phosphorothioate internucleotide linkages between the terminal three nucleotides, in which two of the three nucleotides are overhang nucleotides, and the third is a paired nucleotide next to the overhang nucleotide. These terminal three nucleotides may be at the 3′-end of the antisense strand, the 3′-end of the sense strand, the 5′-end of the antisense strand, and/or the 5′ end of the antisense strand.

[0291] In one embodiment, the 2 nucleotide overhang is at the 3′-end of the antisense strand, and there are two phosphorothioate internucleotide linkages between the terminal three nucleotides, wherein two of the three nucleotides are the overhang nucleotides, and the third nucleotide is a paired nucleotide next to the overhang nucleotide. Optionally, the RNAi agent may additionally have two phosphorothioate internucleotide linkages between the terminal three nucleotides at both the 5′-end of the sense strand and at the 5′-end of the antisense strand.

[0292] In one embodiment, the RNAi agent comprises mismatch(es) with the target, within the duplex, or combinations thereof. The mismatch may occur in the overhang region or the duplex region. The base pair may be ranked on the basis of their propensity to promote dissociation or melting (e.g., on the free energy of association or dissociation of a particular pairing, the simplest approach is to examine the pairs on an individual pair basis, though next neighbor or similar analysis can also be used). In terms of promoting dissociation: A:U is preferred over G:C; G:U is preferred over G:C; and I:C is preferred over G:C (I=inosine). Mismatches, e.g., non-canonical or other than canonical pairings (as described elsewhere herein) are preferred over canonical (A:T, A:U, G:C) pairings; and pairings which include a universal base are preferred over canonical pairings.

[0293] In one embodiment, the RNAi agent comprises at least one of the first 1, 2, 3, 4, or 5 base pairs within the duplex regions from the 5′-end of the antisense strand independently selected from the group of: A:U, G:U, I:C, and mismatched pairs, e.g., non-canonical or other than canonical pairings or pairings which include a universal base, to promote the dissociation of the antisense strand at the 5′-end of the duplex.

[0294] In one embodiment, the nucleotide at the 1 position within the duplex region from the 5′-end in the antisense strand is selected from the group consisting of A, dA, dU, U, and dT. Alternatively, at least one of the first 1, 2 or 3 base pair within the duplex region from the 5′-end of the antisense strand is an AU base pair. For example, the first base pair within the duplex region from the 5′-end of the antisense strand is an AU base pair.

[0295] In one embodiment, the sense strand sequence may be represented by formula (I):

5′nₚ-Nₐ—(XXX)ᵢ—N_{b}—YYY—N_{b}—(ZZZ)ⱼ—Nₐ-n_{q}3′ (I)

[0296] wherein:
[0297] i and j are each independently 0 or 1;
[0298] p and q are each independently 0-6;
[0299] each Nₐ independently represents an oligonucleotide sequence comprising 0-25 modified nucleotides, each sequence comprising at least two differently modified nucleotides;
[0300] each N_{b} independently represents an oligonucleotide sequence comprising 0-10 modified nucleotides;
[0301] each nₚ and n_{q} independently represent an overhang nucleotide;
[0302] wherein N_{b} and Y do not have the same modification; and
[0303] XXX, YYY and ZZZ each independently represent one motif of three identical modifications on three consecutive nucleotides. Preferably YYY is all 2′-F modified nucleotides.

[0304] In one embodiment, the Nₐ and/or N_{b} comprise modifications of alternating pattern.

[0305] In one embodiment, the YYY motif occurs at or near the cleavage site of the sense strand.

[0306] For example, when the RNAi agent has a duplex region of 17-23 nucleotides in length, the YYY motif can occur at or the vicinity of the cleavage site (e.g.: can occur at positions 6, 7, 8, 7, 8, 9, 8, 9, 10, 9, 10, 11, 10, 11,12 or 11, 12, 13) of—the sense strand, the count starting from the 1^{st} nucleotide, from the 5′-end; or optionally, the count starting at the 1^{st} paired nucleotide within the duplex region, from the 5′-end.

[0307] In one embodiment, i is 1 and j is 0, or i is 0 and j is 1, or both i and j are 1. The sense strand can therefore be represented by the following formulas:

5′nₚ-Nₐ—YYY—N_{b}—ZZZ—Nₐ-n_{q}3′ (Ib);

5′nₚ-Nₐ—XXX—N_{b}—YYY—Nₐ-n_{q}3′ (Ic); or

5′nₚ-Nₐ—XXX—N_{b}—YYY—N_{b}—ZZZ—Nₐ-n_{q}3′ (Id).

[0308] When the sense strand is represented by formula (Ib), N_{b} represents an oligonucleotide sequence comprising 0-10, 0-7, 0-5, 0-4, 0-2 or 0 modified nucleotides. Each Nₐ independently can represent an oligonucleotide sequence comprising 2-20, 2-15, or 2-10 modified nucleotides.

[0309] When the sense strand is represented as formula (Ic), N_{b} represents an oligonucleotide sequence comprising 0-10, 0-7, 0-10, 0-7, 0-5, 0-4, 0-2 or 0 modified nucleotides. Each Nₐ can independently represent an oligonucleotide sequence comprising 2-20, 2-15, or 2-10 modified nucleotides.

[0310] When the sense strand is represented as formula (Id), each N_{b} independently represents an oligonucleotide sequence comprising 0-10, 0-7, 0-5, 0-4, 0-2 or 0 modified nucleotides. Preferably, N_{b} is 0, 1, 2, 3, 4, 5 or 6 Each Nₐ can independently represent an oligonucleotide sequence comprising 2-20, 2-15, or 2-10 modified nucleotides.

[0311] Each of X, Y and Z may be the same or different from each other.

[0312] In other embodiments, i is 0 and j is 0, and the sense strand may be represented by the formula:

5′nₚ-Nₐ—YYY—Nₐ-n_{q}3′ (Ia).

[0313] When the sense strand is represented by formula (Ia), each Nₐ independently can represent an oligonucleotide sequence comprising 2-20, 2-15, or 2-10 modified nucleotides.

[0314] In one embodiment, the antisense strand sequence of the RNAi may be represented by formula (II):

5′n_{q}′-Nₐ′—(Z′Z′Z′)ₖ—N_{b}′—Y′Y′Y′—N_{b}′—(X′X′X′)ᵢ—N′ₐ-nₚ′3′ (II)

[0315] wherein:
[0316] k and l are each independently 0 or 1;
[0317] p′ and q′ are each independently 0-6;
[0318] each Nₐ′ independently represents an oligonucleotide sequence comprising 0-25 modified nucleotides, each sequence comprising at least two differently modified nucleotides;
[0319] each N_{b}′ independently represents an oligonucleotide sequence comprising 0-10 modified nucleotides;
[0320] each nₚ′ and n_{q}′ independently represent an overhang nucleotide;
[0321] wherein N_{b}′ and Y′ do not have the same modification; and
[0322] X′X′X′, Y′Y′Y′ and Z′Z′Z′ each independently represent one motif of three identical modifications on three consecutive nucleotides.

[0323] In one embodiment, the Nₐ′ and/or N_{b}′ comprise modifications of alternating pattern.

[0324] The Y′Y′Y′ motif occurs at or near the cleavage site of the antisense strand. For example, when the RNAi agent has a duplex region of 17-23 nucleotide in length, the Y′Y′Y′ motif can occur at positions 9, 10, 11; 10, 11, 12; 11, 12, 13; 12, 13, 14; or 13, 14, 15 of the antisense strand, with the count starting from the 1^{st} nucleotide, from the 5′-end; or optionally, the count starting at the 1^{st} paired nucleotide within the duplex region, from the 5′-end. Preferably, the Y′Y′Y′ motif occurs at positions 11, 12, 13.

[0325] In one embodiment, Y′Y′Y′ motif is all 2′-OMe modified nucleotides.

[0326] In one embodiment, k is 1 and l is 0, or k is 0 and l is 1, or both k and l are 1.

[0327] The antisense strand can therefore be represented by the following formulas:

5′n_{q}′-Nₐ′—Z′Z′Z′—N_{b}′—Y′Y′Y′—Nₐ′-nₚ′3′ (IIb);

5′n_{q}′-Nₐ′—Y′Y′Y′—N_{b}′—X′X′X′-nₚ′3′ (IIc); or

5′n_{q}′-Nₐ′—Z′Z′Z′—N_{b}′—Y′Y′Y′—N_{b}′—X′X′X′—Nₐ′-nₚ′3′ (IId).

[0328] When the antisense strand is represented by formula (IIb), N_{b}′ represents an oligonucleotide sequence comprising 0-10, 0-7, 0-10, 0-7, 0-5, 0-4, 0-2 or 0 modified nucleotides. Each Nₐ′ independently represents an oligonucleotide sequence comprising 2-20, 2-15, or 2-10 modified nucleotides.

[0329] When the antisense strand is represented as formula (IIc), N_{b}′ represents an oligonucleotide sequence comprising 0-10, 0-7, 0-10, 0-7, 0-5, 0-4, 0-2 or 0 modified nucleotides. Each Nₐ′ independently represents an oligonucleotide sequence comprising 2-20, 2-15, or 2-10 modified nucleotides.

[0330] When the antisense strand is represented as formula (IId), each N_{b}′ independently represents an oligonucleotide sequence comprising 0-10, 0-7, 0-10, 0-7, 0-5, 0-4, 0-2 or 0 modified nucleotides. Each Nₐ′ independently represents an oligonucleotide sequence comprising 2-20, 2-15, or 2-10 modified nucleotides. Preferably, N_{b} is 0, 1, 2, 3, 4, 5 or 6.

[0331] In other embodiments, k is 0 and l is 0 and the antisense strand may be represented by the formula:

5′nₚ′-Nₐ′—Y′Y′Y′—Nₐ′-n_{q}′3′ (Ia).

[0332] When the antisense strand is represented as formula (IIa), each Nₐ′ independently represents an oligonucleotide sequence comprising 2-20, 2-15, or 2-10 modified nucleotides.

[0333] Each of X′, Y′ and Z′ may be the same or different from each other.

[0334] Each nucleotide of the sense strand and antisense strand may be independently modified with LNA, HNA, CeNA, 2′-methoxyethyl, 2′-O-methyl, 2′-O-allyl, 2′-C-allyl, 2′-hydroxyl, or 2′-fluoro. For example, each nucleotide of the sense strand and antisense strand is independently modified with 2′-O-methyl or 2′-fluoro. Each X, Y, Z, X′, Y′ and Z′, in particular, may represent a 2′-O-methyl modification or a 2′-fluoro modification.

[0335] In one embodiment, the sense strand of the RNAi agent may contain YYY motif occurring at 9, 10 and 11 positions of the strand when the duplex region is 21 nt, the count starting from the 1^{st} nucleotide from the 5′-end, or optionally, the count starting at the 1^{st} paired nucleotide within the duplex region, from the 5′-end; and Y represents 2′-F modification. The sense strand may additionally contain XXX motif or ZZZ motifs as wing modifications at the opposite end of the duplex region; and XXX and ZZZ each independently represents a 2′-OMe modification or 2′-F modification.

[0336] In one embodiment the antisense strand may contain Y′Y′Y′ motif occurring at positions 11, 12, 13 of the strand, the count starting from the 1^{st} nucleotide from the 5′-end, or optionally, the count starting at the 1^{st} paired nucleotide within the duplex region, from the 5′-end; and Y′ represents 2′-O-methyl modification. The antisense strand may additionally contain X′X′X′ motif or Z′Z′Z′ motifs as wing modifications at the opposite end of the duplex region; and X′X′X′ and Z′Z′Z′ each independently represents a 2′-OMe modification or 2′-F modification.

[0337] The sense strand represented by any one of the above formulas (Ia), (Ib), (Ic), and (Id) forms a duplex with an antisense strand being represented by any one of formulas (IIa), (IIb), (IIc), and (IId), respectively.

[0338] Accordingly, the RNAi agents for use in the methods of the invention may comprise a sense strand and an antisense strand, each strand having 14 to 30 nucleotides, the RNAi duplex represented by formula (III):

(III)
sense:
5′ nₚ-Nₐ-(X X X)ᵢ-N_{b}-Y Y Y-N_{b}-(ZZZ)ⱼ-Nₐ-n_{q} 3′
antisense:
3′ nₚ′-Nₐ-(X′X′X′)ₖ-N_{b}′-Y′Y′Y′-N_{b}′-
(Z′Z′Z′)ₗ-Nₐ′-n_{q}′ 5′

[0339] wherein:
[0340] i, j, k, and 1 are each independently 0 or 1;
[0341] p, p′, q, and q′ are each independently 0-6;
[0342] each Nₐ and Nₐ′ independently represents an oligonucleotide sequence comprising 0-25 modified nucleotides, each sequence comprising at least two differently modified nucleotides;
[0343] each N_{b} and N_{b}′ independently represents an oligonucleotide sequence comprising 0-10 modified nucleotides;
[0344] wherein
[0345] each nₚ′, nₚ, n_{q}′, and n_{q}, each of which may or may not be present, independently represents an overhang nucleotide; and
[0346] XXX, YYY, ZZZ, X′X′X′, Y′Y′Y′, and Z′Z′Z′ each independently represent one motif of three identical modifications on three consecutive nucleotides.

[0347] In one embodiment, i is 0 and j is 0; or i is 1 and j is 0; or i is 0 and j is 1; or both i and j are 0; or both i and j are 1. In another embodiment, k is 0 and l is 0; or k is 1 and l is 0; k is 0 and l is 1; or both k and l are 0; or both k and l are 1.

[0348] Exemplary combinations of the sense strand and antisense strand forming a RNAi duplex include the formulas below:

5′nₚ-Nₐ—YYY—Nₐ-n_{q}3′

3′nₚ′-Nₐ′—Y′Y′Y′—Nₐ′n_{q}′5′ (IIIa)

5′nₚ-Nₐ—YYY—N_{b}—ZZZ—Nₐ-n_{q}3′

3′nₚ′-Nₐ′—Y′Y′Y′—N_{b}′—Z′Z′Z′—Nₐ′n_{q}′5′ (IIIb)

5′nₚ-Nₐ—XXX—N_{b}—YYY—Nₐ-n_{q}3′

3′nₚ′-Nₐ′—X′X′X′—N_{b}′—Y′Y′Y′—Nₐ′-n_{q}′5′ (IIIc)

5′nₚ-Nₐ—XXX—N_{b}—YYY—N_{b}—ZZZ—Nₐ-n_{q}3′

3′nₚ′-Nₐ′—X′X′X′—N_{b}′—Y′Y′Y′—N_{b}′—Z′Z′Z′—Nₐ-n_{q}′5′ (IIId)

[0349] When the RNAi agent is represented by formula (IIIa), each Nₐ independently represents an oligonucleotide sequence comprising 2-20, 2-15, or 2-10 modified nucleotides.

[0350] When the RNAi agent is represented by formula (IIIb), each N_{b} independently represents an oligonucleotide sequence comprising 1-10, 1-7, 1-5 or 1-4 modified nucleotides. Each Nₐ independently represents an oligonucleotide sequence comprising 2-20, 2-15, or 2-10 modified nucleotides.

[0351] When the RNAi agent is represented as formula (IIIc), each N_{b}, N_{b}′ independently represents an oligonucleotide sequence comprising 0-10, 0-7, 0-10, 0-7, 0-5, 0-4, 0-2 or 0 modified nucleotides. Each Nₐ independently represents an oligonucleotide sequence comprising 2-20, 2-15, or 2-10 modified nucleotides.

[0352] When the RNAi agent is represented as formula (IIId), each N_{b}, N_{b}′ independently represents an oligonucleotide sequence comprising 0-10, 0-7, 0-10, 0-7, 0-5, 0-4, 0-2 or 0 modified nucleotides. Each Nₐ, Nₐ′ independently represents an oligonucleotide sequence comprising 2-20, 2-15, or 2-10 modified nucleotides. Each of Nₐ, Nₐ′, N_{b} and N_{b}′ independently comprises modifications of alternating pattern.

[0353] Each of X, Y and Z in formulas (III), (IIIa), (IIIb), (IIc), and (IIId) may be the same or different from each other.

[0354] When the RNAi agent is represented by formula (III), (IIIa), (IIIb), (IIc), and (IIId), at least one of the Y nucleotides may form a base pair with one of the Y′ nucleotides. Alternatively, at least two of the Y nucleotides form base pairs with the corresponding Y′ nucleotides; or all three of the Y nucleotides all form base pairs with the corresponding Y′ nucleotides.

[0355] When the RNAi agent is represented by formula (IIIb) or (IIId), at least one of the Z nucleotides may form a base pair with one of the Z′ nucleotides. Alternatively, at least two of the Z nucleotides form base pairs with the corresponding Z′ nucleotides; or all three of the Z nucleotides all form base pairs with the corresponding Z′ nucleotides.

[0356] When the RNAi agent is represented as formula (IIIc) or (IIId), at least one of the X nucleotides may form a base pair with one of the X′ nucleotides. Alternatively, at least two of the X nucleotides form base pairs with the corresponding X′ nucleotides; or all three of the X nucleotides all form base pairs with the corresponding X′ nucleotides.

[0357] In one embodiment, the modification on the Y nucleotide is different than the modification on the Y′ nucleotide, the modification on the Z nucleotide is different than the modification on the Z′ nucleotide, and/or the modification on the X nucleotide is different than the modification on the X′ nucleotide.

[0358] In one embodiment, when the RNAi agent is represented by formula (IIId), the Nₐ modifications are 2′-O-methyl or 2′-fluoro modifications. In another embodiment, when the RNAi agent is represented by formula (IIId), the Nₐ modifications are 2′-O-methyl or 2′-fluoro modifications and nₚ′>0 and at least one nₚ′ is linked to a neighboring nucleotide a via phosphorothioate linkage. In yet another embodiment, when the RNAi agent is represented by formula (IIId), the Nₐ modifications are 2′-O-methyl or 2′-fluoro modifications, nₚ′>0 and at least one nₚ′ is linked to a neighboring nucleotide via phosphorothioate linkage, and the sense strand is conjugated to one or more GalNAc derivatives attached through a bivalent or trivalent branched linker. In another embodiment, when the RNAi agent is represented by formula (IIId), the Nₐ modifications are 2′-O-methyl or 2′-fluoro modifications, nₚ′>0 and at least one nₚ′ is linked to a neighboring nucleotide via phosphorothioate linkage, the sense strand comprises at least one phosphorothioate linkage, and the sense strand is conjugated to one or more GalNAc derivatives attached through a bivalent or trivalent branched linker.

[0359] In one embodiment, when the RNAi agent is represented by formula (IIIa), the Nₐ modifications are 2′-O-methyl or 2′-fluoro modifications, nₚ′>0 and at least one nₚ′ is linked to a neighboring nucleotide via phosphorothioate linkage, the sense strand comprises at least one phosphorothioate linkage, and the sense strand is conjugated to one or more GalNAc derivatives attached through a bivalent or trivalent branched linker.

[0360] In one embodiment, the RNAi agent is a multimer containing at least two duplexes represented by formula (III), (IIIa), (IIIb), (IIc), and (IIId), wherein the duplexes are connected by a linker. The linker can be cleavable or non-cleavable. Optionally, the multimer further comprises a ligand. Each of the duplexes can target the same gene or two different genes; or each of the duplexes can target same gene at two different target sites.

[0361] In one embodiment, the RNAi agent is a multimer containing three, four, five, six or more duplexes represented by formula (III), (IIIa), (IIIb), (IIc), and (IIId), wherein the duplexes are connected by a linker. The linker can be cleavable or non-cleavable. Optionally, the multimer further comprises a ligand. Each of the duplexes can target the same gene or two different genes; or each of the duplexes can target same gene at two different target sites.

[0362] In one embodiment, two RNAi agents represented by formula (III), (IIIa), (IIIb), (IIc), and (IIId) are linked to each other at the 5′ end, and one or both of the 3′ ends and are optionally conjugated to a ligand. Each of the agents can target the same gene or two different genes; or each of the agents can target same gene at two different target sites.

[0363] Various publications describe multimeric RNAi agents that can be used in the methods of the invention. Such publications include WO2007/091269, U.S. Pat. No. 7,858,769, WO2010/141511, WO2007/117686, WO2009/014887 and WO2011/031520 the entire contents of each of which are hereby incorporated herein by reference.

[0364] The RNAi agent that contains conjugations of one or more carbohydrate moieties to a RNAi agent can optimize one or more properties of the RNAi agent. In many cases, the carbohydrate moiety will be attached to a modified subunit of the RNAi agent. For example, the ribose sugar of one or more ribonucleotide subunits of a dsRNA agent can be replaced with another moiety, e.g., a non-carbohydrate (preferably cyclic) carrier to which is attached a carbohydrate ligand. A ribonucleotide subunit in which the ribose sugar of the subunit has been so replaced is referred to herein as a ribose replacement modification subunit (RRMS). A cyclic carrier may be a carbocyclic ring system, i.e., all ring atoms are carbon atoms, or a heterocyclic ring system, i.e., one or more ring atoms may be a heteroatom, e.g., nitrogen, oxygen, sulfur. The cyclic carrier may be a monocyclic ring system, or may contain two or more rings, e.g. fused rings. The cyclic carrier may be a fully saturated ring system, or it may contain one or more double bonds.

[0365] The ligand may be attached to the polynucleotide via a carrier. The carriers include (i) at least one “backbone attachment point,” preferably two “backbone attachment points” and (ii) at least one “tethering attachment point.” A “backbone attachment point” as used herein refers to a functional group, e.g. a hydroxyl group, or generally, a bond available for, and that is suitable for incorporation of the carrier into the backbone, e.g., the phosphate, or modified phosphate, e.g., sulfur containing, backbone, of a ribonucleic acid. A “tethering attachment point” (TAP) in some embodiments refers to a constituent ring atom of the cyclic carrier, e.g., a carbon atom or a heteroatom (distinct from an atom which provides a backbone attachment point), that connects a selected moiety. The moiety can be, e.g., a carbohydrate, e.g. monosaccharide, disaccharide, trisaccharide, tetrasaccharide, oligosaccharide and polysaccharide. Optionally, the selected moiety is connected by an intervening tether to the cyclic carrier. Thus, the cyclic carrier will often include a functional group, e.g., an amino group, or generally, provide a bond, that is suitable for incorporation or tethering of another chemical entity, e.g., a ligand to the constituent ring.

[0366] The RNAi agents may be conjugated to a ligand via a carrier, wherein the carrier can be cyclic group or acyclic group; preferably, the cyclic group is selected from pyrrolidinyl, pyrazolinyl, pyrazolidinyl, imidazolinyl, imidazolidinyl, piperidinyl, piperazinyl, [1,3]dioxolane, oxazolidinyl, isoxazolidinyl, morpholinyl, thiazolidinyl, isothiazolidinyl, quinoxalinyl, pyridazinonyl, tetrahydrofuryl and decalin; preferably, the acyclic group is selected from serinol backbone or diethanolamine backbone.

[0367] In certain specific embodiments, the RNAi agent for use in the methods of the invention is an agent selected from the group of agents listed in any one of Tables 1a, 1b, 2a, 2b, 2c, 10-13, and 15. In one embodiment, when the agent is an agent listed in Table 1, the agent may lack a terminal dT.

[0368] The present invention further includes double-stranded RNAi agents comprising any one of the sequences listed in any one of Tables 1 or 2 which comprise a 5′ phosphate or phosphate mimetic on the antisense strand (see, e.g., PCT Publication No. WO 2011005860). Further, the present invention includes double-stranded RNAi agents comprising any one of the sequences listed in any one of Tables 1a, 1b, 2a, 2b, 2c, 10-13, and 15 which include a 2′ fluoro group in place of a 2′-OMe group at the 5′ end of the sense strand.

[0369] B. Additional Motifs

[0370] In certain aspects, the double-stranded RNAi agents described herein comprises a sense strand and an antisense strand wherein said sense strand and an antisense strand comprise less than eleven, ten, nine, eight, seven, six, or five 2′-deoxyflouro.

[0371] In certain aspects, the double-stranded RNAi agents described herein comprises a sense strand and an antisense strand, wherein said sense strand and an antisense strand comprise less than ten, nine, eight, seven, six, five, four phosphorothioate internucleotide linkages.

[0372] In certain aspects, the double-stranded RNAi agents described herein comprises a sense strand and an antisense strand, wherein said sense strand and an antisense strand comprise less than ten 2′-deoxyflouro and less than six phosphorothioate internucleotide linkages.

[0373] In certain aspects, the double-stranded RNAi agents described herein comprises a sense strand and an antisense strand, wherein said sense strand and an antisense strand comprise less than eight 2′-deoxyflouro and less than six phosphorothioate internucleotide linkages.

[0374] In certain aspects, the double-stranded RNAi agents described herein comprises a sense strand and an antisense strand, wherein said sense strand and an antisense strand comprise less than nine 2′-deoxyflouro and less than six phosphorothioate internucleotide linkages.

[0375] Double stranded RNAi agent suitable for use in the methods of the present invention are also provided in U.S. Pat. No. 10,478,500, the entire contents of which is incorporated herein by reference.

### V. Ligands

[0376] The double-stranded RNAi agents of the invention may optionally be conjugated to one or more ligands. The ligand can be attached to the sense strand, antisense strand or both strands, at the 3′-end, 5′-end or both ends. For instance, the ligand may be conjugated to the sense strand. In some embodiments, the ligand is conjugated to the 3′-end of the sense strand. In one embodiment, the ligand is a GalNAc ligand. In particularly some embodiments, the ligand is GalNAc₃. The ligands are coupled, preferably covalently, either directly or indirectly via an intervening tether.

[0377] In some embodiments, a ligand alters the distribution, targeting or lifetime of the molecule into which it is incorporated. In some embodiments a ligand provides an enhanced affinity for a selected target, e.g., molecule, cell or cell type, compartment, receptor e.g., a cellular or organ compartment, tissue, organ or region of the body, as, e.g., compared to a species absent such a ligand. Ligands providing enhanced affinity for a selected target are also termed targeting ligands.

[0378] Some ligands can have endosomolytic properties. The endosomolytic ligands promote the lysis of the endosome and/or transport of the composition of the invention, or its components, from the endosome to the cytoplasm of the cell. The endosomolytic ligand may be a polyanionic peptide or peptidomimetic which shows pH-dependent membrane activity and fusogenicity. In one embodiment, the endosomolytic ligand assumes its active conformation at endosomal pH. The “active” conformation is that conformation in which the endosomolytic ligand promotes lysis of the endosome and/or transport of the composition of the invention, or its components, from the endosome to the cytoplasm of the cell. Exemplary endosomolytic ligands include the GALA peptide (Subbarao et al., Biochemistry, 1987, 26: 2964-2972), the EALA peptide (Vogel et al., J. Am. Chem. Soc., 1996, 118: 1581-1586), and their derivatives (Turk et al., Biochem. Biophys. Acta, 2002, 1559: 56-68). In one embodiment, the endosomolytic component may contain a chemical group (e.g., an amino acid) which will undergo a change in charge or protonation in response to a change in pH. The endosomolytic component may be linear or branched.

[0379] Ligands can improve transport, hybridization, and specificity properties and may also improve nuclease resistance of the resultant natural or modified oligoribonucleotide, or a polymeric molecule comprising any combination of monomers described herein and/or natural or modified ribonucleotides.

[0380] Ligands in general can include therapeutic modifiers, e.g., for enhancing uptake; diagnostic compounds or reporter groups e.g., for monitoring distribution; cross-linking agents; and nuclease-resistance conferring moieties. General examples include lipids, steroids, vitamins, sugars, proteins, peptides, polyamines, and peptide mimics.

[0381] Ligands can include a naturally occurring substance, such as a protein (e.g., human serum albumin (HSA), low-density lipoprotein (LDL), high-density lipoprotein (HDL), or globulin); a carbohydrate (e.g., a dextran, pullulan, chitin, chitosan, inulin, cyclodextrin or hyaluronic acid); or a lipid. The ligand may also be a recombinant or synthetic molecule, such as a synthetic polymer, e.g., a synthetic polyamino acid, an oligonucleotide (e.g., an aptamer). Examples of polyamino acids include polyamino acid is a polylysine (PLL), poly L-aspartic acid, poly L-glutamic acid, styrene-maleic acid anhydride copolymer, poly(L-lactide-co-glycolied) copolymer, divinyl ether-maleic anhydride copolymer, N-(2-hydroxypropyl)methacrylamide copolymer (HMPA), polyethylene glycol (PEG), polyvinyl alcohol (PVA), polyurethane, poly(2-ethylacryllic acid), N-isopropylacrylamide polymers, or polyphosphazine. Example of polyamines include: polyethylenimine, polylysine (PLL), spermine, spermidine, polyamine, pseudopeptide-polyamine, peptidomimetic polyamine, dendrimer polyamine, arginine, amidine, protamine, cationic lipid, cationic porphyrin, quaternary salt of a polyamine, or an alpha helical peptide.

[0382] Ligands can also include targeting groups, e.g., a cell or tissue targeting agent, e.g., a lectin, glycoprotein, lipid or protein, e.g., an antibody, that binds to a specified cell type such as a kidney cell. A targeting group can be a thyrotropin, melanotropin, lectin, glycoprotein, surfactant protein A, Mucin carbohydrate, multivalent lactose, multivalent galactose, N-acetyl-galactosamine, N-acetyl-gulucosamine multivalent mannose, multivalent fucose, glycosylated polyaminoacids, multivalent galactose, transferrin, bisphosphonate, polyglutamate, polyaspartate, a lipid, cholesterol, a steroid, bile acid, folate, vitamin B12, biotin, an RGD peptide, an RGD peptide mimetic or an aptamer.

[0383] Other examples of ligands include dyes, intercalating agents (e.g., acridines), cross-linkers (e.g., psoralene, mitomycin C), porphyrins (TPPC4, texaphyrin, Sapphyrin), polycyclic aromatic hydrocarbons (e.g., phenazine, dihydrophenazine), artificial endonucleases or a chelator (e.g., EDTA), lipophilic molecules, e.g., cholesterol, cholic acid, adamantane acetic acid, 1-pyrene butyric acid, dihydrotestosterone, 1,3-Bis-O(hexadecyl)glycerol, geranyloxyhexyl group, hexadecylglycerol, borneol, menthol, 1,3-propanediol, heptadecyl group, palmitic acid, myristic acid, O3-(oleoyl)lithocholic acid, O3-(oleoyl)cholenic acid, dimethoxytrityl, or phenoxazine) and peptide conjugates (e.g., antennapedia peptide, Tat peptide), alkylating agents, phosphate, amino, mercapto, PEG (e.g., PEG-40K), MPEG, [MPEG]₂, polyamino, alkyl, substituted alkyl, radiolabeled markers, enzymes, haptens (e.g., biotin), transport/absorption facilitators (e.g., aspirin, vitamin E, folic acid), synthetic ribonucleases (e.g., imidazole, bisimidazole, histamine, imidazole clusters, acridine-imidazole conjugates, Eu3+ complexes of tetraazamacrocycles), dinitrophenyl, HRP, or AP.

[0384] Ligands can be proteins, e.g., glycoproteins, or peptides, e.g., molecules having a specific affinity for a co-ligand, or antibodies e.g., an antibody, that binds to a specified cell type such as a cancer cell, endothelial cell, or bone cell. Ligands may also include hormones and hormone receptors. They can also include non-peptidic species, such as lipids, lectins, carbohydrates, vitamins, cofactors, multivalent lactose, multivalent galactose, N-acetyl-galactosamine, N-acetyl-gulucosamine multivalent mannose, multivalent fucose, or aptamers. The ligand can be, for example, a lipopolysaccharide, an activator of p38 MAP kinase, or an activator of NF-κB.

[0385] The ligand can be a substance, e.g., a drug, which can increase the uptake of the iRNA agent into the cell, for example, by disrupting the cell's cytoskeleton, e.g., by disrupting the cell's microtubules, microfilaments, and/or intermediate filaments. The drug can be, for example, taxon, vincristine, vinblastine, cytochalasin, nocodazole, japlakinolide, latrunculin A, phalloidin, swinholide A, indanocine, or myoservin.

[0386] The ligand can increase the uptake of the oligonucleotide into the cell by, for example, activating an inflammatory response. Exemplary ligands that would have such an effect include tumor necrosis factor alpha (TNFalpha), interleukin-1 beta, or gamma interferon.

[0387] In one aspect, the ligand is a lipid or lipid-based molecule. Such a lipid or lipid-based molecule preferably binds a serum protein, e.g., human serum albumin (HSA). An HSA binding ligand allows for distribution of the conjugate to a target tissue, e.g., a non-kidney target tissue of the body. For example, the target tissue can be the liver, including parenchymal cells of the liver. Other molecules that can bind HSA can also be used as ligands. For example, naproxen or aspirin can be used. A lipid or lipid-based ligand can (a) increase resistance to degradation of the conjugate, (b) increase targeting or transport into a target cell or cell membrane, and/or (c) can be used to adjust binding to a serum protein, e.g., HSA.

[0388] A lipid based ligand can be used to modulate, e.g., control the binding of the conjugate to a target tissue. For example, a lipid or lipid-based ligand that binds to HSA more strongly will be less likely to be targeted to the kidney and therefore less likely to be cleared from the body. A lipid or lipid-based ligand that binds to HSA less strongly can be used to target the conjugate to the kidney.

[0389] In one embodiment, the lipid based ligand binds HSA. Preferably, it binds HSA with a sufficient affinity such that the conjugate will be preferably distributed to a non-kidney tissue. In one embodiment, the affinity is such that that the HSA-ligand binding can be reversed. In another embodiment, the lipid based ligand binds HSA weakly or not at all, such that the conjugate will be preferably distributed to the kidney. Other moieties that target to kidney cells can also be used in place of or in addition to the lipid based ligand.

[0390] In another aspect, the ligand is a moiety, e.g., a vitamin, which is taken up by a target cell, e.g., a proliferating cell. These are particularly useful for treating disorders characterized by unwanted cell proliferation, e.g., of the malignant or non-malignant type, e.g., cancer cells. Exemplary vitamins include vitamin A, E, and K. Other exemplary vitamins include B vitamins, e.g., folic acid, B12, riboflavin, biotin, pyridoxal or other vitamins or nutrients taken up by cancer cells. Also included are HAS, low density lipoprotein (LDL) and high-density lipoprotein (HDL).

[0391] In another aspect, the ligand is a cell-permeation agent, preferably a helical cell-permeation agent. Preferably, the agent is amphipathic. An exemplary agent is a peptide such as tat or antennopedia. If the agent is a peptide, it can be modified, including a peptidylmimetic, invertomers, non-peptide or pseudo-peptide linkages, and use of D-amino acids. The helical agent is preferably an alpha-helical agent, which preferably has a lipophilic and a lipophobic phase.

[0392] The ligand can be a peptide or peptidomimetic. A peptidomimetic (also referred to herein as an oligopeptidomimetic) is a molecule capable of folding into a defined three-dimensional structure similar to a natural peptide. The peptide or peptidomimetic moiety can be about 5-50 amino acids long, e.g., about 5, 10, 15, 20, 25, 30, 35, 40, 45, or 50 amino acids long. A peptide or peptidomimetic can be, for example, a cell permeation peptide, cationic peptide, amphipathic peptide, or hydrophobic peptide (e.g., consisting primarily of Tyr, Trp or Phe). The peptide moiety can be a dendrimer peptide, constrained peptide or crosslinked peptide. In another alternative, the peptide moiety can include a hydrophobic membrane translocation sequence (MTS). An exemplary hydrophobic MTS-containing peptide is RFGF having the amino acid sequence AAVALLPAVLLALLAP (SEQ ID NO: 9). An RFGF analogue (e.g., amino acid sequence AALLPVLLAAP (SEQ ID NO: 10)) containing a hydrophobic MTS can also be a targeting moiety. The peptide moiety can be a “delivery” peptide, which can carry large polar molecules including peptides, oligonucleotides, and protein across cell membranes. For example, sequences from the HIV Tat protein (GRKKRRQRRRPPQ) (SEQ ID NO: 11) and the Drosophila Antennapedia protein (RQIKIWFQNRRMKWKK) (SEQ ID NO: 12) have been found to be capable of functioning as delivery peptides. A peptide or peptidomimetic can be encoded by a random sequence of DNA, such as a peptide identified from a phage-display library, or one-bead-one-compound (OBOC) combinatorial library (Lam et al., Nature, 354:82-84, 1991). Preferably the peptide or peptidomimetic tethered to an iRNA agent via an incorporated monomer unit is a cell targeting peptide such as an arginine-glycine-aspartic acid (RGD)-peptide, or RGD mimic. A peptide moiety can range in length from about 5 amino acids to about 40 amino acids. The peptide moieties can have a structural modification, such as to increase stability or direct conformational properties. Any of the structural modifications described below can be utilized. An RGD peptide moiety can be used to target a tumor cell, such as an endothelial tumor cell or a breast cancer tumor cell (Zitzmann et al., Cancer Res., 62:5139-43, 2002). An RGD peptide can facilitate targeting of an iRNA agent to tumors of a variety of other tissues, including the lung, kidney, spleen, or liver (Aoki et al., Cancer Gene Therapy 8:783-787, 2001). Preferably, the RGD peptide will facilitate targeting of an iRNA agent to the kidney. The RGD peptide can be linear or cyclic, and can be modified, e.g., glycosylated or methylated to facilitate targeting to specific tissues. For example, a glycosylated RGD peptide can deliver an iRNA agent to a tumor cell expressing αvβ₃ (Haubner et al., Jour. Nucl. Med., 42:326-336, 2001). Peptides that target markers enriched in proliferating cells can be used. For example, RGD containing peptides and peptidomimetics can target cancer cells, in particular cells that exhibit an integrin. Thus, one could use RGD peptides, cyclic peptides containing RGD, RGD peptides that include D-amino acids, as well as synthetic RGD mimics. In addition to RGD, one can use other moieties that target the integrin ligand. Generally, such ligands can be used to control proliferating cells and angiogenesis. Some conjugates of this type of ligand target PECAM-1, VEGF, or other cancer gene, e.g., a cancer gene described herein.

[0393] A “cell permeation peptide” is capable of permeating a cell, e.g., a microbial cell, such as a bacterial or fungal cell, or a mammalian cell, such as a human cell. A microbial cell-permeating peptide can be, for example, an α-helical linear peptide (e.g., LL-37 or Ceropin P1), a disulfide bond-containing peptide (e.g., α-defensin, β-defensin or bactenecin), or a peptide containing only one or two dominating amino acids (e.g., PR-39 or indolicidin). A cell permeation peptide can also include a nuclear localization signal (NLS). For example, a cell permeation peptide can be a bipartite amphipathic peptide, such as MPG, which is derived from the fusion peptide domain of HIV-1 gp41 and the NLS of SV40 large T antigen (Simeoni et al., Nucl. Acids Res. 31:2717-2724, 2003).

[0394] In one embodiment, a targeting peptide can be an amphipathic α-helical peptide. Exemplary amphipathic α-helical peptides include, but are not limited to, cecropins, lycotoxins, paradaxins, buforin, CPF, bombinin-like peptide (BLP), cathelicidins, ceratotoxins, S. clava peptides, hagfish intestinal antimicrobial peptides (HFIAPs), magainines, brevinins-2, dermaseptins, melittins, pleurocidin, H₂A peptides, Xenopus peptides, esculentinis-1, and caerins. A number of factors will preferably be considered to maintain the integrity of helix stability. For example, a maximum number of helix stabilization residues will be utilized (e.g., leu, ala, or lys), and a minimum number helix destabilization residues will be utilized (e.g., proline, or cyclic monomeric units. The capping residue will be considered (for example Gly is an exemplary N-capping residue and/or C-terminal amidation can be used to provide an extra H-bond to stabilize the helix. Formation of salt bridges between residues with opposite charges, separated by i±3, or i±4 positions can provide stability. For example, cationic residues such as lysine, arginine, homo-arginine, ornithine or histidine can form salt bridges with the anionic residues glutamate or aspartate.

[0395] Peptide and peptidomimetic ligands include those having naturally occurring or modified peptides, e.g., D or L peptides; α, β, or γ peptides; N-methyl peptides; azapeptides; peptides having one or more amide, i.e., peptide, linkages replaced with one or more urea, thiourea, carbamate, or sulfonyl urea linkages; or cyclic peptides.

[0396] The targeting ligand can be any ligand that is capable of targeting a specific receptor. Examples are: folate, GalNAc, galactose, mannose, mannose-6P, clusters of sugars such as GalNAc cluster, mannose cluster, galactose cluster, or an aptamer. A cluster is a combination of two or more sugar units. The targeting ligands also include integrin receptor ligands, Chemokine receptor ligands, transferrin, biotin, serotonin receptor ligands, PSMA, endothelin, GCPII, somatostatin, LDL and HDL ligands. The ligands can also be based on nucleic acid, e.g., an aptamer. The aptamer can be unmodified or have any combination of modifications disclosed herein.

[0397] Endosomal release agents include imidazoles, poly or oligoimidazoles, PEIs, peptides, fusogenic peptides, polycaboxylates, polyacations, masked oligo or poly cations or anions, acetals, polyacetals, ketals/polyketyals, orthoesters, polymers with masked or unmasked cationic or anionic charges, dendrimers with masked or unmasked cationic or anionic charges.

[0398] PK modulator stands for pharmacokinetic modulator. PK modulators include lipophiles, bile acids, steroids, phospholipid analogues, peptides, protein binding agents, PEG, vitamins etc. Exemplary PK modulators include, but are not limited to, cholesterol, fatty acids, cholic acid, lithocholic acid, dialkylglycerides, diacylglyceride, phospholipids, sphingolipids, naproxen, ibuprofen, vitamin E, biotin etc. Oligonucleotides that comprise a number of phosphorothioate linkages are also known to bind to serum protein, thus short oligonucleotides, e.g., oligonucleotides of about 5 bases, 10 bases, 15 bases or 20 bases, comprising multiple phosphorothioate linkages in the backbone are also amenable to the present invention as ligands (e.g., as PK modulating ligands).

[0399] In addition, aptamers that bind serum components (e.g., serum proteins) are also amenable to the present invention as PK modulating ligands.

[0400] Other ligand conjugates amenable to the invention are described in U.S. Patent Applications U.S. Ser. No. 10/916,185, filed Aug. 10, 2004; U.S. Ser. No. 10/946,873, filed Sep. 21, 2004; U.S. Ser. No. 10/833,934, filed Aug. 3, 2007; U.S. Ser. No. 11/115,989 filed Apr. 27, 2005 and U.S. Ser. No. 11/944,227 filed Nov. 21, 2007, which are incorporated by reference in their entireties for all purposes.

[0401] When two or more ligands are present, the ligands can all have same properties, all have different properties or some ligands have the same properties while others have different properties. For example, a ligand can have targeting properties, have endosomolytic activity or have PK modulating properties. In one embodiment, all the ligands have different properties.

[0402] Ligands can be coupled to the oligonucleotides at various places, for example, 3′-end, 5′-end, and/or at an internal position. In some embodiments, the ligand is attached to the oligonucleotides via an intervening tether, e.g., a carrier described herein. The ligand or tethered ligand may be present on a monomer when the monomer is incorporated into the growing strand. In some embodiments, the ligand may be incorporated via coupling to a “precursor” monomer after the “precursor” monomer has been incorporated into the growing strand. For example, a monomer having, e.g., an amino-terminated tether (i.e., having no associated ligand), e.g., TAP—(CH₂)ₙNH₂ may be incorporated into a growing oligonucleotides strand. In a subsequent operation, i.e., after incorporation of the precursor monomer into the strand, a ligand having an electrophilic group, e.g., a pentafluorophenyl ester or aldehyde group, can subsequently be attached to the precursor monomer by coupling the electrophilic group of the ligand with the terminal nucleophilic group of the precursor monomer's tether.

[0403] In another example, a monomer having a chemical group suitable for taking part in Click Chemistry reaction may be incorporated, e.g., an azide or alkyne terminated tether/linker. In a subsequent operation, i.e., after incorporation of the precursor monomer into the strand, a ligand having complementary chemical group, e.g. an alkyne or azide can be attached to the precursor monomer by coupling the alkyne and the azide together.

[0404] In some embodiments, a ligand can be conjugated to nucleobases, sugar moieties, or internucleosidic linkages of nucleic acid molecules. Conjugation to purine nucleobases or derivatives thereof can occur at any position including, endocyclic and exocyclic atoms. In some embodiments, the 2-, 6-, 7-, or 8-positions of a purine nucleobase are attached to a conjugate moiety. Conjugation to pyrimidine nucleobases or derivatives thereof can also occur at any position. In some embodiments, the 2-, 5-, and 6-positions of a pyrimidine nucleobase can be substituted with a conjugate moiety. Conjugation to sugar moieties of nucleosides can occur at any carbon atom. Example carbon atoms of a sugar moiety that can be attached to a conjugate moiety include the 2′, 3′, and 5′ carbon atoms. The 1′ position can also be attached to a conjugate moiety, such as in an abasic residue. Internucleosidic linkages can also bear conjugate moieties. For phosphorus-containing linkages (e.g., phosphodiester, phosphorothioate, phosphorodithiotate, phosphoroamidate, and the like), the conjugate moiety can be attached directly to the phosphorus atom or to an O, N, or S atom bound to the phosphorus atom. For amine- or amide-containing internucleosidic linkages (e.g., PNA), the conjugate moiety can be attached to the nitrogen atom of the amine or amide or to an adjacent carbon atom.

[0405] In some embodiment, an siRNA targeting an HAO1 gene is conjugated to a carbohydrate e.g. monosaccharide (such as GalNAc), disaccharide, trisaccharide, tetrasaccharide, polysaccharide. In some embodiments, the siRNA is conjugated to N-acetylgalactosamine (GalNAc) ligand. The enhances efficient delivery to hepatocytes following subcutaneous administration. Methods of conjugation of carbohydrates, e.g., N-acetylgalactosamine, to, e.g., an siRNA are well known to one of skill in the art. Examples can be found in U.S. Pat. No. 8,106,022 and WO2014/025805.

[0406] In some embodiments, an siRNA targeting an HAO1 gene is conjugated to a ligand, e.g., to GalNac, via a linker. For example, the ligand can be one or more GalNAc (N-acetylglucosamine) derivatives attached through a bivalent or trivalent branched linker.

[0407] In one embodiment, the dsRNA of the invention is conjugated to a bivalent and trivalent branched linkers include the structures shown in any of formula (IV)-(VII):

[chemical structure]

[0408] wherein:
[0409] q^{2A}, q^{2B}, q^{3A}, q^{3B}, q^{4A}, q^{4B}, q^{5A}, q^{5B} and q^{5C} represent independently for each occurrence 0-20 and wherein the repeating unit can be the same or different;
[0410] P^{2A}, p^{2B}, p^{3A}, p^{3B}, p^{4A}, p^{4B}, p^{5A}, p^{5B}, p^{5C} T^{2A}, T^{2B}, T^{3A}, T^{3B}, T^{4A}, T^{4B}, T^{4A}, T^{5B}, T^{5C} are each independently for each occurrence absent, CO, NH, O, S, OC(O), NHC(O), CH₂, CH₂NH or CH₂O;
[0411] Q^{2A}, Q^{2B}, Q^{3A}, Q^{3B}, Q^{4A}, Q^{4B}, Q^{5A}, Q^{5B}, Q^{5C} are independently for each occurrence absent, alkylene, substituted alkylene wherein one or more methylenes can be interrupted or terminated by one or more of O, S, S(O), SO₂, N(R^{N}), C(R′)═C(R″), C≡C or C(O);
[0412] R^{2A}, R^{2B}, R^{3A}, R^{3B}, R^{4A}, R^{4B}, R^{5A}, R^{5B}, R^{5C} are each independently for each occurrence absent, NH, O, S, CH₂, C(O)O, C(O)NH, NHCH(R^{a})C(O), —C(O)—CH(R^{a})—NH—, CO, CH═N—O,

[chemical structure]

or heterocyclyl;
[0413] L^{2A}, L^{2B}, L^{3A}, L^{3B}, L^{4A}, L^{4B}, L^{5A}, L^{5B}, and L^{5C} represent the ligand; i.e. each independently for each occurrence a monosaccharide (such as GalNAc), disaccharide, trisaccharide, tetrasaccharide, oligosaccharide, or polysaccharide; and
[0414] R^{a} is H or amino acid side chain.

[0415] Trivalent conjugating GalNAc derivatives are particularly useful for use with RNAi agents for inhibiting the expression of a target gene, such as those of formula (VII):

[chemical structure]

[0416] wherein L^{5A}, L^{5B} and L^{5C} represent a monosaccharide, such as GalNAc derivative.

[0417] Examples of suitable bivalent and trivalent branched linker groups conjugating GalNAc derivatives include, but are not limited to, the following compounds:

[chemical structure]

[chemical structure]

[chemical structure]

[0418] In some embodiments the ligand is selected from one of the following:

[chemical structure]

[chemical structure]

### VI. Pharmaceutical Compositions of the Invention

[0419] The present invention also includes pharmaceutical compositions and formulations which include the iRNAs for use in the methods of the invention. In one embodiment, provided herein are pharmaceutical compositions containing an iRNA, as described herein, and a pharmaceutically acceptable carrier. The pharmaceutical compositions containing the iRNA are useful for treating primary hyperoxaluria. Such pharmaceutical compositions are formulated based on the mode of delivery.

[0420] The pharmaceutical compositions comprising RNAi agents of the invention may be, for example, solutions with or without a buffer, or compositions containing pharmaceutically acceptable carriers. Such compositions include, for example, aqueous or crystalline compositions, liposomal formulations, micellar formulations, emulsions, and gene therapy vectors.

[0421] In the methods of the invention, the RNAi agent may be administered in a solution. A free RNAi agent may be administered in an unbuffered solution, e.g., in saline or in water. Alternatively, the free siRNA may also be administered in a suitable buffer solution. The buffer solution may comprise acetate, citrate, prolamine, carbonate, or phosphate, or any combination thereof. In one embodiment, the buffer solution is phosphate buffered saline (PBS). The pH and osmolarity of the buffer solution containing the RNAi agent can be adjusted such that it is suitable for administering to a subject.

[0422] In some embodiments, the buffer solution further comprises an agent for controlling the osmolarity of the solution, such that the osmolarity is kept at a desired value, e.g., at the physiologic values of the human plasma. Solutes which can be added to the buffer solution to control the osmolarity include, but are not limited to, proteins, peptides, amino acids, non-metabolized polymers, vitamins, ions, sugars, metabolites, organic acids, lipids, or salts. In some embodiments, the agent for controlling the osmolarity of the solution is a salt. In certain embodiments, the agent for controlling the osmolarity of the solution is sodium chloride or potassium chloride.

[0423] The pharmaceutical compositions of the invention may be administered in dosages sufficient to inhibit expression of a HAO1 gene.

[0424] The pharmaceutical compositions of the present invention can be administered in a number of ways depending upon whether local or systemic treatment is desired and upon the area to be treated.

[0425] Administration can be topical (e.g., by a transdermal patch), pulmonary, e.g., by inhalation or insufflation of powders or aerosols, including by nebulizer; intratracheal, intranasal, epidermal and transdermal, oral or parenteral. Parenteral administration includes intravenous, intraarterial, subcutaneous, intraperitoneal or intramuscular injection or infusion; subdermal, e.g., via an implanted device; or intracranial, e.g., by intraparenchymal, intrathecal or intraventricular, administration

[0426] The iRNA can be delivered in a manner to target a particular tissue, such as the liver.

[0427] Pharmaceutical compositions of the present invention include, but are not limited to, solutions, emulsions, and liposome-containing formulations. These compositions can be generated from a variety of components that include, but are not limited to, preformed liquids, self-emulsifying solids and self-emulsifying semisolids.

[0428] The pharmaceutical formulations of the present invention, which can conveniently be presented in unit dosage form, can be prepared according to conventional techniques well known in the pharmaceutical industry. Such techniques include the step of bringing into association the active ingredients with the pharmaceutical carrier(s) or excipient(s). In general, the formulations are prepared by uniformly and intimately bringing into association the active ingredients with liquid carriers or finely divided solid carriers or both, and then, if necessary, shaping the product.

[0429] The compositions of the present invention can be formulated into any of many possible dosage forms such as, but not limited to, tablets, capsules, gel capsules, liquid syrups, soft gels, suppositories, and enemas. The compositions of the present invention can also be formulated as suspensions in aqueous, non-aqueous or mixed media. Aqueous suspensions can further contain substances which increase the viscosity of the suspension including, for example, sodium carboxymethylcellulose, sorbitol and/or dextran. The suspension can also contain stabilizers.

[0430] The compositions of the present invention can be formulated for oral administration; parenteral, intraparenchymal (into the brain), intrathecal, intraventricular or intrahepatic administration, and/or topical administration.

[0431] Compositions and formulations for oral administration include powders or granules, microparticulates, nanoparticulates, suspensions or solutions in water or non-aqueous media, capsules, gel capsules, sachets, tablets or minitablets. Thickeners, flavoring agents, diluents, emulsifiers, dispersing aids or binders can be desirable. In some embodiments, oral formulations are those in which dsRNAs featured in the invention are administered in conjunction with one or more penetration enhancer surfactants and chelators. Suitable surfactants include fatty acids and/or esters or salts thereof, bile acids and/or salts thereof. Suitable bile acids/salts include chenodeoxycholic acid (CDCA) and ursodeoxychenodeoxycholic acid (UDCA), cholic acid, dehydrocholic acid, deoxycholic acid, glucholic acid, glycholic acid, glycodeoxycholic acid, taurocholic acid, taurodeoxycholic acid, sodium tauro-24,25-dihydro-fusidate and sodium glycodihydrofusidate. Suitable fatty acids include arachidonic acid, undecanoic acid, oleic acid, lauric acid, caprylic acid, capric acid, myristic acid, palmitic acid, stearic acid, linoleic acid, linolenic acid, dicaprate, tricaprate, monoolein, dilaurin, glyceryl 1-monocaprate, 1-dodecylazacycloheptan-2-one, an acylcarnitine, an acylcholine, or a monoglyceride, a diglyceride or a pharmaceutically acceptable salt thereof (e.g., sodium). In some embodiments, combinations of penetration enhancers are used, for example, fatty acids/salts in combination with bile acids/salts. One exemplary combination is the sodium salt of lauric acid, capric acid and UDCA. Further penetration enhancers include polyoxyethylene-9-lauryl ether, polyoxyethylene-20-cetyl ether. DsRNAs featured in the invention can be delivered orally, in granular form including sprayed dried particles, or complexed to form micro or nanoparticles. DsRNA complexing agents include poly-amino acids; polyimines; polyacrylates; polyalkylacrylates, polyoxethanes, polyalkylcyanoacrylates; cationized gelatins, albumins, starches, acrylates, polyethyleneglycols (PEG) and starches; polyalkylcyanoacrylates; DEAE-derivatized polyimines, pollulans, celluloses and starches. Suitable complexing agents include chitosan, N-trimethylchitosan, poly-L-lysine, polyhistidine, polyornithine, polyspermines, protamine, polyvinylpyridine, polythiodiethylaminomethylethylene P(TDAE), polyaminostyrene (e.g., p-amino), poly(methylcyanoacrylate), poly(ethylcyanoacrylate), poly(butylcyanoacrylate), poly(isobutylcyanoacrylate), poly(isohexylcynaoacrylate), DEAE-methacrylate, DEAE-hexylacrylate, DEAE-acrylamide, DEAE-albumin and DEAE-dextran, polymethylacrylate, polyhexylacrylate, poly(D,L-lactic acid), poly(DL-lactic-co-glycolic acid (PLGA), alginate, and polyethyleneglycol (PEG). Oral formulations for dsRNAs and their preparation are described in detail in U.S. Pat. No. 6,887,906, US Publn. No. 20030027780, and U.S. Pat. No. 6,747,014, each of which is incorporated herein by reference.

[0432] Compositions and formulations for parenteral, intraparenchymal (into the brain), intrathecal, intraventricular or intrahepatic administration can include sterile aqueous solutions which can also contain buffers, diluents and other suitable additives such as, but not limited to, penetration enhancers, carrier compounds and other pharmaceutically acceptable carriers or excipients.

[0433] Pharmaceutical compositions and formulations for topical administration can include transdermal patches, ointments, lotions, creams, gels, drops, suppositories, sprays, liquids and powders. Conventional pharmaceutical carriers, aqueous, powder or oily bases, thickeners and the like can be necessary or desirable. Coated condoms, gloves and the like can also be useful. Suitable topical formulations include those in which the iRNAs featured in the invention are in admixture with a topical delivery agent such as lipids, liposomes, fatty acids, fatty acid esters, steroids, chelating agents and surfactants. Suitable lipids and liposomes include neutral (e.g., dioleoylphosphatidyl DOPE ethanolamine, dimyristoylphosphatidyl choline DMPC, distearolyphosphatidyl choline) negative (e.g., dimyristoylphosphatidyl glycerol DMPG) and cationic (e.g., dioleoyltetramethylaminopropyl DOTAP and dioleoylphosphatidyl ethanolamine DOTMA). iRNAs featured in the invention can be encapsulated within liposomes or can form complexes thereto, in particular to cationic liposomes. Alternatively, iRNAs can be complexed to lipids, in particular to cationic lipids. Suitable fatty acids and esters include but are not limited to arachidonic acid, oleic acid, eicosanoic acid, lauric acid, caprylic acid, capric acid, myristic acid, palmitic acid, stearic acid, linoleic acid, linolenic acid, dicaprate, tricaprate, monoolein, dilaurin, glyceryl 1-monocaprate, 1-dodecylazacycloheptan-2-one, an acylcarnitine, an acylcholine, or a C₁₋₂₀ alkyl ester (e.g., isopropylmyristate IPM), monoglyceride, diglyceride or pharmaceutically acceptable salt thereof). Topical formulations are described in detail in U.S. Pat. No. 6,747,014, which is incorporated herein by reference.

[0434] A. iRNA Formulations Comprising Membranous Molecular Assemblies

[0435] An iRNA for use in the compositions and methods of the invention can be formulated for delivery in a membranous molecular assembly, e.g., a liposome or a micelle. As used herein, the term “liposome” refers to a vesicle composed of amphiphilic lipids arranged in at least one bilayer, e.g., one bilayer or a plurality of bilayers. Liposomes include unilamellar and multilamellar vesicles that have a membrane formed from a lipophilic material and an aqueous interior. The aqueous portion contains the iRNA composition. The lipophilic material isolates the aqueous interior from an aqueous exterior, which typically does not include the iRNA composition, although in some examples, it may. Liposomes are useful for the transfer and delivery of active ingredients to the site of action. Because the liposomal membrane is structurally similar to biological membranes, when liposomes are applied to a tissue, the liposomal bilayer fuses with bilayer of the cellular membranes. As the merging of the liposome and cell progresses, the internal aqueous contents that include the iRNA are delivered into the cell where the iRNA can specifically bind to a target RNA and can mediate RNAi. In some cases the liposomes are also specifically targeted, e.g., to direct the iRNA to particular cell types.

[0436] A liposome containing a RNAi agent can be prepared by a variety of methods. In one example, the lipid component of a liposome is dissolved in a detergent so that micelles are formed with the lipid component. For example, the lipid component can be an amphipathic cationic lipid or lipid conjugate. The detergent can have a high critical micelle concentration and may be nonionic. Exemplary detergents include cholate, CHAPS, octylglucoside, deoxycholate, and lauroyl sarcosine. The RNAi agent preparation is then added to the micelles that include the lipid component. The cationic groups on the lipid interact with the RNAi agent and condense around the RNAi agent to form a liposome. After condensation, the detergent is removed, e.g., by dialysis, to yield a liposomal preparation of RNAi agent.

[0437] If necessary a carrier compound that assists in condensation can be added during the condensation reaction, e.g., by controlled addition. For example, the carrier compound can be a polymer other than a nucleic acid (e.g., spermine or spermidine). pH can also adjusted to favor condensation.

[0438] Methods for producing stable polynucleotide delivery vehicles, which incorporate a polynucleotide/cationic lipid complex as structural components of the delivery vehicle, are further described in, e.g., WO 96/37194, the entire contents of which are incorporated herein by reference. Liposome formation can also include one or more aspects of exemplary methods described in Felgner, P. L. et al., Proc. Nat. Acad. Sci., USA 8:7413-7417, 1987; U.S. Pat. Nos. 4,897,355; 5,171,678; Bangham, et al. M. Mol. Biol. 23:238, 1965; Olson, et al. Biochim. Biophys. Acta 557:9, 1979; Szoka, et al. Proc. Nat. Acad. Sci. 75: 4194, 1978; Mayhew, et al. Biochim. Biophys. Acta 775:169, 1984; Kim, et al. Biochim. Biophys. Acta 728:339, 1983; and Fukunaga, et al. Endocrinol. 115:757, 1984. Commonly used techniques for preparing lipid aggregates of appropriate size for use as delivery vehicles include sonication and freeze-thaw plus extrusion (see, e.g., Mayer, et al. Biochim. Biophys. Acta 858:161, 1986). Microfluidization can be used when consistently small (50 to 200 nm) and relatively uniform aggregates are desired (Mayhew, et al. Biochim. Biophys. Acta 775:169, 1984). These methods are readily adapted to packaging RNAi agent preparations into liposomes.

[0439] Liposomes fall into two broad classes. Cationic liposomes are positively charged liposomes which interact with the negatively charged nucleic acid molecules to form a stable complex. The positively charged nucleic acid/liposome complex binds to the negatively charged cell surface and is internalized in an endosome. Due to the acidic pH within the endosome, the liposomes are ruptured, releasing their contents into the cell cytoplasm (Wang et al., Biochem. Biophys. Res. Commun., 1987, 147, 980-985).

[0440] Liposomes which are pH-sensitive or negatively-charged, entrap nucleic acids rather than complex with it. Since both the nucleic acid and the lipid are similarly charged, repulsion rather than complex formation occurs. Nevertheless, some nucleic acid is entrapped within the aqueous interior of these liposomes. pH-sensitive liposomes have been used to deliver nucleic acids encoding the thymidine kinase gene to cell monolayers in culture. Expression of the exogenous gene was detected in the target cells (Zhou et al., Journal of Controlled Release, 1992, 19, 269-274).

[0441] One major type of liposomal composition includes phospholipids other than naturally-derived phosphatidylcholine. Neutral liposome compositions, for example, can be formed from dimyristoyl phosphatidylcholine (DMPC) or dipalmitoyl phosphatidylcholine (DPPC). Anionic liposome compositions generally are formed from dimyristoyl phosphatidylglycerol, while anionic fusogenic liposomes are formed primarily from dioleoyl phosphatidylethanolamine (DOPE). Another type of liposomal composition is formed from phosphatidylcholine (PC) such as, for example, soybean PC, and egg PC. Another type is formed from mixtures of phospholipid and/or phosphatidylcholine and/or cholesterol.

[0442] Examples of other methods to introduce liposomes into cells in vitro and in vivo include U.S. Pat. Nos. 5,283,185; 5,171,678; WO 94/00569; WO 93/24640; WO 91/16024; Felgner, J. Biol. Chem. 269:2550, 1994; Nabel, Proc. Natl. Acad. Sci. 90:11307, 1993; Nabel, Human Gene Ther. 3:649, 1992; Gershon, Biochem. 32:7143, 1993; and Strauss EMBO J. 11:417, 1992.

[0443] Non-ionic liposomal systems have also been examined to determine their utility in the delivery of drugs to the skin, in particular systems comprising non-ionic surfactant and cholesterol.

[0444] Non-ionic liposomal formulations comprising Novasome™ I (glyceryl dilaurate/cholesterol/polyoxyethylene-10-stearyl ether) and Novasome™ II (glyceryl distearate/cholesterol/polyoxyethylene-10-stearyl ether) were used to deliver cyclosporin-A into the dermis of mouse skin. Results indicated that such non-ionic liposomal systems were effective in facilitating the deposition of cyclosporine A into different layers of the skin (Hu et al. S.T.P. Pharma. Sci., 1994, 4(6) 466).

[0445] Liposomes also include “sterically stabilized” liposomes, a term which, as used herein, refers to liposomes comprising one or more specialized lipids that, when incorporated into liposomes, result in enhanced circulation lifetimes relative to liposomes lacking such specialized lipids. Examples of sterically stabilized liposomes are those in which part of the vesicle-forming lipid portion of the liposome (A) comprises one or more glycolipids, such as monosialoganglioside G_{M1}, or (B) is derivatized with one or more hydrophilic polymers, such as a polyethylene glycol (PEG) moiety. While not wishing to be bound by any particular theory, it is thought in the art that, at least for sterically stabilized liposomes containing gangliosides, sphingomyelin, or PEG-derivatized lipids, the enhanced circulation half-life of these sterically stabilized liposomes derives from a reduced uptake into cells of the reticuloendothelial system (RES) (Allen et al., FEBS Letters, 1987, 223, 42; Wu et al., Cancer Research, 1993, 53, 3765).

[0446] Various liposomes comprising one or more glycolipids are known in the art. Papahadjopoulos et al. (Ann. N.Y. Acad. Sci., 1987, 507, 64) reported the ability of monosialoganglioside G_{M1}, galactocerebroside sulfate and phosphatidylinositol to improve blood half-lives of liposomes. These findings were expounded upon by Gabizon et al. (Proc. Natl. Acad. Sci. U.S.A., 1988, 85, 6949). U.S. Pat. No. 4,837,028 and WO 88/04924, both to Allen et al., disclose liposomes comprising (1) sphingomyelin and (2) the ganglioside G_{M1} or a galactocerebroside sulfate ester. U.S. Pat. No. 5,543,152 (Webb et al.) discloses liposomes comprising sphingomyelin. Liposomes comprising 1,2-sn-dimyristoylphosphatidylcholine are disclosed in WO 97/13499 (Lim et al).

[0447] In one embodiment, cationic liposomes are used. Cationic liposomes possess the advantage of being able to fuse to the cell membrane. Non-cationic liposomes, although not able to fuse as efficiently with the plasma membrane, are taken up by macrophages in vivo and can be used to deliver RNAi agents to macrophages.

[0448] Further advantages of liposomes include: liposomes obtained from natural phospholipids are biocompatible and biodegradable; liposomes can incorporate a wide range of water and lipid soluble drugs; liposomes can protect encapsulated RNAi agents in their internal compartments from metabolism and degradation (Rosoff, in “Pharmaceutical Dosage Forms,” Lieberman, Rieger and Banker (Eds.), 1988, volume 1, p. 245). Important considerations in the preparation of liposome formulations are the lipid surface charge, vesicle size and the aqueous volume of the liposomes.

[0449] A positively charged synthetic cationic lipid, N-[1-(2,3-dioleyloxy)propyl]-N,N,N-trimethylammonium chloride (DOTMA) can be used to form small liposomes that interact spontaneously with nucleic acid to form lipid-nucleic acid complexes which are capable of fusing with the negatively charged lipids of the cell membranes of tissue culture cells, resulting in delivery of RNAi agent (see, e.g., Felgner, P. L. et al., Proc. Natl. Acad. Sci., USA 8:7413-7417, 1987 and U.S. Pat. No. 4,897,355 for a description of DOTMA and its use with DNA).

[0450] A DOTMA analogue, 1,2-bis(oleoyloxy)-3-(trimethylammonia)propane (DOTAP) can be used in combination with a phospholipid to form DNA-complexing vesicles. LipofectinT^{M} Bethesda Research Laboratories, Gaithersburg, Md.) is an effective agent for the delivery of highly anionic nucleic acids into living tissue culture cells that comprise positively charged DOTMA liposomes which interact spontaneously with negatively charged polynucleotides to form complexes. When enough positively charged liposomes are used, the net charge on the resulting complexes is also positive. Positively charged complexes prepared in this way spontaneously attach to negatively charged cell surfaces, fuse with the plasma membrane, and efficiently deliver functional nucleic acids into, for example, tissue culture cells. Another commercially available cationic lipid, 1,2-bis(oleoyloxy)-3,3-(trimethylammonia)propane (“DOTAP”) (Boehringer Mannheim, Indianapolis, Indiana) differs from DOTMA in that the oleoyl moieties are linked by ester, rather than ether linkages.

[0451] Other reported cationic lipid compounds include those that have been conjugated to a variety of moieties including, for example, carboxyspermine which has been conjugated to one of two types of lipids and includes compounds such as 5-carboxyspermylglycine dioctaoleoylamide (“DOGS”) (Transfectam™, Promega, Madison, Wisconsin) and dipalmitoylphosphatidylethanolamine 5-carboxyspermyl-amide (“DPPES”) (see, e.g., U.S. Pat. No. 5,171,678).

[0452] Another cationic lipid conjugate includes derivatization of the lipid with cholesterol (“DC-Chol”) which has been formulated into liposomes in combination with DOPE (See, Gao, X. and Huang, L., Biochim. Biophys. Res. Commun. 179:280, 1991). Lipopolylysine, made by conjugating polylysine to DOPE, has been reported to be effective for transfection in the presence of serum (Zhou, X. et al., Biochim. Biophys. Acta 1065:8, 1991). For certain cell lines, these liposomes containing conjugated cationic lipids, are said to exhibit lower toxicity and provide more efficient transfection than the DOTMA-containing compositions. Other commercially available cationic lipid products include DMRIE and DMRIE-HP (Vical, La Jolla, California) and Lipofectamine (DOSPA) (Life Technology, Inc., Gaithersburg, Maryland). Other cationic lipids suitable for the delivery of oligonucleotides are described in WO 98/39359 and WO 96/37194.

[0453] Liposomal formulations are particularly suited for topical administration, liposomes present several advantages over other formulations. Such advantages include reduced side effects related to high systemic absorption of the administered drug, increased accumulation of the administered drug at the desired target, and the ability to administer RNAi agent into the skin. In some implementations, liposomes are used for delivering RNAi agent to epidermal cells and also to enhance the penetration of RNAi agent into dermal tissues, e.g., into skin. For example, the liposomes can be applied topically. Topical delivery of drugs formulated as liposomes to the skin has been documented (see, e.g., Weiner et al., Journal of Drug Targeting, 1992, vol. 2,405-410 and du Plessis et al., Antiviral Research, 18, 1992, 259-265; Mannino, R. J. and Fould-Fogerite, S., Biotechniques 6:682-690, 1988; Itani, T. et al. Gene 56:267-276. 1987; Nicolau, C. et al. Meth. Enz. 149:157-176, 1987; Straubinger, R. M. and Papahadjopoulos, D. Meth. Enz. 101:512-527, 1983; Wang, C. Y. and Huang, L., Proc. Natl. Acad. Sci. USA 84:7851-7855, 1987).

[0454] Non-ionic liposomal systems have also been examined to determine their utility in the delivery of drugs to the skin, in particular systems comprising non-ionic surfactant and cholesterol. Non-ionic liposomal formulations comprising Novasome I (glyceryl dilaurate/cholesterol/polyoxyethylene-10-stearyl ether) and Novasome II (glyceryl distearate/cholesterol/polyoxyethylene-10-stearyl ether) were used to deliver a drug into the dermis of mouse skin. Such formulations with RNAi agent are useful for treating a dermatological disorder.

[0455] Liposomes that include iRNA can be made highly deformable. Such deformability can enable the liposomes to penetrate through pore that are smaller than the average radius of the liposome. For example, transferosomes are a type of deformable liposomes. Transferosomes can be made by adding surface edge activators, usually surfactants, to a standard liposomal composition. Transferosomes that include RNAi agent can be delivered, for example, subcutaneously by infection in order to deliver RNAi agent to keratinocytes in the skin. In order to cross intact mammalian skin, lipid vesicles must pass through a series of fine pores, each with a diameter less than 50 nm, under the influence of a suitable transdermal gradient. In addition, due to the lipid properties, these transferosomes can be self-optimizing (adaptive to the shape of pores, e.g., in the skin), self-repairing, and can frequently reach their targets without fragmenting, and often self-loading.

[0456] Other formulations amenable to the present invention are described in U.S. provisional application Ser. No. 61/018,616, filed Jan. 2, 2008; 61/018,611, filed Jan. 2, 2008; 61/039,748, filed Mar. 26, 2008; 61/047,087, filed Apr. 22, 2008 and 61/051,528, filed May 8, 2008. PCT application no PCT/US2007/080331, filed Oct. 3, 2007 also describes formulations that are amenable to the present invention.

[0457] Transferosomes are yet another type of liposomes, and are highly deformable lipid aggregates which are attractive candidates for drug delivery vehicles. Transferosomes can be described as lipid droplets which are so highly deformable that they are easily able to penetrate through pores which are smaller than the droplet. Transferosomes are adaptable to the environment in which they are used, e.g., they are self-optimizing (adaptive to the shape of pores in the skin), self-repairing, frequently reach their targets without fragmenting, and often self-loading. To make transferosomes it is possible to add surface edge-activators, usually surfactants, to a standard liposomal composition. Transferosomes have been used to deliver serum albumin to the skin. The transferosome-mediated delivery of serum albumin has been shown to be as effective as subcutaneous injection of a solution containing serum albumin.

[0458] Surfactants find wide application in formulations such as emulsions (including microemulsions) and liposomes. The most common way of classifying and ranking the properties of the many different types of surfactants, both natural and synthetic, is by the use of the hydrophile/lipophile balance (HLB). The nature of the hydrophilic group (also known as the “head”) provides the most useful means for categorizing the different surfactants used in formulations (Rieger, in Pharmaceutical Dosage Forms, Marcel Dekker, Inc., New York, N.Y., 1988, p. 285).

[0459] If the surfactant molecule is not ionized, it is classified as a nonionic surfactant. Nonionic surfactants find wide application in pharmaceutical and cosmetic products and are usable over a wide range of pH values. In general their HLB values range from 2 to about 18 depending on their structure. Nonionic surfactants include nonionic esters such as ethylene glycol esters, propylene glycol esters, glyceryl esters, polyglyceryl esters, sorbitan esters, sucrose esters, and ethoxylated esters. Nonionic alkanolamides and ethers such as fatty alcohol ethoxylates, propoxylated alcohols, and ethoxylated/propoxylated block polymers are also included in this class. The polyoxyethylene surfactants are the most popular members of the nonionic surfactant class.

[0460] If the surfactant molecule carries a negative charge when it is dissolved or dispersed in water, the surfactant is classified as anionic. Anionic surfactants include carboxylates such as soaps, acyl lactylates, acyl amides of amino acids, esters of sulfuric acid such as alkyl sulfates and ethoxylated alkyl sulfates, sulfonates such as alkyl benzene sulfonates, acyl isethionates, acyl taurates and sulfosuccinates, and phosphates. The most important members of the anionic surfactant class are the alkyl sulfates and the soaps.

[0461] If the surfactant molecule carries a positive charge when it is dissolved or dispersed in water, the surfactant is classified as cationic. Cationic surfactants include quaternary ammonium salts and ethoxylated amines. The quaternary ammonium salts are the most used members of this class.

[0462] If the surfactant molecule has the ability to carry either a positive or negative charge, the surfactant is classified as amphoteric. Amphoteric surfactants include acrylic acid derivatives, substituted alkylamides, N-alkylbetaines and phosphatides.

[0463] The use of surfactants in drug products, formulations and in emulsions has been reviewed (Rieger, in Pharmaceutical Dosage Forms, Marcel Dekker, Inc., New York, N.Y., 1988, p. 285).

[0464] The iRNA for use in the methods of the invention can also be provided as micellar formulations. “Micelles” are defined herein as a particular type of molecular assembly in which amphipathic molecules are arranged in a spherical structure such that all the hydrophobic portions of the molecules are directed inward, leaving the hydrophilic portions in contact with the surrounding aqueous phase. The converse arrangement exists if the environment is hydrophobic.

[0465] A mixed micellar formulation suitable for delivery through transdermal membranes may be prepared by mixing an aqueous solution of the siRNA composition, an alkali metal C₈ to C₂₂ alkyl sulphate, and a micelle forming compounds. Exemplary micelle forming compounds include lecithin, hyaluronic acid, pharmaceutically acceptable salts of hyaluronic acid, glycolic acid, lactic acid, chamomile extract, cucumber extract, oleic acid, linoleic acid, linolenic acid, monoolein, monooleates, monolaurates, borage oil, evening of primrose oil, menthol, trihydroxy oxo cholanyl glycine and pharmaceutically acceptable salts thereof, glycerin, polyglycerin, lysine, polylysine, triolein, polyoxyethylene ethers and analogues thereof, polidocanol alkyl ethers and analogues thereof, chenodeoxycholate, deoxycholate, and mixtures thereof. The micelle forming compounds may be added at the same time or after addition of the alkali metal alkyl sulphate. Mixed micelles will form with substantially any kind of mixing of the ingredients but vigorous mixing in order to provide smaller size micelles.

[0466] In one method a first micellar composition is prepared which contains the siRNA composition and at least the alkali metal alkyl sulphate. The first micellar composition is then mixed with at least three micelle forming compounds to form a mixed micellar composition. In another method, the micellar composition is prepared by mixing the siRNA composition, the alkali metal alkyl sulphate and at least one of the micelle forming compounds, followed by addition of the remaining micelle forming compounds, with vigorous mixing.

[0467] Phenol and/or m-cresol may be added to the mixed micellar composition to stabilize the formulation and protect against bacterial growth. Alternatively, phenol and/or m-cresol may be added with the micelle forming ingredients. An isotonic agent such as glycerin may also be added after formation of the mixed micellar composition.

[0468] For delivery of the micellar formulation as a spray, the formulation can be put into an aerosol dispenser and the dispenser is charged with a propellant. The propellant, which is under pressure, is in liquid form in the dispenser. The ratios of the ingredients are adjusted so that the aqueous and propellant phases become one, i.e., there is one phase. If there are two phases, it is necessary to shake the dispenser prior to dispensing a portion of the contents, e.g., through a metered valve. The dispensed dose of pharmaceutical agent is propelled from the metered valve in a fine spray.

[0469] Propellants may include hydrogen-containing chlorofluorocarbons, hydrogen-containing fluorocarbons, dimethyl ether and diethyl ether. In certain embodiments, HFA 134a (1,1,1,2 tetrafluoroethane) may be used.

[0470] The specific concentrations of the essential ingredients can be determined by relatively straightforward experimentation. For absorption through the oral cavities, it is often desirable to increase, e.g., at least double or triple, the dosage for through injection or administration through the gastrointestinal tract.

[0471] B. Lipid Particles

[0472] The iRNAs, e.g., dsRNAs of in the invention may be fully encapsulated in a lipid formulation, e.g., a LNP, or other nucleic acid-lipid particle.

[0473] As used herein, the term “LNP” refers to a stable nucleic acid-lipid particle. LNPs contain a cationic lipid, a non-cationic lipid, and a lipid that prevents aggregation of the particle (e.g., a PEG-lipid conjugate). LNPs are extremely useful for systemic applications, as they exhibit extended circulation lifetimes following intravenous (i.v.) injection and accumulate at distal sites (e.g., sites physically separated from the administration site). LNPs include “pSPLP,” which include an encapsulated condensing agent-nucleic acid complex as set forth in PCT Publication No. WO 00/03683. The particles of the present invention typically have a mean diameter of about 50 nm to about 150 nm, more typically about 60 nm to about 130 nm, more typically about 70 nm to about 110 nm, most typically about 70 nm to about 90 nm, and are substantially nontoxic. In addition, the nucleic acids when present in the nucleic acid-lipid particles of the present invention are resistant in aqueous solution to degradation with a nuclease. Nucleic acid-lipid particles and their method of preparation are disclosed in, e.g., U.S. Pat. Nos. 5,976,567; 5,981,501; 6,534,484; 6,586,410; 6,815,432; U.S. Publication No. 2010/0324120 and PCT Publication No. WO 96/40964.

[0474] In one embodiment, the lipid to drug ratio (mass/mass ratio) (e.g., lipid to dsRNA ratio) will be in the range of from about 1:1 to about 50:1, from about 1:1 to about 25:1, from about 3:1 to about 15:1, from about 4:1 to about 10:1, from about 5:1 to about 9:1, or about 6:1 to about 9:1. Ranges intermediate to the above recited ranges are also contemplated to be part of the invention.

[0475] The cationic lipid can be, for example, N,N-dioleyl-N,N-dimethylammonium chloride (DODAC), N,N-distearyl-N,N-dimethylammonium bromide (DDAB), N—(I-(2,3-dioleoyloxy)propyl)-N,N,N-trimethylammonium chloride (DOTAP), N—(I-(2,3-dioleyloxy)propyl)-N,N,N-trimethylammonium chloride (DOTMA), N,N-dimethyl-2,3-dioleyloxy)propylamine (DODMA), 1,2-DiLinoleyloxy-N,N-dimethylaminopropane (DLinDMA), 1,2-Dilinolenyloxy-N,N-dimethylaminopropane (DLenDMA), 1,2-Dilinoleylcarbamoyloxy-3-dimethylaminopropane (DLin-C-DAP), 1,2-Dilinoleyoxy-3-(dimethylamino)acetoxypropane (DLin-DAC), 1,2-Dilinoleyoxy-3-morpholinopropane (DLin-MA), 1,2-Dilinoleoyl-3-dimethylaminopropane (DLinDAP), 1,2-Dilinoleylthio-3-dimethylaminopropane (DLin-S-DMA), 1-Linoleoyl-2-linoleyloxy-3-dimethylaminopropane (DLin-2-DMAP), 1,2-Dilinoleyloxy-3-trimethylaminopropane chloride salt (DLin-TMA.Cl), 1,2-Dilinoleoyl-3-trimethylaminopropane chloride salt (DLin-TAP.Cl), 1,2-Dilinoleyloxy-3-(N-methylpiperazino)propane (DLin-MPZ), or 3-(N,N-Dilinoleylamino)-1,2-propanediol (DLinAP), 3-(N,N-Dioleylamino)-1,2-propanedio (DOAP), 1,2-Dilinoleyloxo-3-(2-N,N-dimethylamino)ethoxypropane (DLin-EG-DMA), 1,2-Dilinolenyloxy-N,N-dimethylaminopropane (DLinDMA), 2,2-Dilinoleyl-4-dimethylaminomethyl-[1,3]-dioxolane (DLin-K-DMA) or analogs thereof, (3aR,5s,6aS)—N,N-dimethyl-2,2-di((9Z,12Z)-octadeca-9,12-dienyl)tetrahydro-3aH-cyclopenta[d][1,3]dioxol-5-amine (ALN100), (6Z,9Z,28Z,31Z)-heptatriaconta-6,9,28,31-tetraen-19-yl 4-(dimethylamino)butanoate (MC3), 1,1′-(2-(4-(2-((2-(bis(2-hydroxydodecyl)amino)ethyl)(2-hydroxydodecyl)amino)ethyl)piperazin-1-yl)ethylazanediyl)didodecan-2-ol (Tech GI), or a mixture thereof. The cationic lipid can comprise from about 20 mol % to about 50 mol % or about 40 mol % of the total lipid present in the particle.

[0476] In another embodiment, the compound 2,2-Dilinoleyl-4-dimethylaminoethyl-[1,3]-dioxolane can be used to prepare lipid-siRNA nanoparticles. Synthesis of 2,2-Dilinoleyl-4-dimethylaminoethyl-[1,3]-dioxolane is described in International application no. PCT/US2009/061897, published as WO/2010/048536, which is herein incorporated by reference.

[0477] In one embodiment, the lipid-siRNA particle includes 40% 2, 2-Dilinoleyl-4-dimethylaminoethyl-[1,3]-dioxolane: 10% DSPC: 40% Cholesterol: 10% PEG-C-DOMG (mole percent) with a particle size of 63.0±20 nm and a 0.027 siRNA/Lipid Ratio.

[0478] The ionizable/non-cationic lipid can be an anionic lipid or a neutral lipid including, but not limited to, distearoylphosphatidylcholine (DSPC), dioleoylphosphatidylcholine (DOPC), dipalmitoylphosphatidylcholine (DPPC), dioleoylphosphatidylglycerol (DOPG), dipalmitoylphosphatidylglycerol (DPPG), dioleoyl-phosphatidylethanolamine (DOPE), palmitoyloleoylphosphatidylcholine (POPC), palmitoyloleoylphosphatidylethanolamine (POPE), dioleoyl-phosphatidylethanolamine 4-(N-maleimidomethyl)-cyclohexane-1-carboxylate (DOPE-mal), dipalmitoyl phosphatidyl ethanolamine (DPPE), dimyristoylphosphoethanolamine (DMPE), distearoyl-phosphatidyl-ethanolamine (DSPE), 16-O-monomethyl PE, 16-O-dimethyl PE, 18-1-trans PE, 1-stearoyl-2-oleoyl-phosphatidyethanolamine (SOPE), cholesterol, or a mixture thereof. The non-cationic lipid can be from about 5 mol % to about 90 mol %, about 10 mol %, or about 58 mol % if cholesterol is included, of the total lipid present in the particle.

[0479] The conjugated lipid that inhibits aggregation of particles can be, for example, a polyethyleneglycol (PEG)-lipid including, without limitation, a PEG-diacylglycerol (DAG), a PEG-dialkyloxypropyl (DAA), a PEG-phospholipid, a PEG-ceramide (Cer), or a mixture thereof. The PEG-DAA conjugate can be, for example, a PEG-dilauryloxypropyl (Ci₂), a PEG-dimyristyloxypropyl (Ci₄), a PEG-dipalmityloxypropyl (Ci₆), or a PEG-distearyloxypropyl (C]₈). The conjugated lipid that prevents aggregation of particles can be from 0 mol % to about 20 mol % or about 2 mol % of the total lipid present in the particle.

[0480] In some embodiments, the nucleic acid-lipid particle further includes cholesterol at, e.g., about 10 mol % to about 60 mol % or about 48 mol % of the total lipid present in the particle.

[0481] In one embodiment, the lipidoid ND98-4HCl (MW 1487) (see U.S. patent application Ser. No. 12/056,230, filed Mar. 26, 2008, which is incorporated herein by reference), Cholesterol (Sigma-Aldrich), and PEG-Ceramide C16 (Avanti Polar Lipids) can be used to prepare lipid-dsRNA nanoparticles (i.e., LNP01 particles). Stock solutions of each in ethanol can be prepared as follows: ND98, 133 mg/ml; Cholesterol, 25 mg/ml, PEG-Ceramide C16, 100 mg/ml. The ND98, Cholesterol, and PEG-Ceramide C16 stock solutions can then be combined in a, e.g., 42:48:10 molar ratio. The combined lipid solution can be mixed with aqueous dsRNA (e.g., in sodium acetate pH 5) such that the final ethanol concentration is about 35-45% and the final sodium acetate concentration is about 100-300 mM. Lipid-dsRNA nanoparticles typically form spontaneously upon mixing. Depending on the desired particle size distribution, the resultant nanoparticle mixture can be extruded through a polycarbonate membrane (e.g., 100 nm cut-off) using, for example, a thermobarrel extruder, such as Lipex Extruder (Northern Lipids, Inc). In some cases, the extrusion step can be omitted. Ethanol removal and simultaneous buffer exchange can be accomplished by, for example, dialysis or tangential flow filtration. Buffer can be exchanged with, for example, phosphate buffered saline (PBS) at about pH 7, e.g., about pH 6.9, about pH 7.0, about pH 7.1, about pH 7.2, about pH 7.3, or about pH 7.4. LNPO1 formulations are described, e.g., in International Application Publication No. WO 2008/042973, which is hereby incorporated by reference.

Additional exemplary lipid-dsRNA formulations are described in Table A.

TABLE A
Exemplary lipid dsRNA formulations

| | | cationic lipid/non-cationic |
|---|---|---|
| | | lipid/cholesterol/PEG-lipid conjugate |
| | Ionizable/Cationic Lipid | Lipid:siRNA ratio |
| LNP_DLinDMA | 1,2-Dilinolenyloxy-N,N- | DLinDMA/DPPC/Cholesterol/PEG- |
| | dimethylaminopropane (DLinDMA) | CDMA |
| | | (57.1/7.1/34.4/1.4) |
| | | lipid:siRNA~7:1 |
| 2-XTC | 2,2-Dilinoleyl-4-dimethylaminoethyl- | XTC/DPPC/Cholesterol/PEG-cDMA |
| | [1,3]-dioxolane (XTC) | 57.1/7.1/34.4/1.4 |
| | | lipid:siRNA~7:1 |
| LNP05 | 2,2-Dilinoley1-4-dimethylaminoethyl- | XTC/DSPC/Cholesterol/PEG-DMG |
| | [1,3]-dioxolane (XTC) | 57.5/7.5/31.5/3.5 |
| | | lipid:siRNA~6:1 |
| LNP06 | 2,2-Dilinoleyl-4-dimethylaminoethyl- | XTC/DSPC/Cholesterol/PEG-DMG |
| | [1,3]-dioxolane (XTC) | 57.5/7.5/31.5/3.5 |
| | | lipid:siRNA~11:1 |
| LNP07 | 2,2-Dilinoley1-4-dimethylaminoethyl- | XTC/DSPC/Cholesterol/PEG-DMG |
| | [1,3]-dioxolane (XTC) | 60/7.5/31/1.5, |
| | | lipid:siRNA~6:1 |
| LNP08 | 2,2-Dilinoleyl-4-dimethylaminoethyl- | XTC/DSPC/Cholesterol/PEG-DMG |
| | [1,3]-dioxolane (XTC) | 60/7.5/31/1.5, |
| | | lipid:siRNA~11:1 |
| LNP09 | 2,2-Dilinoleyl-4-dimethylaminoethyl- | XTC/DSPC/Cholesterol/PEG-DMG |
| | [1,3]-dioxolane (XTC) | 50/10/38.5/1.5 |
| | | Lipid:siRNA 10:1 |
| LNP10 | (3aR,5s,6aS)-N,N-dimethyl-2,2- | ALN100/DSPC/Cholesterol/PEG- |
| | di((9Z,12Z)-octadeca-9,12- | DMG |
| | dienyl)tetrahydro-3aH- | 50/10/38.5/1.5 |
| | cyclopenta[d][1,3]dioxol-5-amine | Lipid:siRNA 10:1 |
| | (ALN100) | |
| LNP11 | (6Z,9Z,28Z,31Z)-heptatriaconta- | MC-3/DSPC/Cholesterol/PEG-DMG |
| | 6,9,28,31-tetraen-19-yl 4- | 50/10/38.5/1.5 |
| | (dimethylamino)butanoate (MC3) | Lipid:siRNA 10:1 |
| LNP12 | 1,1′-(2-(4-(2-((2-(bis(2- | Tech G1/DSPC/Cholesterol/PEG- |
| | hydroxydodecyl)amino)ethyl)(2- | DMG |
| | hydroxydodecyl)amino)ethyl)piperazin- | 50/10/38.5/1.5 |
| | 1-yl)ethylazanediyl)didodecan-2-ol | Lipid:siRNA 10:1 |
| | (C12-200> | |
| LNP13 | XTC | XTC/DSPC/Chol/PEG-DMG |
| | | 50/10/38.5/1.5 |
| | | Lipid:siRNA:33:1 |
| LNP14 | MC3 | MC3/DSPC/Chol/PEG-DMG |
| | | 40/15/40/5 |
| | | Lipid:siRNA:11:1 |
| LNP15 | MC3 | MC3/DSPC/Chol/PEG-DSG/GalNAc- |
| | | PEG-DSG |
| | | 50/10/35/4.5/0.5 |
| | | Lipid:siRNA:11:1 |
| LNP16 | MC3 | MC3/DSPC/Chol/PEG-DMG |
| | | 50/10/38.5/1.5 |
| | | Lipid:siRNA:7:1 |
| LNP17 | MC3 | MC3/DSPC/Chol/PEG-DSG |
| | | 50/10/38.5/1.5 |
| | | Lipid:siRNA:10:1 |
| LNP18 | MC3 | MC3/DSPC/Chol/PEG-DMG |
| | | 50/10/38.5/1.5 |
| | | Lipid:siRNA:12:1 |
| LNP19 | MC3 | MC3/DSPC/Chol/PEG-DMG |
| | | 50/10/35/5 |
| | | Lipid:siRNA:8:1 |
| LNP20 | MC3 | MC3/DSPC/Chol/PEG-DPG |
| | | 50/10/38.5/1.5 |
| | | Lipid:siRNA:10:1 |
| LNP21 | C12-200 | C12-200/DSPC/Chol/PEG-DSG |
| | | 50/10/38.5/1.5 |
| | | Lipid:siRNA:7:1 |
| LNP22 | XTC | XTC/DSPC/Chol/PEG-DSG |
| | | 50/10/38.5/1.5 |
| | | Lipid:siRNA:10:1 |

[0482] Abbreviations in Table A include the following: DSPC: distearoylphosphatidylcholine; DPPC: dipalmitoylphosphatidylcholine; PEG-DMG: PEG-didimyristoyl glycerol (C14-PEG, or PEG-C14) (PEG with avg mol wt of 2000); PEG-DSG: PEG-distyryl glycerol (C18-PEG, or PEG-C18) (PEG with avg mol wt of 2000); PEG-cDMA: PEG-carbamoyl-1,2-dimyristyloxypropylamine (PEG with avg mol wt of 2000).

[0483] DLinDMA (1,2-Dilinolenyloxy-N,N-dimethylaminopropane) comprising formulations are described in International Publication No. WO2009/127060, filed Apr. 15, 2009, which is hereby incorporated by reference.

[0484] XTC comprising formulations are described, e.g., in U.S. Provisional Ser. No. 61/148,366, filed Jan. 29, 2009; U.S. Provisional Ser. No. 61/156,851, filed Mar. 2, 2009; U.S. Provisional Serial No. filed Jun. 10, 2009; U.S. Provisional Ser. No. 61/228,373, filed Jul. 24, 2009; U.S. Provisional Ser. No. 61/239,686, filed Sep. 3, 2009, and International Application No. PCT/US2010/022614, filed Jan. 29, 2010, which are hereby incorporated by reference.

[0485] MC3 comprising formulations are described, e.g., in U.S. Publication No. 2010/0324120, filed Jun. 10, 2010, the entire contents of which are hereby incorporated by reference.

[0486] ALNY-100 comprising formulations are described, e.g., International patent application number PCT/US09/63933, filed on Nov. 10, 2009, which is hereby incorporated by reference.

[0487] C12-200 comprising formulations are described in U.S. Provisional Ser. No. 61/175,770, filed May 5, 2009 and International Application No. PCT/US10/33777, filed May 5, 2010, which are hereby incorporated by reference.

[0488] C. Additional Formulations

[0489] i. Emulsions

[0490] The compositions of the present invention can be prepared and formulated as emulsions. Emulsions are typically heterogeneous systems of one liquid dispersed in another in the form of droplets usually exceeding 0.1 m in diameter (see e.g., Ansel's Pharmaceutical Dosage Forms and Drug Delivery Systems, Allen, L V., Popovich N G., and Ansel H C., 2004, Lippincott Williams & Wilkins (8th ed.), New York, NY; Idson, in Pharmaceutical Dosage Forms, Lieberman, Rieger and Banker (Eds.), 1988, Marcel Dekker, Inc., New York, N.Y., volume 1, p. 199; Rosoff, in Pharmaceutical Dosage Forms, Lieberman, Rieger and Banker (Eds.), 1988, Marcel Dekker, Inc., New York, N.Y., Volume 1, p. 245; Block in Pharmaceutical Dosage Forms, Lieberman, Rieger and Banker (Eds.), 1988, Marcel Dekker, Inc., New York, N.Y., volume 2, p. 335; Higuchi et al., in Remington's Pharmaceutical Sciences, Mack Publishing Co., Easton, Pa., 1985, p. 301). Emulsions are often biphasic systems comprising two immiscible liquid phases intimately mixed and dispersed with each other. In general, emulsions can be of either the water-in-oil (w/o) or the oil-in-water (o/w) variety. When an aqueous phase is finely divided into and dispersed as minute droplets into a bulk oily phase, the resulting composition is called a water-in-oil (w/o) emulsion. Alternatively, when an oily phase is finely divided into and dispersed as minute droplets into a bulk aqueous phase, the resulting composition is called an oil-in-water (o/w) emulsion. Emulsions can contain additional components in addition to the dispersed phases, and the active drug which can be present as a solution in either the aqueous phase, oily phase or itself as a separate phase. Pharmaceutical excipients such as emulsifiers, stabilizers, dyes, and anti-oxidants can also be present in emulsions as needed. Pharmaceutical emulsions can also be multiple emulsions that are comprised of more than two phases such as, for example, in the case of oil-in-water-in-oil (o/w/o) and water-in-oil-in-water (w/o/w) emulsions. Such complex formulations often provide certain advantages that simple binary emulsions do not. Multiple emulsions in which individual oil droplets of an o/w emulsion enclose small water droplets constitute a w/o/w emulsion. Likewise a system of oil droplets enclosed in globules of water stabilized in an oily continuous phase provides an o/w/o emulsion.

[0491] Emulsions are characterized by little or no thermodynamic stability. Often, the dispersed or discontinuous phase of the emulsion is well dispersed into the external or continuous phase and maintained in this form through the means of emulsifiers or the viscosity of the formulation. Either of the phases of the emulsion can be a semisolid or a solid, as is the case of emulsion-style ointment bases and creams. Other means of stabilizing emulsions entail the use of emulsifiers that can be incorporated into either phase of the emulsion. Emulsifiers can broadly be classified into four categories: synthetic surfactants, naturally occurring emulsifiers, absorption bases, and finely dispersed solids (see e.g., Ansel's Pharmaceutical Dosage Forms and Drug Delivery Systems, Allen, L V., Popovich N G., and Ansel H C., 2004, Lippincott Williams & Wilkins (8th ed.), New York, NY; Idson, in Pharmaceutical Dosage Forms, Lieberman, Rieger and Banker (Eds.), 1988, Marcel Dekker, Inc., New York, N.Y., volume 1, p. 199).

[0492] Synthetic surfactants, also known as surface active agents, have found wide applicability in the formulation of emulsions and have been reviewed in the literature (see e.g., Ansel's Pharmaceutical Dosage Forms and Drug Delivery Systems, Allen, L V., Popovich N G., and Ansel H C., 2004, Lippincott Williams & Wilkins (8th ed.), New York, NY; Rieger, in Pharmaceutical Dosage Forms, Lieberman, Rieger and Banker (Eds.), 1988, Marcel Dekker, Inc., New York, N.Y., volume 1, p. 285; Idson, in Pharmaceutical Dosage Forms, Lieberman, Rieger and Banker (Eds.), Marcel Dekker, Inc., New York, N.Y., 1988, volume 1, p. 199). Surfactants are typically amphiphilic and comprise a hydrophilic and a hydrophobic portion. The ratio of the hydrophilic to the hydrophobic nature of the surfactant has been termed the hydrophile/lipophile balance (HLB) and is a valuable tool in categorizing and selecting surfactants in the preparation of formulations. Surfactants can be classified into different classes based on the nature of the hydrophilic group: nonionic, anionic, cationic and amphoteric (see e.g., Ansel's Pharmaceutical Dosage Forms and Drug Delivery Systems, Allen, L V., Popovich N G., and Ansel H C., 2004, Lippincott Williams & Wilkins (8th ed.), New York, NY Rieger, in Pharmaceutical Dosage Forms, Lieberman, Rieger and Banker (Eds.), 1988, Marcel Dekker, Inc., New York, N.Y., volume 1, p. 285).

[0493] Naturally occurring emulsifiers used in emulsion formulations include lanolin, beeswax, phosphatides, lecithin and acacia. Absorption bases possess hydrophilic properties such that they can soak up water to form w/o emulsions yet retain their semisolid consistencies, such as anhydrous lanolin and hydrophilic petrolatum. Finely divided solids have also been used as good emulsifiers especially in combination with surfactants and in viscous preparations. These include polar inorganic solids, such as heavy metal hydroxides, nonswelling clays such as bentonite, attapulgite, hectorite, kaolin, montmorillonite, colloidal aluminum silicate and colloidal magnesium aluminum silicate, pigments and nonpolar solids such as carbon or glyceryl tristearate.

[0494] A large variety of non-emulsifying materials are also included in emulsion formulations and contribute to the properties of emulsions. These include fats, oils, waxes, fatty acids, fatty alcohols, fatty esters, humectants, hydrophilic colloids, preservatives and antioxidants (Block, in Pharmaceutical Dosage Forms, Lieberman, Rieger and Banker (Eds.), 1988, Marcel Dekker, Inc., New York, N.Y., volume 1, p. 335; Idson, in Pharmaceutical Dosage Forms, Lieberman, Rieger and Banker (Eds.), 1988, Marcel Dekker, Inc., New York, N.Y., volume 1, p. 199).

[0495] Hydrophilic colloids or hydrocolloids include naturally occurring gums and synthetic polymers such as polysaccharides (for example, acacia, agar, alginic acid, carrageenan, guar gum, karaya gum, and tragacanth), cellulose derivatives (for example, carboxymethylcellulose and carboxypropylcellulose), and synthetic polymers (for example, carbomers, cellulose ethers, and carboxyvinyl polymers). These disperse or swell in water to form colloidal solutions that stabilize emulsions by forming strong interfacial films around the dispersed-phase droplets and by increasing the viscosity of the external phase.

[0496] Since emulsions often contain a number of ingredients such as carbohydrates, proteins, sterols and phosphatides that can readily support the growth of microbes, these formulations often incorporate preservatives. Commonly used preservatives included in emulsion formulations include methyl paraben, propyl paraben, quaternary ammonium salts, benzalkonium chloride, esters of p-hydroxybenzoic acid, and boric acid. Antioxidants are also commonly added to emulsion formulations to prevent deterioration of the formulation. Antioxidants used can be free radical scavengers such as tocopherols, alkyl gallates, butylated hydroxyanisole, butylated hydroxytoluene, or reducing agents such as ascorbic acid and sodium metabisulfite, and antioxidant synergists such as citric acid, tartaric acid, and lecithin.

[0497] The application of emulsion formulations via dermatological, oral and parenteral routes and methods for their manufacture have been reviewed in the literature (see e.g., Ansel's Pharmaceutical Dosage Forms and Drug Delivery Systems, Allen, L V., Popovich N G., and Ansel H C., 2004, Lippincott Williams & Wilkins (8th ed.), New York, NY; Idson, in Pharmaceutical Dosage Forms, Lieberman, Rieger and Banker (Eds.), 1988, Marcel Dekker, Inc., New York, N.Y., volume 1, p. 199). Emulsion formulations for oral delivery have been very widely used because of ease of formulation, as well as efficacy from an absorption and bioavailability standpoint (see e.g., Ansel's Pharmaceutical Dosage Forms and Drug Delivery Systems, Allen, L V., Popovich N G., and Ansel H C., 2004, Lippincott Williams & Wilkins (8th ed.), New York, NY; Rosoff, in Pharmaceutical Dosage Forms, Lieberman, Rieger and Banker (Eds.), 1988, Marcel Dekker, Inc., New York, N.Y., volume 1, p. 245; Idson, in Pharmaceutical Dosage Forms, Lieberman, Rieger and Banker (Eds.), 1988, Marcel Dekker, Inc., New York, N.Y., volume 1, p. 199). Mineral-oil base laxatives, oil-soluble vitamins and high fat nutritive preparations are among the materials that have commonly been administered orally as o/w emulsions.

[0498] ii. Microemulsions

[0499] In one embodiment of the present invention, the compositions of iRNAs and nucleic acids are formulated as microemulsions. A microemulsion can be defined as a system of water, oil and amphiphile which is a single optically isotropic and thermodynamically stable liquid solution (see e.g., Ansel's Pharmaceutical Dosage Forms and Drug Delivery Systems, Allen, L V., Popovich N G., and Ansel H C., 2004, Lippincott Williams & Wilkins (8th ed.), New York, NY; Rosoff, in Pharmaceutical Dosage Forms, Lieberman, Rieger and Banker (Eds.), 1988, Marcel Dekker, Inc., New York, N.Y., volume 1, p. 245). Typically microemulsions are systems that are prepared by first dispersing an oil in an aqueous surfactant solution and then adding a sufficient amount of a fourth component, generally an intermediate chain-length alcohol to form a transparent system. Therefore, microemulsions have also been described as thermodynamically stable, isotropically clear dispersions of two immiscible liquids that are stabilized by interfacial films of surface-active molecules (Leung and Shah, in: Controlled Release of Drugs: Polymers and Aggregate Systems, Rosoff, M., Ed., 1989, VCH Publishers, New York, pages 185-215). Microemulsions commonly are prepared via a combination of three to five components that include oil, water, surfactant, cosurfactant and electrolyte. Whether the microemulsion is of the water-in-oil (w/o) or an oil-in-water (o/w) type is dependent on the properties of the oil and surfactant used and on the structure and geometric packing of the polar heads and hydrocarbon tails of the surfactant molecules (Schott, in Remington's Pharmaceutical Sciences, Mack Publishing Co., Easton, Pa., 1985, p. 271).

[0500] The phenomenological approach utilizing phase diagrams has been extensively studied and has yielded a comprehensive knowledge, to one skilled in the art, of how to formulate microemulsions (see e.g., Ansel's Pharmaceutical Dosage Forms and Drug Delivery Systems, Allen, L V., Popovich N G., and Ansel H C., 2004, Lippincott Williams & Wilkins (8th ed.), New York, NY; Rosoff, in Pharmaceutical Dosage Forms, Lieberman, Rieger and Banker (Eds.), 1988, Marcel Dekker, Inc., New York, N.Y., volume 1, p. 245; Block, in Pharmaceutical Dosage Forms, Lieberman, Rieger and Banker (Eds.), 1988, Marcel Dekker, Inc., New York, N.Y., volume 1, p. 335). Compared to conventional emulsions, microemulsions offer the advantage of solubilizing water-insoluble drugs in a formulation of thermodynamically stable droplets that are formed spontaneously.

[0501] Surfactants used in the preparation of microemulsions include, but are not limited to, ionic surfactants, non-ionic surfactants, Brij 96, polyoxyethylene oleyl ethers, polyglycerol fatty acid esters, tetraglycerol monolaurate (ML310), tetraglycerol monooleate (MO310), hexaglycerol monooleate (PO310), hexaglycerol pentaoleate (PO500), decaglycerol monocaprate (MCA750), decaglycerol monooleate (MO750), decaglycerol sequioleate (SO750), decaglycerol decaoleate (DAO750), alone or in combination with cosurfactants. The cosurfactant, usually a short-chain alcohol such as ethanol, 1-propanol, and 1-butanol, serves to increase the interfacial fluidity by penetrating into the surfactant film and consequently creating a disordered film because of the void space generated among surfactant molecules. Microemulsions can, however, be prepared without the use of cosurfactants and alcohol-free self-emulsifying microemulsion systems are known in the art. The aqueous phase can typically be, but is not limited to, water, an aqueous solution of the drug, glycerol, PEG300, PEG400, polyglycerols, propylene glycols, and derivatives of ethylene glycol. The oil phase can include, but is not limited to, materials such as Captex 300, Captex 355, Capmul MCM, fatty acid esters, medium chain (C8-C12) mono, di, and tri-glycerides, polyoxyethylated glyceryl fatty acid esters, fatty alcohols, polyglycolized glycerides, saturated polyglycolized C8-C10 glycerides, vegetable oils and silicone oil.

[0502] Microemulsions are particularly of interest from the standpoint of drug solubilization and the enhanced absorption of drugs. Lipid based microemulsions (both o/w and w/o) have been proposed to enhance the oral bioavailability of drugs, including peptides (see e.g., U.S. Pat. Nos. 6,191,105; 7,063,860; 7,070,802; 7,157,099; Constantinides et al., Pharmaceutical Research, 1994, 11, 1385-1390; Ritschel, Meth. Find. Exp. Clin. Pharmacol., 1993, 13, 205). Microemulsions afford advantages of improved drug solubilization, protection of drug from enzymatic hydrolysis, possible enhancement of drug absorption due to surfactant-induced alterations in membrane fluidity and permeability, ease of preparation, ease of oral administration over solid dosage forms, improved clinical potency, and decreased toxicity (see e.g., U.S. Pat. Nos. 6,191,105; 7,063,860; 7,070,802; 7,157,099; Constantinides et al., Pharmaceutical Research, 1994, 11, 1385; Ho et al., J. Pharm. Sci., 1996, 85, 138-143). Often microemulsions can form spontaneously when their components are brought together at ambient temperature. This can be particularly advantageous when formulating thermolabile drugs, peptides or iRNAs. Microemulsions have also been effective in the transdermal delivery of active components in both cosmetic and pharmaceutical applications. It is expected that the microemulsion compositions and formulations of the present invention will facilitate the increased systemic absorption of iRNAs and nucleic acids from the gastrointestinal tract, as well as improve the local cellular uptake of iRNAs and nucleic acids.

[0503] Microemulsions of the present invention can also contain additional components and additives such as sorbitan monostearate (Grill 3), Labrasol, and penetration enhancers to improve the properties of the formulation and to enhance the absorption of the iRNAs and nucleic acids of the present invention. Penetration enhancers used in the microemulsions of the present invention can be classified as belonging to one of five broad categories—surfactants, fatty acids, bile salts, chelating agents, and non-chelating non-surfactants (Lee et al., Critical Reviews in Therapeutic Drug Carrier Systems, 1991, p. 92). Each of these classes has been discussed above.

[0504] iii. Microparticles

[0505] An RNAi agent of the invention may be incorporated into a particle, e.g., a microparticle. Microparticles can be produced by spray-drying, but may also be produced by other methods including lyophilization, evaporation, fluid bed drying, vacuum drying, or a combination of these techniques.

[0506] iv. Penetration Enhancers

[0507] In one embodiment, the present invention employs various penetration enhancers to effect the efficient delivery of nucleic acids, particularly iRNAs, to the skin of animals. Most drugs are present in solution in both ionized and nonionized forms. However, usually only lipid soluble or lipophilic drugs readily cross cell membranes. It has been discovered that even non-lipophilic drugs can cross cell membranes if the membrane to be crossed is treated with a penetration enhancer. In addition to aiding the diffusion of non-lipophilic drugs across cell membranes, penetration enhancers also enhance the permeability of lipophilic drugs.

[0508] Penetration enhancers can be classified as belonging to one of five broad categories, i.e., surfactants, fatty acids, bile salts, chelating agents, and non-chelating non-surfactants (see e.g., Malmsten, M. Surfactants and polymers in drug delivery, Informa Health Care, New York, NY, 2002; Lee et al., Critical Reviews in Therapeutic Drug Carrier Systems, 1991, p. 92). Each of the above mentioned classes of penetration enhancers are described below in greater detail.

[0509] Surfactants (or “surface-active agents”) are chemical entities which, when dissolved in an aqueous solution, reduce the surface tension of the solution or the interfacial tension between the aqueous solution and another liquid, with the result that absorption of iRNAs through the mucosa is enhanced. In addition to bile salts and fatty acids, these penetration enhancers include, for example, sodium lauryl sulfate, polyoxyethylene-9-lauryl ether and polyoxyethylene-20-cetyl ether) (see e.g., Malmsten, M. Surfactants and polymers in drug delivery, Informa Health Care, New York, NY, 2002; Lee et al., Critical Reviews in Therapeutic Drug Carrier Systems, 1991, p. 92); and perfluorochemical emulsions, such as FC-43. Takahashi et al., J. Pharm. Pharmacol., 1988, 40, 252).

[0510] Various fatty acids and their derivatives which act as penetration enhancers include, for example, oleic acid, lauric acid, capric acid (n-decanoic acid), myristic acid, palmitic acid, stearic acid, linoleic acid, linolenic acid, dicaprate, tricaprate, monoolein (1-monooleoyl-rac-glycerol), dilaurin, caprylic acid, arachidonic acid, glycerol 1-monocaprate, 1-dodecylazacycloheptan-2-one, acylcarnitines, acylcholines, C₁₋₂₀ alkyl esters thereof (e.g., methyl, isopropyl and t-butyl), and mono- and di-glycerides thereof (i.e., oleate, laurate, caprate, myristate, palmitate, stearate, linoleate, etc.) (see e.g., Touitou, E., et al. Enhancement in Drug Delivery, CRC Press, Danvers, M A, 2006; Lee et al., Critical Reviews in Therapeutic Drug Carrier Systems, 1991, p. 92; Muranishi, Critical Reviews in Therapeutic Drug Carrier Systems, 1990, 7, 1-33; El Hariri et al., J. Pharm. Pharmacol., 1992, 44, 651-654).

[0511] The physiological role of bile includes the facilitation of dispersion and absorption of lipids and fat-soluble vitamins (see e.g., Malmsten, M. Surfactants and polymers in drug delivery, Informa Health Care, New York, NY, 2002; Brunton, Chapter 38 in: Goodman & Gilman's The Pharmacological Basis of Therapeutics, 9th Ed., Hardman et al. Eds., McGraw-Hill, New York, 1996, pp. 934-935). Various natural bile salts, and their synthetic derivatives, act as penetration enhancers. Thus the term “bile salts” includes any of the naturally occurring components of bile as well as any of their synthetic derivatives. Suitable bile salts include, for example, cholic acid (or its pharmaceutically acceptable sodium salt, sodium cholate), dehydrocholic acid (sodium dehydrocholate), deoxycholic acid (sodium deoxycholate), glucholic acid (sodium glucholate), glycholic acid (sodium glycocholate), glycodeoxycholic acid (sodium glycodeoxycholate), taurocholic acid (sodium taurocholate), taurodeoxycholic acid (sodium taurodeoxycholate), chenodeoxycholic acid (sodium chenodeoxycholate), ursodeoxycholic acid (UDCA), sodium tauro-24,25-dihydro-fusidate (STDHF), sodium glycodihydrofusidate and polyoxyethylene-9-lauryl ether (POE) (see e.g., Malmsten, M. Surfactants and polymers in drug delivery, Informa Health Care, New York, NY, 2002; Lee et al., Critical Reviews in Therapeutic Drug Carrier Systems, 1991, page 92; Swinyard, Chapter 39 In: Remington's Pharmaceutical Sciences, 18th Ed., Gennaro, ed., Mack Publishing Co., Easton, Pa., 1990, pages 782-783; Muranishi, Critical Reviews in Therapeutic Drug Carrier Systems, 1990, 7, 1-33; Yamamoto et al., J. Pharm. Exp. Ther., 1992, 263, 25; Yamashita et al., J. Pharm. Sci., 1990, 79, 579-583).

[0512] Chelating agents, as used in connection with the present invention, can be defined as compounds that remove metallic ions from solution by forming complexes therewith, with the result that absorption of iRNAs through the mucosa is enhanced. With regards to their use as penetration enhancers in the present invention, chelating agents have the added advantage of also serving as DNase inhibitors, as most characterized DNA nucleases require a divalent metal ion for catalysis and are thus inhibited by chelating agents (Jarrett, J. Chromatogr., 1993, 618, 315-339). Suitable chelating agents include but are not limited to disodium ethylenediaminetetraacetate (EDTA), citric acid, salicylates (e.g., sodium salicylate, 5-methoxysalicylate and homovanilate), N-acyl derivatives of collagen, laureth-9 and N-amino acyl derivatives of beta-diketones (enamines)(see e.g., Katdare, A. et al., Excipient development for pharmaceutical, biotechnology, and drug delivery, CRC Press, Danvers, M A, 2006; Lee et al., Critical Reviews in Therapeutic Drug Carrier Systems, 1991, page 92; Muranishi, Critical Reviews in Therapeutic Drug Carrier Systems, 1990, 7, 1-33; Buur et al., J. Control Rel., 1990, 14, 43-51).

[0513] As used herein, non-chelating non-surfactant penetration enhancing compounds can be defined as compounds that demonstrate insignificant activity as chelating agents or as surfactants but that nonetheless enhance absorption of iRNAs through the alimentary mucosa (see e.g., Muranishi, Critical Reviews in Therapeutic Drug Carrier Systems, 1990, 7, 1-33). This class of penetration enhancers includes, for example, unsaturated cyclic ureas, 1-alkyl- and 1-alkenylazacyclo-alkanone derivatives (Lee et al., Critical Reviews in Therapeutic Drug Carrier Systems, 1991, page 92); and non-steroidal anti-inflammatory agents such as diclofenac sodium, indomethacin and phenylbutazone (Yamashita et al., J. Pharm. Pharmacol., 1987, 39, 621-626).

[0514] Agents that enhance uptake of iRNAs at the cellular level can also be added to the pharmaceutical and other compositions of the present invention. For example, cationic lipids, such as lipofectin (Junichi et al, U.S. Pat. No. 5,705,188), cationic glycerol derivatives, and polycationic molecules, such as polylysine (Lollo et al., PCT Application WO 97/30731), are also known to enhance the cellular uptake of dsRNAs. Examples of commercially available transfection reagents include, for example Lipofectamine™ (Invitrogen; Carlsbad, CA), Lipofectamine 2000™ (Invitrogen; Carlsbad, CA), 293fectin™ (Invitrogen; Carlsbad, CA), Cellfectin™ (Invitrogen; Carlsbad, CA), DMRIE-C™ (Invitrogen; Carlsbad, CA), FreeStyle™ MAX (Invitrogen; Carlsbad, CA), Lipofectamine™ 2000 CD (Invitrogen; Carlsbad, CA), Lipofectamine™ (Invitrogen; Carlsbad, CA), RNAiMAX (Invitrogen; Carlsbad, CA), Oligofectamine™ (Invitrogen; Carlsbad, CA), Optifect™ (Invitrogen; Carlsbad, CA), X-tremeGENE Q2 Transfection Reagent (Roche; Grenzacherstrasse, Switzerland), DOTAP Liposomal Transfection Reagent (Grenzacherstrasse, Switzerland), DOSPER Liposomal Transfection Reagent (Grenzacherstrasse, Switzerland), or Fugene (Grenzacherstrasse, Switzerland), Transfectam® Reagent (Promega; Madison, WI), TransFast™ Transfection Reagent (Promega; Madison, WI), Tfx™-20 Reagent (Promega; Madison, WI), Tfx™-50 Reagent (Promega; Madison, WI), DreamFect™ (OZ Biosciences; Marseille, France), EcoTransfect (OZ Biosciences; Marseille, France), TransPass^{a} D1 Transfection Reagent (New England Biolabs; Ipswich, MA, USA), LyoVec™/LipoGen™ (Invitrogen; San Diego, CA, USA), PerFectin Transfection Reagent (Genlantis; San Diego, CA, USA), NeuroPORTER Transfection Reagent (Genlantis; San Diego, CA, USA), GenePORTER Transfection reagent (Genlantis; San Diego, CA, USA), GenePORTER 2 Transfection reagent (Genlantis; San Diego, CA, USA), Cytofectin Transfection Reagent (Genlantis; San Diego, CA, USA), BaculoPORTER Transfection Reagent (Genlantis; San Diego, CA, USA), TroganPORTER™ transfection Reagent (Genlantis; San Diego, CA, USA), RiboFect (Bioline; Taunton, MA, USA), PlasFect (Bioline; Taunton, MA, USA), UniFECTOR (B-Bridge International; Mountain View, CA, USA), SureFECTOR (B-Bridge International; Mountain View, CA, USA), or HiFect™ (B-Bridge International, Mountain View, CA, USA), among others.

[0515] Other agents can be utilized to enhance the penetration of the administered nucleic acids, including glycols such as ethylene glycol and propylene glycol, pyrrols such as 2-pyrrol, azones, and terpenes such as limonene and menthone.

[0516] v. Carriers

[0517] Certain compositions of the present invention also incorporate carrier compounds in the formulation. As used herein, “carrier compound” or “carrier” can refer to a nucleic acid, or analog thereof, which is inert (i.e., does not possess biological activity per se) but is recognized as a nucleic acid by in vivo processes that reduce the bioavailability of a nucleic acid having biological activity by, for example, degrading the biologically active nucleic acid or promoting its removal from circulation. The coadministration of a nucleic acid and a carrier compound, typically with an excess of the latter substance, can result in a substantial reduction of the amount of nucleic acid recovered in the liver, kidney or other extracirculatory reservoirs, presumably due to competition between the carrier compound and the nucleic acid for a common receptor. For example, the recovery of a partially phosphorothioate dsRNA in hepatic tissue can be reduced when it is coadministered with polyinosinic acid, dextran sulfate, polycytidic acid or 4-acetamido-4′ isothiocyano-stilbene-2,2′-disulfonic acid (Miyao et al., DsRNA Res. Dev., 1995, 5, 115-121; Takakura et al., DsRNA & Nucl. Acid Drug Dev., 1996, 6, 177-183.

[0518] vi. Excipients

[0519] In contrast to a carrier compound, a “pharmaceutical carrier” or “excipient” is a pharmaceutically acceptable solvent, suspending agent or any other pharmacologically inert vehicle for delivering one or more nucleic acids to an animal. The excipient can be liquid or solid and is selected, with the planned manner of administration in mind, so as to provide for the desired bulk, consistency, etc., when combined with a nucleic acid and the other components of a given pharmaceutical composition. Typical pharmaceutical carriers include, but are not limited to, binding agents (e.g., pregelatinized maize starch, polyvinylpyrrolidone or hydroxypropyl methylcellulose, etc.); fillers (e.g., lactose and other sugars, microcrystalline cellulose, pectin, gelatin, calcium sulfate, ethyl cellulose, polyacrylates or calcium hydrogen phosphate, etc.); lubricants (e.g., magnesium stearate, talc, silica, colloidal silicon dioxide, stearic acid, metallic stearates, hydrogenated vegetable oils, corn starch, polyethylene glycols, sodium benzoate, sodium acetate, etc.); disintegrants (e.g., starch, sodium starch glycolate, etc.); and wetting agents (e.g., sodium lauryl sulphate, etc).

[0520] Pharmaceutically acceptable organic or inorganic excipients suitable for non-parenteral administration which do not deleteriously react with nucleic acids can also be used to formulate the compositions of the present invention. Suitable pharmaceutically acceptable carriers include, but are not limited to, water, salt solutions, alcohols, polyethylene glycols, gelatin, lactose, amylose, magnesium stearate, talc, silicic acid, viscous paraffin, hydroxymethylcellulose, polyvinylpyrrolidone and the like.

[0521] Formulations for topical administration of nucleic acids can include sterile and non-sterile aqueous solutions, non-aqueous solutions in common solvents such as alcohols, or solutions of the nucleic acids in liquid or solid oil bases. The solutions can also contain buffers, diluents and other suitable additives. Pharmaceutically acceptable organic or inorganic excipients suitable for non-parenteral administration which do not deleteriously react with nucleic acids can be used.

[0522] Suitable pharmaceutically acceptable excipients include, but are not limited to, water, salt solutions, alcohol, polyethylene glycols, gelatin, lactose, amylose, magnesium stearate, talc, silicic acid, viscous paraffin, hydroxymethylcellulose, polyvinylpyrrolidone and the like.

[0523] vii. Other Components

[0524] The compositions of the present invention can additionally contain other adjunct components conventionally found in pharmaceutical compositions, at their art-established usage levels. Thus, for example, the compositions can contain additional, compatible, pharmaceutically-active materials such as, for example, antipruritics, astringents, local anesthetics or anti-inflammatory agents, or can contain additional materials useful in physically formulating various dosage forms of the compositions of the present invention, such as dyes, flavoring agents, preservatives, antioxidants, opacifiers, thickening agents and stabilizers. However, such materials, when added, should not unduly interfere with the biological activities of the components of the compositions of the present invention. The formulations can be sterilized and, if desired, mixed with auxiliary agents, e.g., lubricants, preservatives, stabilizers, wetting agents, emulsifiers, salts for influencing osmotic pressure, buffers, colorings, flavorings and/or aromatic substances and the like which do not deleteriously interact with the nucleic acid(s) of the formulation.

[0525] Aqueous suspensions can contain substances which increase the viscosity of the suspension including, for example, sodium carboxymethylcellulose, sorbitol and/or dextran. The suspension can also contain stabilizers.

[0526] In some embodiments, pharmaceutical compositions featured in the invention include (a) one or more iRNA compounds and (b) one or more agents which function by a non-RNAi mechanism and which are useful in treating, e.g., PH1.

[0527] Toxicity and therapeutic efficacy of such compounds can be determined by standard pharmaceutical procedures in cell cultures or experimental animals, e.g., for determining the LD50 (the dose lethal to 50% of the population) and the ED50 (the dose therapeutically effective in 50% of the population). The dose ratio between toxic and therapeutic effects is the therapeutic index and it can be expressed as the ratio LD50/ED50. Compounds that exhibit high therapeutic indices are preferred.

[0528] The data obtained from cell culture assays and animal studies can be used in formulating a range of dosage for use in humans. The dosage of compositions featured herein in the invention lies generally within a range of circulating concentrations that include the ED50 with little or no toxicity.

[0529] The dosage can vary within this range depending upon the dosage form employed and the route of administration utilized. For any compound used in the methods featured in the invention, the therapeutically effective dose can be estimated initially from cell culture assays. A dose can be formulated in animal models to achieve a circulating plasma concentration range of the compound or, when appropriate, of the polypeptide product of a target sequence (e.g., achieving a decreased concentration of the polypeptide) that includes the IC₅₀ (i.e., the concentration of the test compound which achieves a half-maximal inhibition of symptoms) as determined in cell culture. Such information can be used to more accurately determine useful doses in humans. Levels in plasma can be measured, for example, by high performance liquid chromatography.

[0530] In addition to their administration, as discussed above, the iRNAs featured in the invention can be administered in combination with other known agents effective in treatment of pathological processes that are mediated by iron overload and that can be treated by inhibiting HAO1 expression. In any event, the administering physician can adjust the amount and timing of iRNA administration on the basis of results observed using standard measures of efficacy known in the art or described herein.

### VII. Kits

[0531] The present invention also provides kits for performing any of the methods of the invention. Such kits include one or more dsRNA agent(s) and instructions for use, e.g., instructions for administering a prophylactically or therapeutically effective amount of a double stranded RNAi agent(s). The double stranded RNAi agent may be in a vial or a pre-filled syringe. The kits may optionally further comprise means for administering the double stranded RNAi agent (e.g., an injection device, such as a pre-filled syringe), or means for measuring the inhibition of HAO1 (e.g., means for measuring the inhibition of HAO1 mRNA, HAO1 protein, and/or HAO1 activity). Such means for measuring the inhibition of HAO1 may comprise a means for obtaining a sample from a subject, such as, e.g., a plasma sample. The kits of the invention may optionally further comprise means for determining the therapeutically effective or prophylactically effective amount.

[0532] Unless otherwise defined, all technical and scientific terms used herein have the same meaning as commonly understood by one of ordinary skill in the art to which this invention belongs. Although methods and materials similar or equivalent to those described herein can be used in the practice or testing of the iRNAs and methods featured in the invention, suitable methods and materials are described below. All publications, patent applications, patents, and other references mentioned herein are incorporated by reference in their entirety. In case of conflict, the present specification, including definitions, will control. In addition, the materials, methods, and examples are illustrative only and not intended to be limiting.

[0533] This invention is further illustrated by the following examples which should not be construed as limiting. The entire contents of all references, patents and published patent applications cited throughout this application, as well as the informal Sequence Listing and Figures, are hereby incorporated herein by reference.

### EXAMPLES

### Materials and Methods

[0534] The following materials and methods were used in the Examples. As used herein, “HAO” and “GO” are used interchangeably.

[0535] siRNA synthesis

[0536] Single-stranded RNAs were produced by solid phase synthesis on a scale of 1 μmole using an Expedite 8909 synthesizer (Applied Biosystems, Applera Deutschland GmbH, Darm-stadt, Germany) and controlled pore glass (CPG, 500 Å, Proligo Biochemie GmbH, Hamburg, Germany) as solid support. RNA and RNA containing 2′-O-methyl nucleotides were generated by solid phase synthesis employing the corresponding phosphoramidites and 2′-O-methyl phos-phoramidites, respectively (Proligo Biochemie GmbH, Hamburg, Germany). These building blocks were incorporated at selected sites within the sequence of the oligoribonucleotide chain using standard nucleoside phosphoramidite chemistry such as described in Current protocols in nucleic acid chemistry, Beaucage, S. L. et al. (Edrs.), John Wiley & Sons, Inc., New York, NY, USA. Phosphorothioate linkages were introduced by replacement of the iodine oxidizer solution with a solution of the Beaucage reagent (Chruachem Ltd, Glasgow, UK) in acetonitrile (1%). Further ancillary reagents were obtained from Mallinckrodt Baker (Griesheim, Germany).

[0537] Deprotection and purification of the crude oligoribonucleotides by anion exchange HPLC were carried out according to established procedures. Yields and concentrations were determined by UV absorption of a solution of the respective RNA at a wavelength of 260 nm using a spectral photometer (DU 640B, Beckman Coulter GmbH, Unterschleiβheim, Germany).

[0538] Double stranded RNA was generated by mixing an equimolar solution of complementary strands in annealing buffer (20 mM sodium phosphate, pH 6.8; 100 mM sodium chloride), heated in a water bath at 85-90° C. for 3 minutes and cooled to room temperature over a period of 3-4 hours. The annealed RNA solution was stored at −20° C. until use.

[0539] In some instances, a duplex (dsRNA) was synthesized more than once. Different batches are labeled with different extensions. For example, AD-62933.1 and AD-62933.2 are different batches of the same duplex.

[0540] Cell Culture and Transfections

[0541] Primary Cynomolgus monkey hepatocytes (PCH) and primary mouse hepatocytes (PMH) were used. PCHs (Celsis #M003055, lot CBT) or PMH (freshly isolated) were transfected by adding 14.8 μl of Opti-MEM plus 0.2 μl of Lipofectamine RNAiMax per well (Invitrogen, Carlsbad CA. cat #13778-150) to 5 μl of siRNA duplexes per well into a 96-well plate and incubated at room temperature for 15 minutes. 80 μl of InVitroGRO CP Rat media (InVitro Technologies) containing ˜2×10⁴ PCH or PMH cells were then added to the siRNA mixture. Cells were incubated for 24 hours prior to RNA purification. Single dose experiments were performed at 10 or 20 nM and 0.1 or 0.2 nM final duplex concentration and dose response experiments were done over a range of doses from 10 nM to 36 fM final duplex concentration over 8, 6-fold dilutions.

[0542] Total RNA Isolation

[0543] Total RNA was isolated using DYNABEADS mRNA Isolation Kit (Invitrogen, part #: 610-12). Cells were harvested and lysed in 150 μl of Lysis/Binding Buffer then mixed for 5 minute at 850 rpm using an Eppendorf Thermomixer (the mixing speed was the same throughout the process). Ten microliters of magnetic beads and 80 μl Lysis/Binding Buffer mixture were added to a round bottom plate and mixed for 1 minute. Magnetic beads were captured using magnetic stand and the supernatant was removed without disturbing the beads. After removing supernatant, the lysed cells were added to the remaining beads and mixed for 5 minutes. After removing supernatant, magnetic beads were washed 2 times with 150 μl Wash Buffer A and mixed for 1 minute. Beads were capture again and supernatant removed. Beads were then washed with 150 μl Wash Buffer B, captured and supernatant was removed. Beads were next washed with 150 μl Elution Buffer, captured and supernatant removed. Beads were allowed to dry for 2 minutes. After drying, 50 μl of Elution Buffer was added and mixed for 5 minutes at 70° C. Beads were captured on magnet for 5 minutes. 40 μl of supernatant was removed and added to another 96 well plate.

[0544] cDNA Synthesis

[0545] Synthesis of cDNA was performed using the ABI High capacity cDNA reverse transcription kit (Applied Biosystems, Foster City, CA, Cat #4368813).

[0546] A master mix of 2 μl 10× Buffer, 0.8 μl 25× dNTPs, 2 μl Random primers, 1 μl Reverse Transcriptase, 1 μl RNase inhibitor and 3.2 μl of H2O per reaction were added into 10 μl total RNA. cDNA was generated using a Bio-Rad C-1000 or S-1000 thermal cycler (Hercules, CA) through the following steps: 25° C. 10 min, 37° C. 120 min, 85° C. 5 sec, 4° C. hold.

[0547] Real Time PCR

[0548] 2 μl of cDNA were added to a master mix containing 0.5 μl of mouse GAPDH (cat #4352339E Life Technologies) or custom designed Cynomolgus monkey GAPDH TaqMan Probes: (F-GCATCCTGGGCTACACTGA, (SEQ ID NO: 13) R-TGGGTGTCGCTGTTGAAGTC (SEQ ID NO: 14), Probe-CCAGGTGGTCTCCTCC (SEQ ID NO: 15)), 0.5 μl human or mouse HAO1 (HS00213909_M1—which is cross reactive with Cynomolgus monkey HOA1, Mm 00439249_ml for mouse assays, life technologies) and 5 μl Lightcycler 480 probe master mix (Roche Cat #04887301001) per well in a 384 well 50 plates (Roche cat #04887301001). Real time PCR was done in a LightCycler480 Real Time PCR system (Roche) using the ΔΔCt(RQ) assay. Each duplex was tested in two independent transfections and each transfection was assayed in duplicate, unless otherwise noted in the summary tables.

[0549] To calculate relative fold change, real time data were analyzed using the ΔΔCt method and normalized to assays performed with cells transfected with 10 nM AD-1955, or mock transfected cells. IC50s were calculated using a 4 parameter fit model using XLFit and normalized to cells transfected with AD-1955 or naïve cells.

[0550] The sense and antisense sequences of AD-1955 are: SENSE: 5′-cuuAcGcuGAGuAcuucGAdTsdT-3′ (SEQ ID NO: 16); and ANTISENSE: 5′-UCGAAGuACUcAGCGuAAGdTsdT-3′ (SEQ ID NO: 17).

TABLE B
Abbreviations of nucleotide monomers used in nucleic acid sequence
representation.

| Abbrevi- | |
|---|---|
| ation | Nucleotide(s) |
| A | Adenosine-3′-phosphate |
| Ab | beta-L-adenosine-3′-phosphate |
| Af | 2′-fluoroadenosine-3′-phosphate |
| Afs | 2′-fluoroadenosine-3′-phosphorothioate |
| As | adenosine-3′-phosphorothioate |
| C | cytidine-3′-phosphate |
| Cb | beta-L-cytidine-3′-phosphate |
| Cf | 2′-fluorocytidine-3′-phosphate |
| Cfs | 2′-fluorocytidine-3′-phosphorothioate |
| Cs | cytidine-3′-phosphorothioate |
| G | guanosine-3′-phosphate |
| Gb | beta-L-guanosine-3′-phosphate |
| Gbs | beta-L-guanosine-3′-phosphorothioate |
| Gf | 2′-fluoroguanosine-3′-phosphate |
| Gfs | 2′-fluoroguanosine-3′-phosphorothioate |
| Gs | guanosine-3′-phosphorothioate |
| T | 5′-methyluridine-3′-phosphate |
| Tf | 2′-fluoro-5-methyluridine-3′-phosphate |
| Tfs | 2′-fluoro-5-methyluridine-3′-phosphorothioate |
| Ts | 5-methyluridine-3′-phosphorothioate |
| U | Uridine-3′-phosphate |
| Uf | 2′-fluorouridine-3′-phosphate |
| Ufs | 2′-fluorouridine-3′-phosphorothioate |
| Us | uridine-3′-phosphorothioate |
| N | any nucleotide (G, A, C, T or U) |
| a | 2′-O-methyladenosine-3′-phosphate |
| as | 2′-O-methyladenosine-3′-phosphorothioate |
| c | 2′-O-methylcytidine-3′-phosphate |
| cs | 2′-O-methylcytidine-3′-phosphorothioate |
| g | 2′-O-methylguanosine-3′-phosphate |
| gs | 2′-O-methylguanosine-3′-phosphorothioate |
| t | 2′-O-methyl-5-methyluridine-3′-phosphate |
| ts | 2′-O-methyl-5-methyluridine-3′-phosphorothioate |
| u | 2′-O-methyluridine-3′-phosphate |
| us | 2′-O-methyluridine-3′-phosphorothioate |
| dT | 2′-deoxythymidine |
| dTs | 2′-deoxythymidine-3′-phosphorothioate |
| dU | 2′-deoxyuridine |
| s | phosphorothioate linkage |
| L96 | N-[tris(GalNAc-alkyl)-amidodecanoyl)]-4-hydroxyprolinol |
| | Hyp-(GalNAc-alkyl)3 |
| (Aeo) | 2′-O-methoxyethyladenosine-3′-phosphate |
| (Aeos) | 2′-O-methoxyethyladenosine-3′-phosphorothioate |
| (Geo) | 2′-O-methoxyethylguanosine-3′-phosphate |
| (Geos) | 2′-O-methoxyethylguanosine-3′-phosphorothioate |
| (Teo) | 2′-O-methoxyethyl-5-methyluridine-3′-phosphate |
| (Teos) | 2′-O-methoxyethyl-5-methyluridine-3′-phosphorothioate |
| (m5Ceo) | 2′-O-methoxyethyl-5-methylcytidine-3′-phosphate |
| (m5Ceos) | 2′-O-methoxyethyl-5-methylcytidine-3′-phosphorothioate |
| (A3m) | 3′-O-methyladenosine-2′-phosphate |
| (A3mx) | 3′-O-methyl-xylofuranosyladenosine-2′-phosphate |
| (G3m) | 3′-O-methylguanosine-2′-phosphate |
| (G3mx) | 3′-O-methyl-xylofuranosylguanosine-2′-phosphate |
| (C3m) | 3′-O-methylcytidine-2′-phosphate |
| (C3mx) | 3′-O-methyl-xylofuranosylcytidine-2′-phosphate |
| (U3m) | 3′-O-methyluridine-2′-phosphate |
| (U3mx) | 3′-O-methylxylouridine-2′-phosphate |
| (Chd) | 2′-O-hexadecyl-cytidine-3′-phosphate |
| (pshe) | Hydroxyethylphosphorothioate |
| (Uhd) | 2′-O-hexadecyl-uridine-3′-phosphate |
| (Tgn) | Thymidine-glycol nucleic acid (GNA) S-Isomer |
| (Cgn) | Cytidine-glycol nucleic acid (GNA) |
| (Chd) | 2′-O-hexadecyl-cytidine-3′-phosphate |
| (Ggn) | 2′-O-hexadecyl-cytidine-3′-phosphate |
| (Agn) | Adenosine-glycol nucleic acid (GNA) |
| P | 5′-phosphate |
| (m5Cam) | 2′-O-(N-methylacetamide)-5-methylcytidine-3′-phosphate |
| (m5Cams) | 2′-O-(N-methylacetamide)-5-methylcytidine-3′- |
| | phosphorothioate |
| (Tam) | 2′-O-(N-methylacetamide)thymidine-3′-phosphate |
| (Tams) | 2′-O-(N-methylacetamide)thymidine-3′-phosphorothioate |
| (Aam) | 2′-O-(N-methylacetamide)adenosine-3′-phosphate |
| (Aams) | 2′-O-(N-methylacetamide)adenosine-3′-phosphorothioate |
| (Gam) | 2′-O-(N-methylacetamide)guanosine-3′-phosphate |
| (Gams) | 2′-O-(N-methylacetamide)guanosine-3′-phosphorothioate |
| Y34 | abasic 2′-O-Methyl |
| Y44 | 2′-hydroxymethyl-tetrahydrofurane-5′-phosphate |

### Example 1. Design, Specificity and Efficacy Prediction of siRNA

[0551] siRNA design was carried out to identify siRNAs targeting human, cynomolgus monkey, mouse, and rat HAO1 transcripts annotated in the NCBI Gene database (http://www.ncbi.nlm.nih.gov/gene/).

[0552] Design used the following transcripts from the NCBI RefSeq collection: human (Homo sapiens) HAO1 mRNA is NM_017545.2; cynomolgus monkey (Macaca fascicularis) HAO1 mRNA is XM_005568381.1; Mouse (Mus musculus) HAO1 mRNA is NM_010403.2; Rat (Rattus norvegicus) HAO1 mRNA is XM_006235096.1.

[0553] Due to high primate/rodent sequence divergence, siRNA duplexes were designed in several separate batches, including but not limited to batches containing duplexes matching human and cyno transcripts only; human, cyno, mouse, and rat transcripts only; and mouse and rat transcripts only. All siRNA duplexes were designed that shared 100% identity with the listed human transcript and other species transcripts considered in each design batch (above).

[0554] The specificity of all possible 19mers was predicted from each sequence. Candidate 19mers that lacked repeats longer than 7 nucleotides were then selected. These 1069 candidate human/cyno, 184 human/cyno/mouse/rat, and 579 mouse/rat siRNAs were used in comprehensive searches against the appropriate transcriptomes (defined as the set of NM_ and XM_records within the human, cyno, mouse, or rat NCBI Refseq sets) using an exhaustive “brute-force” algorithm implemented in the python script ‘BruteForce.py’. The script next parsed the transcript-oligo alignments to generate a score based on the position and number of mismatches between the siRNA and any potential ‘off-target’ transcript. The off-target score is weighted to emphasize differences in the ‘seed’ region of siRNAs, in positions 2-9 from the 5′ end of the molecule. Each oligo-transcript pair from the brute-force search was given a mismatch score by summing the individual mismatch scores; mismatches in the position 2-9 were counted as 2.8, mismatches in the cleavage site positions 10-11 were counted as 1.2, and mismatches in region 12-19 counted as 1.0. An additional off-target prediction was carried out by comparing the frequency of heptamers and octomers derived from 3 distinct, seed-derived hexamers of each oligo. The hexamers from positions 2-7 relative to the 5′ start were used to create 2 heptamers and one octomer. Heptamer1 was created by adding a 3′ A to the hexamer; heptamer2 was created by adding a 5′ A to the hexamer; the octomer was created by adding an A to both 5′ and 3′ ends of the hexamer. The frequency of octomers and heptamers in the human, cyno, mouse, or rat 3′UTRome (defined as the subsequence of the transcriptome from NCBI's Refseq database where the end of the coding region, the ‘CDS’, is clearly defined) was pre-calculated. The octomer frequency was normalized to the heptamer frequency using the median value from the range of octomer frequencies. A ‘mirSeedScore’ was then calculated by calculating the sum of ((3× normalized octomer count)+(2× heptamer2 count)+(1× heptamer1 count)).

[0555] Both siRNA strands were assigned to a category of specificity according to the calculated scores: a score above 3 qualified as highly specific, equal to 3 as specific and between 2.2 and 2.8 qualified as moderately specific. The siRNAs were sorted by the specificity of the antisense strand. Duplexes from the human/cyno and mouse/rat sets whose antisense oligos lacked GC at the first position, lacked G at both positions 13 and 14, and had 3 or more Us or As in the seed region (characteristics of duplexes with high predicted efficacy) were then selected. Similarly, duplexes from the human/cyno/mouse and human/cyno/mouse/rat sets that had had 3 or more Us or As in the seed region were selected.

[0556] Candidate GalNAc-conjugated duplexes, 21 and 23 nucleotides long on the sense and antisense strands respectively, were designed by extending antisense 19mers 4 additional nucleotides in the 3′ direction (preserving perfect complementarity with the target transcript). The sense strand was specified as the reverse complement of the first 21 nucleotides of the antisense 23mer. Duplexes were selected that maintained perfect matches to all selected species transcripts across all 23 nucleotides.

[0557] Antisense strands that contained C or G at the first 5′ position were modified to have a U at the first 5′ position, unless doing so would introduce a run of 4 or more contiguous Us (5′→3′), in which case they were modified to have an A at the first 5′ position. Sense strands to be paired into duplexes with these “UA swapped” antisense strands were correspondingly modified to preserve complementarity. Examples described below include AD-62989 and AD-62993.

[0558] A total of 31 sense and 31 antisense derived human/cyno, 19 sense and 19 antisense derived human/cyno/mouse/rat, and 48 sense and 48 antisense derived mouse/rat 21/23mer oligos were synthesized and formed into GalNAc-conjugated duplexes.

[0559] The sequences of the sense and antisense strands of the modified duplexes are shown in Tables 1a and 1b, and the sequences of the sense and antisense strands of the unmodified duplexes are shown in Tables 2a, 2b, and 2c.

TABLE 1a
HAO1 modified sequences

| | | SEQ | Antisense | SEQ | |
|---|---|---|---|---|---|
| Duplex | Sense strand | ID | strand | ID | |
| Name | sequence | NO: | sequence | NO: | Species |
| AD- | GfsasAfuGfuGfaA | 18 | usUfsgUfcGfaUfg | 89 | Hs/Mm |
| 62933 | fAfGfuCfaUfcGfa | | AfcuuUfcAfcAfuU | | |
| | CfaAfL96 | | fcsusg | | |
| AD- | UfsusUfuCfaAfuG | 19 | usCfscUfaGfgAfc | 90 | Hs/Mm |
| 62939 | fGfGfuGfuCfcUfa | | AfcccAfuUfgAfaA | | |
| | GfgAfL96 | | fasgsu | | |
| AD- | GfsasAfaGfuCfaU | 20 | asAfsuGfuCfuUfg | 91 | Hs/Mm |
| 62944 | fCfGfaCfaAfgAfc | | UfcgaUfgAfcUfuU | | |
| | AfuUfL96 | | fcsasc | | |
| AD- | UfscsAfuCfgAfcA | 21 | usCfsaCfcAfaUfg | 92 | Hs/Mm |
| 62949 | fAfGfaCfaUfuGfg | | UfcuuGfuCfgAfuG | | |
| | UfgAfL96 | | fascsu | | |
| AD- | UfsusUfcAfaUfgG | 22 | usUfscCfuAfgGfa | 93 | Hs/Mm |
| 62954 | fGfUfgUfcCfuAfg | | CfaccCfaUfuGfaA | | |
| | GfaAfL96 | | fasasg | | |
| AD- | AfsasUfgGfgUfgU | 23 | asAfsgGfuUfcCfu | 94 | Hs/Mm |
| 62959 | fCfCfuAfgGfaAfc | | AfggaCfaCfcCfaU | | |
| | CfuUfL96 | | fusgsa | | |
| AD- | GfsasCfaGfuGfcA | 24 | usGfsgAfaAfaUfa | 95 | Hs/Mm |
| 62964 | fCfAfaUfaUfuUfu | | UfuguGfcAfcUfgU | | |
| | CfcAfL96 | | fcsasg | | |
| AD- | AfscsUfuUfuCfaA | 25 | usUfsaGfgAfcAfc | 96 | Hs/Mm |
| 62969 | fUfGfgGfuGfuCfc | | CfcauUfgAfaAfaG | | |
| | UfaAfL96 | | fuscsa | | |
| AD- | AfsasGfuCfaUfcG | 26 | usCfsaAfuGfuCfu | 97 | Hs/Mm |
| 62934 | fAfCfaAfgAfcAfu | | UfgucGfaUfgAfcU | | |
| | UfgAfL96 | | fususc | | |
| AD- | AfsusCfgAfcAfaG | 27 | usCfsuCfaCfcAfa | 98 | Hs/Mm |
| 62940 | fAfCfaUfuGfgUfg | | UfgucUfuGfuCfgA | | |
| | AfgAfL96 | | fusgsa | | |
| AD- | GfsgsGfaGfaAfaG | 28 | usAfsuCfuUfgAfa | 99 | Hs/Mm |
| 62945 | fGfUfgUfuCfaAfg | | CfaccUfuUfcUfcC | | |
| | AfuAfL96 | | fcscsc | | |
| AD- | CfsusUfuUfcAfaU | 29 | usCfsuAfgGfaCfa | 100 | Hs/Mm |
| 62950 | fGfGfgUfgUfcCfu | | CfccaUfuGfaAfaA | | |
| | AfgAfL96 | | fgsusc | | |
| AD- | UfscsAfaUfgGfgU | 30 | usGfsuUfcCfuAfg | 101 | Hs/Mm |
| 62955 | fGfUfcCfuAfgGfa | | GfacaCfcCfaUfuG | | |
| | AfcAfL96 | | fasasa | | |
| AD- | UfsusGfaCfuUfuU | 31 | usGfsaCfaCfcCfa | 102 | Hs/Mm |
| 62960 | fCfAfaUfgGfgUfg | | UfugaAfaAfgUfcA | | |
| | UfcAfL96 | | fasasa | | |
| AD- | AfsasAfgUfcAfuC | 32 | usAfsaUfgUfcUfu | 103 | Hs/Mm |
| 62965 | fGfAfcAfaGfaCfa | | GfucgAfuGfaCfuU | | |
| | UfuAfL96 | | fuscsa | | |
| AD- | CfsasGfgGfgGfaG | 33 | usUfsgAfaCfaCfc | 104 | Hs/Mm |
| 62970 | fAfAfaGfgUfgUfu | | UfuucUfcCfcCfcU | | |
| | CfaAfL96 | | fgsgsa | | |
| AD- | CfsasUfuGfgUfgA | 34 | asAfsgGfaUfuUfu | 105 | Hs/Mm |
| 62935 | fGfGfaAfaAfaUfc | | UfccuCfaCfcAfaU | | |
| | CfuUfL96 | | fgsusc | | |
| AD- | AfscsAfuUfgGfuG | 35 | asGfsgAfuUfuUfu | 106 | Hs/Mm |
| 62941 | fAfGfgAfaAfaAfu | | CfcucAfcCfaAfuG | | |
| | CfcUfL96 | | fuscsu | | |
| AD- | AfsgsGfgGfgAfgA | 36 | usUfsuGfaAfcAfc | 107 | Hs/Mm |
| 62946 | fAfAfgGfuGfuUfc | | CfuuuCfuCfcCfcC | | |
| | AfaAfL96 | | fusgsg | | |
| AD- | AfsusGfgUfgGfuA | 37 | asAfsaAfuCfaCfa | 108 | Hs |
| 62951 | fAfUfuUfgUfgAfu | | AfauuAfcCfaCfcA | | |
| | UfuUfL96 | | fuscsc | | |
| AD- | GfsasCfuUfgCfaU | 38 | usAfsuAfuUfuCfc | 109 | Hs |
| 62956 | fCfCfuGfgAfaAfu | | AfggaUfgCfaAfgU | | |
| | AfuAfL96 | | fcscsa | | |
| AD- | GfsgsAfaGfgGfaA | 39 | asAfsgAfcUfuCfu | 110 | Hs |
| 62961 | fGfGfuAfgAfaGfu | | AfccuUfcCfcUfuC | | |
| | CfuUfL96 | | fcsasc | | |
| AD- | UfsgsUfcUfuCfuG | 40 | asGfsgAfaAfuCfu | 111 | Hs |
| 62966 | fUfUfuAfgAfuUfu | | AfaacAfgAfaGfaC | | |
| | CfcUfL96 | | fasgsg | | |
| AD- | CfsusUfuGfgCfuG | 41 | asGfsaUfcUfuGfg | 112 | Hs |
| 62971 | fUfUfuCfcAfaGfa | | AfaacAfgCfcAfaA | | |
| | UfcUfL96 | | fgsgsa | | |
| AD- | AfsasUfgUfgUfuU | 42 | asUfsgAfcGfuUfg | 113 | Hs |
| 62936 | fGfGfgCfaAfcGfu | | CfccaAfaCfaCfaU | | |
| | CfaUfL96 | | fususu | | |
| AD- | UfsgsUfgAfcUfgU | 43 | usAfsaGfgGfgUfg | 114 | Hs |
| 62942 | fGfGfaCfaCfcCfc | | UfccaCfaGfuCfaC | | |
| | UfuAfL96 | | fasasa | | |
| AD- | GfsasUfgGfgGfuG | 44 | asAfsuAfgUfaGfc | 115 | Hs |
| 62947 | fCfCfaGfcUfaCfu | | UfggcAfcCfcCfaU | | |
| | AfuUfL96 | | fcscsa | | |
| AD- | GfsasAfaAfuGfuG | 45 | asCfsgUfuGfcCfc | 116 | Hs |
| 62952 | fUfUfuGfgGfcAfa | | AfaacAfcAfuUfuU | | |
| | CfgUfL96 | | fcsasa | | |
| AD- | GfsgsCfuGfuUfuC | 46 | usGfsuCfaGfaUfc | 117 | Hs |
| 62957 | fCfAfaGfaUfcUfg | | UfuggAfaAfcAfgC | | |
| | AfcAfL96 | | fcsasa | | |
| AD- | UfscsCfaAfcAfaA | 47 | asGfsgGfgUfgGfc | 118 | Hs |
| 62962 | fAfUfaGfcCfaCfc | | UfauuUfuGfuUfgG | | |
| | CfcUfL96 | | fasasa | | |
| AD- | GfsusCfuUfcUfgU | 48 | asAfsgGfaAfaUfc | 119 | Hs |
| 62967 | fUfUfaGfaUfuUfc | | UfaaaCfaGfaAfgA | | |
| | CfuUfL96 | | fcsasg | | |
| AD- | UfsgsGfaAfgGfgA | 49 | asGfsaCfuUfcUfa | 120 | Hs |
| 62972 | fAfGfgUfaGfaAfg | | CfcuuCfcCfuUfcC | | |
| | UfcUfL96 | | fascsa | | |
| AD- | UfscsCfuUfuGfgC | 50 | asUfscUfuGfgAfa | 121 | Hs |
| 62937 | fUfGfuUfuCfcAfa | | AfcagCfcAfaAfgG | | |
| | GfaUfL96 | | fasusu | | |
| AD- | CfsasUfcUfcUfcA | 51 | usAfsuCfaUfcCfc | 122 | Hs |
| 62943 | fGfCfuGfgGfaUfg | | AfgcuGfaGfaGfaU | | |
| | AfuAfL96 | | fgsgsg | | |
| AD- | GfsgsGfgUfgCfcA | 52 | asUfscAfaUfaGfu | 123 | Hs |
| 62948 | fGfCfuAfcUfaUfu | | AfgcuGfgCfaCfcC | | |
| | GfaUfL96 | | fcsasu | | |
| AD- | AfsusGfuGfuUfuG | 53 | usAfsuGfaCfgUfu | 124 | Hs |
| 62953 | fGfGfcAfaCfgUfc | | GfcccAfaAfcAfcA | | |
| | AfuAfL96 | | fususu | | |
| AD- | CfsusGfuUfuAfgA | 54 | usUfscUfuAfaGfg | 125 | Hs |
| 62958 | fUfUfuCfcUfuAfa | | AfaauCfuAfaAfcA | | |
| | GfaAfL96 | | fgsasa | | |
| AD- | AfsgsAfaAfgAfaA | 55 | usAfsuGfcAfaGfu | 126 | Hs |
| 62963 | fUfGfgAfcUfuGfc | | CfcauUfuCfuUfuC | | |
| | AfuAfL96 | | fusasg | | |
| AD- | GfscsAfuCfcUfgG | 56 | usUfsuAfaUfaUfa | 127 | Hs |
| 62968 | fAfAfaUfaUfaUfu | | UfuucCfaGfgAfuG | | |
| | AfaAfL96 | | fcsasa | | |
| AD- | CfscsUfgUfcAfgA | 57 | usAfsgUfuCfcCfa | 128 | Hs |
| 62973 | fCfCfaUfgGfgAfa | | UfgguCfuGfaCfaG | | |
| | CfuAfL96 | | fgscsu | | |
| AD- | AfsasAfcAfuGfgU | 58 | usAfsuCfcCfaUfc | 129 | Hs |
| 62938 | fGfUfgGfaUfgGfg | | CfacaCfcAfuGfuU | | |
| | AfuAfL96 | | fusasa | | |
| AD- | CfsusCfaGfgAfuG | 59 | usUfscAfaAfaUfu | 130 | Hs |
| 62974 | fAfAfaAfaUfuUfu | | UfuucAfuCfcUfgA | | |
| | GfaAfL96 | | fgsusu | | |
| AD- | CfsasGfcAfuGfuA | 60 | usUfsuGfuCfaAfg | 131 | Hs |
| 62978 | fUfUfaCfuUfgAfc | | UfaauAfcAfuGfcU | | |
| | AfaAfL96 | | fgsasa | | |
| AD- | UfsasUfgAfaCfaA | 61 | usGfsaUfuUfaGfc | 132 | Hs |
| 62982 | fCfAfuGfcUfaAfa | | AfuguUfgUfuCfaU | | |
| | UfcAfL96 | | fasasu | | |
| AD- | AfsusAfuAfuCfcA | 62 | usCfscUfaAfaAfc | 133 | Hs |
| 62986 | fAfAfuGfuUfuUfa | | AfuuuGfgAfuAfuA | | |
| | GfgAfL96 | | fususc | | |
| AD- | CfscsAfgAfuGfgA | 63 | usUfsgGfaUfaCfa | 134 | Hs |
| 62990 | fAfGfcUfgUfaUfc | | GfcuuCfcAfuCfuG | | |
| | CfaAfL96 | | fgsasa | | |
| AD- | GfsasCfuUfuCfaU | 64 | usAfsuAfuUfuCfc | 135 | Hs |
| 62994 | fCfCfuGfgAfaAfu | | AfggaUfgAfaAfgU | | |
| | AfuAfL96 | | fcscsa | | |
| AD- | CfscsCfcGfgCfuA | 65 | asUfsuGfaUfaCfa | 136 | Hs |
| 62998 | fAfUfuUfgUfaUfc | | AfauuAfgCfcGfgG | | |
| | AfaUfL96 | | fgsgsa | | |
| AD- | UfsusAfaAfcAfuG | 66 | usCfscCfaUfuCfa | 137 | Hs |
| 63002 | fGfCfuUfgAfaUfg | | AfgccAfuGfuUfuA | | |
| | GfgAfL96 | | fascsa | | |
| AD- | AfsasUfgUfgUfuU | 67 | asUfsgAfcGfuUfg | 138 | Mm |
| 62975 | fAfGfaCfaAfcGfu | | UfcuaAfaCfaCfaU | | |
| | CfaUfL96 | | fususu | | |
| AD- | AfscsUfaAfaGfgA | 68 | asAfscCfgGfaAfu | 139 | Mm |
| 62979 | fAfGfaAfuUfcCfg | | UfcuuCfcUfuUfaG | | |
| | GfuUfL96 | | fusasu | | |
| AD- | UfsasUfaUfcCfaA | 69 | asUfscCfuAfaAfa | 140 | Mm |
| 62983 | fAfUfgUfuUfuAfg | | CfauuUfgGfaUfaU | | |
| | GfaUfL96 | | fasusu | | |
| AD- | GfsusGfcGfgAfaA | 70 | asAfscAfuCfaGfu | 141 | Mm |
| 62987 | fGfGfcAfcUfgAfu | | GfccuUfuCfcGfcA | | |
| | GfuUfL96 | | fcsasc | | |
| AD- | UfsasAfaAfcAfgU | 71 | asAfsuUfuAfaGfa | 142 | Mm |
| 62991 | fGfGfuUfcUfuAfa | | AfccaCfuGfuUfuU | | |
| | AfuUfL96 | | fasasa | | |
| AD- | AfsusGfaAfaAfaU | 72 | asCfsuGfgUfuUfc | 143 | Mm |
| 62995 | fUfUfuGfaAfaCfc | | AfaaaUfuUfuUfcA | | |
| | AfgUfL96 | | fuscsc | | |
| AD- | AfsasCfaAfaAfuA | 73 | asAfsaAfgGfgAfu | 144 | Mm |
| 62999 | fGfCfaAfuCfcCfu | | UfgcuAfuUfuUfgU | | |
| | UfuUfL96 | | fusgsg | | |
| AD- | CfsusGfaAfaCfaG | 74 | asAfsgUfcGfaCfa | 145 | Mm |
| 63003 | fAfUfcUfgUfcGfa | | GfaucUfgUfuUfcA | | |
| | CfuUfL96 | | fgscsa | | |
| AD- | UfsusGfuUfgCfaA | 75 | usCfsaAfaAfuGfc | 146 | Mm |
| 62976 | fAfGfgGfcAfuUfu | | CfcuuUfgCfaAfcA | | |
| | UfgAfL96 | | fasusu | | |
| AD- | CfsusCfaUfuGfuU | 76 | usAfscAfgGfuUfa | 147 | Mm |
| 62980 | fUfAfuUfaAfcCfu | | AfuaaAfcAfaUfgA | | |
| | GfuAfL96 | | fgsasu | | |
| AD- | CfsasAfcAfaAfaU | 77 | asAfsaGfgGfaUfu | 148 | Mm |
| 62984 | fAfGfcAfaUfcCfc | | GfcuaUfuUfuGfuU | | |
| | UfuUfL96 | | fgsgsa | | |
| AD- | CfsasUfuGfuUfuA | 78 | asAfsuAfcAfgGfu | 149 | Mm |
| 62992 | fUfUfaAfcCfuGfu | | UfaauAfaAfcAfaU | | |
| | AfuUfL96 | | fgsasg | | |
| AD- | UfsasUfcAfgCfuG | 79 | usUfsgAfuAfuCfu | 150 | Mm |
| 62996 | fGfGfaAfgAfuAfu | | UfcccAfgCfuGfaU | | |
| | CfaAfL96 | | fasgsa | | |
| AD- | UfsgsUfcCfuAfgG | 80 | usUfscUfaAfaAfg | 151 | Mm |
| 63000 | fAfAfcCfuUfuUfa | | GfuucCfuAfgGfaC | | |
| | GfaAfL96 | | fascsc | | |
| AD- | UfscsCfaAfcAfaA | 81 | asGfsgGfaUfuGfc | 152 | Mm |
| 63004 | fAfUfaGfcAfaUfc | | UfauuUfuGfuUfgG | | |
| | CfcUfL96 | | fasasa | | |
| AD- | GfsgsUfgUfgCfgG | 82 | asUfscAfgUfgCfc | 153 | Mm |
| 62977 | fAfAfaGfgCfaCfu | | UfuucCfgCfaCfaC | | |
| | GfaUfL96 | | fcscsc | | |
| AD- | UfsusGfaAfaCfcA | 83 | asUfsgAfuAfaAfg | 154 | Mm |
| 62981 | fGfUfaCfuUfuAfu | | UfacuGfgUfuUfcA | | |
| | CfaUfL96 | | fasasa | | |
| AD- | UfsasCfuUfcCfaA | 84 | usAfsuAfuAfuAfg | 155 | Mm |
| 62985 | fAfGfuCfuAfuAfu | | AfcuuUfgGfaAfgU | | |
| | AfuAfL96 | | fascsu | | |
| AD- | UfscsCfuAfgGfaA | 85 | asUfsuUfcUfaAfa | 156 | Mm |
| 62989 | fCfCfuUfuUfaGfa | | AfgguUfcCfuAfgG | | |
| | AfaUfL96 | | fascsa | | |
| AD- | CfsusCfcUfgAfgG | 86 | usUfscCfaAfaAfu | 157 | Mm |
| 62993 | fAfAfaAfuUfuUfg | | UfuucCfuCfaGfgA | | |
| | GfaAfL96 | | fgsasa | | |
| AD- | GfscsUfcCfgGfaA | 87 | asUfsuUfcAfgCfa | 158 | Mm |
| 62997 | fUfGfuUfgCfuGfa | | AfcauUfcCfgGfaG | | |
| | AfaUfL96 | | fcsasu | | |
| AD- | GfsusGfuUfuGfuG | 88 | usAfsuUfgGfuCfu | 159 | Mm |
| 63001 | fGfGfgAfgAfcCfa | | CfcccAfcAfaAfcA | | |
| | AfuAfL96 | | fcsasg | | |

TABLE 1b
Additional HAO1 modified sequences.

| | | SEQ | | SEQ | |
|---|---|---|---|---|---|
| Duplex | | ID | | ID | |
| Name | Sense strand sequence | NO: | Antisense strand sequence | NO: | Species |
| AD- | GfsasAfuGfuGfaAfAf | 18 | usUfsgUfcGfaUfgAfc | 89 | Hs/Mm |
| 62933.2 | GfuCfaUfcGfaCfaAfL | | uuUfcAfcAfuUfcsusg | | |
| | 96 | | | | |
| AD- | UfsusUfuCfaAfuGfGf | 19 | usCfscUfaGfgAfcAfc | 90 | Hs/Mm |
| 62939.2 | GfuGfuCfcUfaGfgAfL | | ccAfuUfgAfaAfasgsu | | |
| | 96 | | | | |
| AD- | GfsasAfaGfuCfaUfCf | 20 | asAfsuGfuCfuUfgUfc | 91 | Hs/Mm |
| 62944.2 | GfaCfaAfgAfcAfuUfL | | gaUfgAfcUfuUfcsasc | | |
| | 96 | | | | |
| AD- | UfscsAfuCfgAfcAfAf | 21 | usCfsaCfcAfaUfgUfc | 92 | Hs/Mm |
| 62949.2 | GfaCfaUfuGfgUfgAfL | | uuGfuCfgAfuGfascsu | | |
| | 96 | | | | |
| AD- | UfsusUfcAfaUfgGfGf | 22 | usUfscCfuAfgGfaCfa | 93 | Hs/Mm |
| 62954.2 | UfgUfcCfuAfgGfaAfL | | ccCfaUfuGfaAfasasg | | |
| | 96 | | | | |
| AD- | AfsasUfgGfgUfgUfCf | 23 | asAfsgGfuUfcCfuAfg | 94 | Hs/Mm |
| 62959.2 | CfuAfgGfaAfcCfuUfL | | gaCfaCfcCfaUfusgsa | | |
| | 96 | | | | |
| AD- | GfsasCfaGfuGfcAfCf | 24 | usGfsgAfaAfaUfaUfu | 95 | Hs/Mm |
| 62964.2 | AfaUfaUfuUfuCfcAfL | | guGfcAfcUfgUfcsasg | | |
| | 96 | | | | |
| AD- | AfscsUfuUfuCfaAfUf | 25 | usUfsaGfgAfcAfcCfc | 96 | Hs/Mm |
| 62969.2 | GfgGfuGfuCfcUfaAfL | | auUfgAfaAfaGfuscsa | | |
| | 96 | | | | |
| AD- | AfsasGfuCfaUfcGfAf | 26 | usCfsaAfuGfuCfuUfg | 97 | Hs/Mm |
| 62934.2 | CfaAfgAfcAfuUfgAfL | | ucGfaUfgAfcUfususc | | |
| | 96 | | | | |
| AD- | AfsusCfgAfcAfaGfAf | 27 | usCfsuCfaCfcAfaUfg | 98 | Hs/Mm |
| 62940.2 | CfaUfuGfgUfgAfgAfL | | ucUfuGfuCfgAfusgsa | | |
| | 96 | | | | |
| AD- | GfsgsGfaGfaAfaGfGf | 28 | usAfsuCfuUfgAfaCfa | 99 | Hs/Mm |
| 62945.2 | UfgUfuCfaAfgAfuAfL | | ccUfuUfcUfcCfcscsc | | |
| | 96 | | | | |
| AD- | CfsusUfuUfcAfaUfGf | 29 | usCfsuAfgGfaCfaCfc | 100 | Hs/Mm |
| 62950.2 | GfgUfgUfcCfuAfgAfL | | caUfuGfaAfaAfgsusc | | |
| | 96 | | | | |
| AD- | UfscsAfaUfgGfgUfGf | 30 | usGfsuUfcCfuAfgGfa | 101 | Hs/Mm |
| 62955.2 | UfcCfuAfgGfaAfcAfL | | caCfcCfaUfuGfasasa | | |
| | 96 | | | | |
| AD- | UfsusGfaCfuUfuUfCf | 31 | usGfsaCfaCfcCfaUfu | 102 | Hs/Mm |
| 62960.2 | AfaUfgGfgUfgUfcAfL | | gaAfaAfgUfcAfasasa | | |
| | 96 | | | | |
| AD- | AfsasAfgUfcAfuCfGf | 32 | usAfsaUfgUfcUfuGfu | 103 | Hs/Mm |
| 62965.2 | AfcAfaGfaCfaUfuAfL | | cgAfuGfaCfuUfuscsa | | |
| | 96 | | | | |
| AD- | CfsasGfgGfgGfaGfAf | 33 | usUfsgAfaCfaCfcUfu | 104 | Hs/Mm |
| 62970.2 | AfaGfgUfgUfuCfaAfL | | ucUfcCfcCfcUfgsgsa | | |
| | 96 | | | | |
| AD- | CfsasUfuGfgUfgAfGf | 34 | asAfsgGfaUfuUfuUfc | 105 | Hs/Mm |
| 62935.2 | GfaAfaAfaUfcCfuUfL | | cuCfaCfcAfaUfgsusc | | |
| | 96 | | | | |
| AD- | AfscsAfuUfgGfuGfAf | 35 | asGfsgAfuUfuUfuCfc | 106 | Hs/Mm |
| 62941.2 | GfgAfaAfaAfuCfcUfL | | ucAfcCfaAfuGfuscsu | | |
| | 96 | | | | |
| AD- | AfsgsGfgGfgAfgAfAf | 36 | usUfsuGfaAfcAfcCfu | 107 | Hs/Mm |
| 62946.2 | AfgGfuGfuUfcAfaAfL | | uuCfuCfcCfcCfusgsg | | |
| | 96 | | | | |
| AD- | AfsusGfgUfgGfuAfAf | 37 | asAfsaAfuCfaCfaAfa | 108 | Hs |
| 62951.2 | UfuUfgUfgAfuUfuUfL | | uuAfcCfaCfcAfuscsc | | |
| | 96 | | | | |
| AD- | GfsasCfuUfgCfaUfCf | 38 | usAfsuAfuUfuCfcAfg | 109 | Hs |
| 62956.2 | CfuGfgAfaAfuAfuAfL | | gaUfgCfaAfgUfcscsa | | |
| | 96 | | | | |
| AD- | GfsgsAfaGfgGfaAfGf | 39 | asAfsgAfcUfuCfuAfc | 110 | Hs |
| 62961.2 | GfuAfgAfaGfuCfuUfL | | cuUfcCfcUfuCfcsasc | | |
| | 96 | | | | |
| AD- | UfsgsUfcUfuCfuGfUf | 40 | asGfsgAfaAfuCfuAfa | 111 | Hs |
| 62966.2 | UfuAfgAfuUfuCfcUfL | | acAfgAfaGfaCfasgsg | | |
| | 96 | | | | |
| AD- | CfsusUfuGfgCfuGfUf | 41 | asGfsaUfcUfuGfgAfa | 112 | Hs |
| 62971.2 | UfuCfcAfaGfaUfcUfL | | acAfgCfcAfaAfgsgsa | | |
| | 96 | | | | |
| AD- | AfsasUfgUfgUfuUfGf | 42 | asUfsgAfcGfuUfgCfc | 113 | Hs |
| 62936.2 | GfgCfaAfcGfuCfaUfL | | caAfaCfaCfaUfususu | | |
| | 96 | | | | |
| AD- | UfsgsUfgAfcUfgUfGf | 43 | usAfsaGfgGfgUfgUfc | 114 | Hs |
| 62942.2 | GfaCfaCfcCfcUfuAfL | | caCfaGfuCfaCfasasa | | |
| | 96 | | | | |
| AD- | GfsasUfgGfgGfuGfCf | 44 | asAfsuAfgUfaGfcUfg | 115 | Hs |
| 62947.2 | CfaGfcUfaCfuAfuUfL | | gcAfcCfcCfaUfcscsa | | |
| | 96 | | | | |
| AD- | GfsasAfaAfuGfuGfUf | 45 | asCfsgUfuGfcCfcAfa | 116 | Hs |
| 62952.2 | UfuGfgGfcAfaCfgUfL | | acAfcAfuUfuUfcsasa | | |
| | 96 | | | | |
| AD- | GfsgsCfuGfuUfuCfCf | 46 | usGfsuCfaGfaUfcUfu | 117 | Hs |
| 62957.2 | AfaGfaUfcUfgAfcAfL | | ggAfaAfcAfgCfcsasa | | |
| | 96 | | | | |
| AD- | UfscsCfaAfcAfaAfAf | 47 | asGfsgGfgUfgGfcUfa | 118 | Hs |
| 62962.2 | UfaGfcCfaCfcCfcUfL | | uuUfuGfuUfgGfasasa | | |
| | 96 | | | | |
| AD- | GfsusCfuUfcUfgUfUf | 48 | asAfsgGfaAfaUfcUfa | 119 | Hs |
| 62967.2 | UfaGfaUfuUfcCfuUfL | | aaCfaGfaAfgAfcsasg | | |
| | 96 | | | | |
| AD- | UfsgsGfaAfgGfgAfAf | 49 | asGfsaCfuUfcUfaCfc | 120 | Hs |
| 62972.2 | GfgUfaGfaAfgUfcUfL | | uuCfcCfuUfcCfascsa | | |
| | 96 | | | | |
| AD- | UfscsCfuUfuGfgCfUf | 50 | asUfscUfuGfgAfaAfc | 121 | Hs |
| 62937.2 | GfuUfuCfcAfaGfaUfL | | agCfcAfaAfgGfasusu | | |
| | 96 | | | | |
| AD- | CfsasUfcUfcUfcAfGf | 51 | usAfsuCfaUfcCfcAfg | 122 | Hs |
| 62943.2 | CfuGfgGfaUfgAfuAfL | | cuGfaGfaGfaUfgsgsg | | |
| | 96 | | | | |
| AD- | GfsgsGfgUfgCfcAfGf | 52 | asUfscAfaUfaGfuAfg | 123 | Hs |
| 62948.2 | CfuAfcUfaUfuGfaUfL | | cuGfgCfaCfcCfcsasu | | |
| | 96 | | | | |
| AD- | AfsusGfuGfuUfuGfGf | 53 | usAfsuGfaCfgUfuGfc | 124 | Hs |
| 62953.2 | GfcAfaCfgUfcAfuAfL | | ccAfaAfcAfcAfususu | | |
| | 96 | | | | |
| AD- | CfsusGfuUfuAfgAfUf | 54 | usUfscUfuAfaGfgAfa | 125 | Hs |
| 62958.2 | UfuCfcUfuAfaGfaAfL | | auCfuAfaAfcAfgsasa | | |
| | 96 | | | | |
| AD- | AfsgsAfaAfgAfaAfUf | 55 | usAfsuGfcAfaGfuCfc | 126 | Hs |
| 62963.2 | GfgAfcUfuGfcAfuAfL | | auUfuCfuUfuCfusasg | | |
| | 96 | | | | |
| AD- | GfscsAfuCfcUfgGfAf | 56 | usUfsuAfaUfaUfaUfu | 127 | Hs |
| 62968.2 | AfaUfaUfaUfuAfaAfL | | ucCfaGfgAfuGfcsasa | | |
| | 96 | | | | |
| AD- | CfscsUfgUfcAfgAfCf | 57 | usAfsgUfuCfcCfaUfg | 128 | Hs |
| 62973.2 | CfaUfgGfgAfaCfuAfL | | guCfuGfaCfaGfgscsu | | |
| | 96 | | | | |
| AD- | AfsasAfcAfuGfgUfGf | 58 | usAfsuCfcCfaUfcCfa | 129 | Hs |
| 62938.2 | UfgGfaUfgGfgAfuAfL | | caCfcAfuGfuUfusasa | | |
| | 96 | | | | |
| AD- | CfsusCfaGfgAfuGfAf | 59 | usUfscAfaAfaUfuUfu | 130 | Hs |
| 62974.2 | AfaAfaUfuUfuGfaAfL | | ucAfuCfcUfgAfgsusu | | |
| | 96 | | | | |
| AD- | CfsasGfcAfuGfuAfUf | 60 | usUfsuGfuCfaAfgUfa | 131 | Hs |
| 62978.2 | UfaCfuUfgAfcAfaAfL | | auAfcAfuGfcUfgsasa | | |
| | 96 | | | | |
| AD- | UfsasUfgAfaCfaAfCf | 61 | usGfsaUfuUfaGfcAfu | 132 | Hs |
| 62982.2 | AfuGfcUfaAfaUfcAfL | | guUfgUfuCfaUfasasu | | |
| | 96 | | | | |
| AD- | AfsusAfuAfuCfcAfAf | 62 | usCfscUfaAfaAfcAfu | 133 | Hs |
| 62986.2 | AfuGfuUfuUfaGfgAfL | | uuGfgAfuAfuAfususc | | |
| | 96 | | | | |
| AD- | CfscsAfgAfuGfgAfAf | 63 | usUfsgGfaUfaCfaGfc | 134 | Hs |
| 62990.2 | GfcUfgUfaUfcCfaAfL | | uuCfcAfuCfuGfgsasa | | |
| | 96 | | | | |
| AD- | GfsasCfuUfuCfaUfCf | 64 | usAfsuAfuUfuCfcAfg | 135 | Hs |
| 62994.2 | CfuGfgAfaAfuAfuAfL | | gaUfgAfaAfgUfcscsa | | |
| | 96 | | | | |
| AD- | CfscsCfcGfgCfuAfAf | 65 | asUfsuGfaUfaCfaAfa | 136 | Hs |
| 62998.2 | UfuUfgUfaUfcAfaUfL | | uuAfgCfcGfgGfgsgsa | | |
| | 96 | | | | |
| AD- | UfsusAfaAfcAfuGfGf | 66 | usCfscCfaUfuCfaAfg | 137 | Hs |
| 63002.2 | CfuUfgAfaUfgGfgAfL | | ccAfuGfuUfuAfascsa | | |
| | 96 | | | | |
| AD- | AfsasUfgUfgUfuUfAf | 67 | asUfsgAfcGfuUfgUfc | 138 | Mm |
| 62975.2 | GfaCfaAfcGfuCfaUfL | | uaAfaCfaCfaUfususu | | |
| | 96 | | | | |
| AD- | AfscsUfaAfaGfgAfAf | 68 | asAfscCfgGfaAfuUfc | 139 | Mm |
| 62979.2 | GfaAfuUfcCfgGfuUfL | | uuCfcUfuUfaGfusasu | | |
| | 96 | | | | |
| AD- | UfsasUfaUfcCfaAfAf | 69 | asUfscCfuAfaAfaCfa | 140 | Mm |
| 62983.2 | UfgUfuUfuAfgGfaUfL | | uuUfgGfaUfaUfasusu | | |
| | 96 | | | | |
| AD- | GfsusGfcGfgAfaAfGf | 70 | asAfscAfuCfaGfuGfc | 141 | Mm |
| 62987.2 | GfcAfcUfgAfuGfuUfL | | cuUfuCfcGfcAfcsasc | | |
| | 96 | | | | |
| AD- | UfsasAfaAfcAfgUfGf | 71 | asAfsuUfuAfaGfaAfc | 142 | Mm |
| 62991.2 | GfuUfcUfuAfaAfuUfL | | caCfuGfuUfuUfasasa | | |
| | 96 | | | | |
| AD- | AfsusGfaAfaAfaUfUf | 72 | asCfsuGfgUfuUfcAfa | 143 | Mm |
| 62995.2 | UfuGfaAfaCfcAfgUfL | | aaUfuUfuUfcAfuscsc | | |
| | 96 | | | | |
| AD- | AfsasCfaAfaAfuAfGf | 73 | asAfsaAfgGfgAfuUfg | 144 | Mm |
| 62999.2 | CfaAfuCfcCfuUfuUfL | | cuAfuUfuUfgUfusgsg | | |
| | 96 | | | | |
| AD- | CfsusGfaAfaCfaGfAf | 74 | asAfsgUfcGfaCfaGfa | 145 | Mm |
| 63003.2 | UfcUfgUfcGfaCfuUfL | | ucUfgUfuUfcAfgscsa | | |
| | 96 | | | | |
| AD- | UfsusGfuUfgCfaAfAf | 75 | usCfsaAfaAfuGfcCfc | 146 | Mm |
| 62976.2 | GfgGfcAfuUfuUfgAfL | | uuUfgCfaAfcAfasusu | | |
| | 96 | | | | |
| AD- | CfsusCfaUfuGfuUfUf | 76 | usAfscAfgGfuUfaAfu | 147 | Mm |
| 62980.2 | AfuUfaAfcCfuGfuAfL | | aaAfcAfaUfgAfgsasu | | |
| | 96 | | | | |
| AD- | CfsasAfcAfaAfaUfAf | 77 | asAfsaGfgGfaUfuGfc | 148 | Mm |
| 62984.2 | GfcAfaUfcCfcUfuUfL | | uaUfuUfuGfuUfgsgsa | | |
| | 96 | | | | |
| AD- | CfsasUfuGfuUfuAfUf | 78 | asAfsuAfcAfgGfuUfa | 149 | Mm |
| 62992.2 | UfaAfcCfuGfuAfuUfL | | auAfaAfcAfaUfgsasg | | |
| | 96 | | | | |
| AD- | UfsasUfcAfgCfuGfGf | 79 | usUfsgAfuAfuCfuUfc | 150 | Mm |
| 62996.2 | GfaAfgAfuAfuCfaAfL | | ccAfgCfuGfaUfasgsa | | |
| | 96 | | | | |
| AD- | UfsgsUfcCfuAfgGfAf | 80 | usUfscUfaAfaAfgGfu | 151 | Mm |
| 63000.2 | AfcCfuUfuUfaGfaAfL | | ucCfuAfgGfaCfascsc | | |
| | 96 | | | | |
| AD- | UfscsCfaAfcAfaAfAf | 81 | asGfsgGfaUfuGfcUfa | 152 | Mm |
| 63004.2 | UfaGfcAfaUfcCfcUfL | | uuUfuGfuUfgGfasasa | | |
| | 96 | | | | |
| AD- | GfsgsUfgUfgCfgGfAf | 82 | asUfscAfgUfgCfcUfu | 153 | Mm |
| 62977.2 | AfaGfgCfaCfuGfaUfL | | ucCfgCfaCfaCfcscsc | | |
| | 96 | | | | |
| AD- | UfsusGfaAfaCfcAfGf | 83 | asUfsgAfuAfaAfgUfa | 154 | Mm |
| 62981.2 | UfaCfuUfuAfuCfaUfL | | cuGfgUfuUfcAfasasa | | |
| | 96 | | | | |
| AD- | UfsasCfuUfcCfaAfAf | 84 | usAfsuAfuAfuAfgAfc | 155 | Mm |
| 62985.2 | GfuCfuAfuAfuAfuAfL | | uuUfgGfaAfgUfascsu | | |
| | 96 | | | | |
| AD- | UfscsCfuAfgGfaAfCf | 85 | asUfsuUfcUfaAfaAfg | 156 | Mm |
| 62989.2 | CfuUfuUfaGfaAfaUfL | | guUfcCfuAfgGfascsa | | |
| | 96 | | | | |
| AD- | CfsusCfcUfgAfgGfAf | 86 | usUfscCfaAfaAfuUfu | 157 | Mm |
| 62993.2 | AfaAfuUfuUfgGfaAfL | | ucCfuCfaGfgAfgsasa | | |
| | 96 | | | | |
| AD- | GfscsUfcCfgGfaAfUf | 87 | asUfsuUfcAfgCfaAfc | 158 | Mm |
| 62997.2 | GfuUfgCfuGfaAfaUfL | | auUfcCfgGfaGfcsasu | | |
| | 96 | | | | |
| AD- | GfsusGfuUfuGfuGfGf | 88 | usAfsuUfgGfuCfuCfc | 159 | Mm |
| 63001.2 | GfgAfgAfcCfaAfuAfL | | ccAfcAfaAfcAfcsasg | | |
| | 96 | | | | |
| AD- | GfsasAfuGfuGfaAfAf | 160 | usUfsgUfcGfaUfgAfc | 277 | |
| 62933.1 | GfuCfaUfcGfaCfaAfL | | uuUfcAfcAfuUfcsusg | | |
| | 96 | | | | |
| AD- | Y44gsasAfuGfuGfaAf | 161 | PusUfsgUfcGfaUfgAf | 278 | |
| 65630.1 | AfGfuCfaUfcGfaCfaA | | cuuUfcAfcAfuUfcsus | | |
| | fL96 | | g | | |
| AD- | gsasauguGfaAfAfGfu | 162 | usUfsgUfcGfaUfgAfc | 279 | |
| 65636.1 | cauCfgacaaL96 | | uuUfcAfcAfuUfcsusg | | |
| AD- | gsasauguGfaAfAfGfu | 163 | usUfsgUfcGfaUfgAfc | 280 | |
| 65642.1 | caucgacaaL96 | | uuUfcAfcAfuUfcsusg | | |
| AD- | gsasauguGfaaAfGfuc | 164 | usUfsgUfcGfaUfgAfc | 281 | |
| 65647.1 | aucgacaaL96 | | uuUfcAfcAfuUfcsusg | | |
| AD- | gsasauguGfaaaGfuca | 165 | usUfsgUfcGfaUfgAfc | 282 | |
| 65652.1 | ucGfacaaL96 | | uuUfcAfcAfuUfcsusg | | |
| AD- | gsasaugugaaaGfucau | 166 | usUfsgUfcGfaUfgAfc | 283 | |
| 65657.1 | cGfacaaL96 | | uuUfcAfcAfuUfcsusg | | |
| AD- | gsasauguGfaaaGfuca | 167 | usUfsgUfcGfaUfgAfc | 284 | |
| 65662.1 | ucgacaaL96 | | uuUfcAfcAfuUfcsusg | | |
| AD- | AfsusGfuGfaAfAfGfu | 168 | usUfsgUfcGfaUfgAfc | 285 | |
| 65625.1 | CfaUfcGfaCfaAfL96 | | uuUfcAfcAfususc | | |
| AD- | asusguGfaAfAfGfuca | 169 | usUfsgucGfaugacuuU | 286 | |
| 65631.1 | ucgacaaL96 | | fcAfcaususc | | |
| AD- | GfsasAfuGfuGfaAfAf | 170 | usUfsgucGfaUfgAfcu | 287 | |
| 65637.1 | GfuCfaUfcGfaCfaAfL | | uUfcAfcauucsusg | | |
| | 96 | | | | |
| AD- | GfsasAfuGfuGfaAfAf | 171 | usUfsgucGfaUfGfacu | 288 | |
| 65643.1 | GfuCfaUfcGfaCfaAfL | | uUfcAfcauucsusg | | |
| | 96 | | | | |
| AD- | GfsasAfuGfuGfaAfAf | 172 | usUfsgucGfaugacuuU | 289 | |
| 65648.1 | GfuCfaUfcGfaCfaAfL | | fcAfcauucsusg | | |
| | 96 | | | | |
| AD- | GfsasAfuGfuGfaAfAf | 173 | usUfsgucGfaugacuuU | 290 | |
| 65653.1 | GfuCfaUfcGfaCfaAfL | | fcacauucsusg | | |
| | 96 | | | | |
| AD- | GfsasAfuGfuGfaAfAf | 174 | usUfsgucgaugacuuUf | 291 | |
| 65658.1 | GfuCfaUfcGfaCfaAfL | | cacauucsusg | | |
| | 96 | | | | |
| AD- | gsasauguGfaAfAfGfu | 175 | usUfsgucGfaUfgAfcu | 292 | |
| 65663.1 | caucgacaaL96 | | uUfcAfcauucsusg | | |
| AD- | gsasauguGfaAfAfGfu | 176 | usUfsgucGfaUfGfacu | 293 | |
| 65626.1 | caucgacaaL96 | | uUfcAfcauucsusg | | |
| AD- | gsasauguGfaaAfGfuc | 177 | usUfsgucGfaUfgAfcu | 294 | |
| 65638.1 | aucgacaaL96 | | uUfcAfcauucsusg | | |
| AD- | gsasauguGfaaAfGfuc | 178 | usUfsgucGfaUfGfacu | 295 | |
| 65644.1 | aucgacaaL96 | | uUfcAfcauucsusg | | |
| AD- | gsasauguGfaaAfGfuc | 179 | usUfsgucGfaugacuuU | 296 | |
| 65649.1 | aucgacaaL96 | | fcAfcauucsusg | | |
| AD- | gsasaugugaaagucau( | 180 | usUfsgUfcGfaUfgAfc | 297 | |
| 65654.1 | Cgn)gacaaL96 | | uuUfcAfcAfuUfcsusg | | |
| AD- | gsasaugdTgaaagucau | 181 | usUfsgUfcGfaUfgAfc | 298 | |
| 65659.1 | (Cgn)gacaaL96 | | uuUfcAfcAfuUfcsusg | | |
| AD- | gsasaudGugaaadGuca | 182 | usUfsgUfcGfaUfgAfc | 299 | |
| 65627.1 | u(Cgn)gacaaL96 | | uuUfcAfcAfuUfcsusg | | |
| AD- | gsasaugdTgaaadGuca | 183 | usUfsgUfcGfaUfgAfc | 300 | |
| 65633.1 | u(Cgn)gacaaL96 | | uuUfcAfcAfuUfcsusg | | |
| AD- | gsasaugudGaaadGuca | 184 | usUfsgUfcGfaUfgAfc | 301 | |
| 65639.1 | u(Cgn)gacaaL96 | | uuUfcAfcAfuUfcsusg | | |
| AD- | gsasaugugaaadGucau | 185 | usUfsgUfcGfaUfgAfc | 302 | |
| 65645.1 | cdGacaaL96 | | uuUfcAfcAfuUfcsusg | | |
| AD- | gsasaugugaaadGucau | 186 | usUfsgUfcGfaUfgAfc | 303 | |
| 65650.1 | cdTacaaL96 | | uuUfcAfcAfuUfcsusg | | |
| AD- | gsasaugugaaadGucau | 187 | usUfsgUfcGfaUfgAfc | 304 | |
| 65655.1 | cY34acaaL96 | | uuUfcAfcAfuUfcsusg | | |
| AD- | gsasaugugaaadGucad | 188 | usUfsgUfcGfaUfgAfc | 305 | |
| 65660.1 | TcdTacaaL96 | | uuUfcAfcAfuUfcsusg | | |
| AD- | gsasaugugaaadGucau | 189 | usUfsgUfcGfaUfgAfc | 306 | |
| 65665.1 | cdGadCaaL96 | | uuUfcAfcAfuUfcsusg | | |
| AD- | gsasaugugaaadGucau | 190 | usUfsgUfcGfaUfgAfc | 307 | |
| 65628.1 | cdTadCaaL96 | | uuUfcAfcAfuUfcsusg | | |
| AD- | gsasaugugaaadGucau | 191 | usUfsgUfcGfaUfgAfc | 308 | |
| 65634.1 | cY34adCaaL96 | | uuUfcAfcAfuUfcsusg | | |
| AD- | GfsasAfuGfuGfaAfAf | 192 | usdTsgucgaugdAcuud | 309 | |
| 65646.1 | GfuCfaUfcGfaCfaAfL | | Tcacauucsusg | | |
| | 96 | | | | |
| AD- | GfsasAfuGfuGfaAfAf | 193 | usUsgucgaugacuudTc | 310 | |
| 65656.1 | GfuCfaUfcGfaCfaAfL | | acauucsusg | | |
| | 96 | | | | |
| AD- | GfsasAfuGfuGfaAfAf | 194 | usdTsgucdGaugacuud | 311 | |
| 65661.1 | GfuCfaUfcGfaCfaAfL | | Tcacauucsusg | | |
| | 96 | | | | |
| AD- | GfsasAfuGfuGfaAfAf | 195 | usUsgucdGaugacuudT | 312 | |
| 65666.1 | GfuCfaUfcGfaCfaAfL | | cacauucsusg | | |
| | 96 | | | | |
| AD- | GfsasAfuGfuGfaAfAf | 196 | usdTsgucgaugacuudT | 313 | |
| 65629.1 | GfuCfaUfcGfaCfaAfL | | cdAcauucsusg | | |
| | 96 | | | | |
| AD- | GfsasAfuGfuGfaAfAf | 197 | usdTsgucdGaugacuud | 314 | |
| 65635.1 | GfuCfaUfcGfaCfaAfL | | TcdAcauucsusg | | |
| | 96 | | | | |
| AD- | gsasaugugaaadGucau | 198 | usdTsgucgaugdAcuud | 315 | |
| 65641.1 | (Cgn)gacaaL96 | | Tcacauucsusg | | |
| AD- | GfsasCfuUfuCfaUfCf | 199 | usAfsuAfuUfuCfcAfg | 316 | |
| 62994.1 | CfuGfgAfaAfuAfuAfL | | gaUfgAfaAfgUfcscsa | | |
| | 96 | | | | |
| AD- | gsascuuuCfaUfCfCfu | 200 | usAfsuAfuUfuCfcAfg | 317 | |
| 65595.1 | ggaAfauauaL96 | | gaUfgAfaAfgUfcscsa | | |
| AD- | gsascuuuCfaUfCfCfu | 201 | usAfsuAfuUfuCfcAfg | 318 | |
| 65600.1 | ggaaauauaL96 | | gaUfgAfaAfgUfcscsa | | |
| AD- | gsascuuuCfaucCfugg | 202 | usAfsuAfuUfuCfcAfg | 319 | |
| 65610.1 | aaAfuauaL96 | | gaUfgAfaAfgUfcscsa | | |
| AD- | gsascuuucaucCfugga | 203 | usAfsuAfuUfuCfcAfg | 320 | |
| 65615.1 | aAfuauaL96 | | gaUfgAfaAfgUfcscsa | | |
| AD- | gsascuuuCfaucCfugg | 204 | usAfsuAfuUfuCfcAfg | 321 | |
| 65620.1 | aaauauaL96 | | gaUfgAfaAfgUfcscsa | | |
| AD- | CfsusUfuCfaUfCfCfu | 205 | usAfsuAfuUfuCfcAfg | 322 | |
| 65584.1 | GfgAfaAfuAfuAfL96 | | gaUfgAfaAfgsusc | | |
| AD- | csusuuCfaUfCfCfugg | 206 | usAfsuauUfuccaggaU | 323 | |
| 65590.1 | aaauauaL96 | | fgAfaagsusc | | |
| AD- | GfsasCfuUfuCfaUfCf | 207 | usAfsuauUfuCfcAfgg | 324 | |
| 65596.1 | CfuGfgAfaAfuAfuAfL | | aUfgAfaagucscsa | | |
| | 96 | | | | |
| AD- | GfsasCfuUfuCfaUfCf | 208 | usAfsuauUfuCfCfagg | 325 | |
| 65601.1 | CfuGfgAfaAfuAfuAfL | | aUfgAfaagucscsa | | |
| | 96 | | | | |
| AD- | GfsasCfuUfuCfaUfCf | 209 | usAfsuauUfuccaggaU | 326 | |
| 65606.1 | CfuGfgAfaAfuAfuAfL | | fgAfaagucscsa | | |
| | 96 | | | | |
| AD- | GfsasCfuUfuCfaUfCf | 210 | usAfsuauUfuccaggaU | 327 | |
| 65611.1 | CfuGfgAfaAfuAfuAfL | | fgaaagucscsa | | |
| | 96 | | | | |
| AD- | GfsasCfuUfuCfaUfCf | 211 | usAfsuauuuccaggaUf | 328 | |
| 65616.1 | CfuGfgAfaAfuAfuAfL | | gaaagucscsa | | |
| | 96 | | | | |
| AD- | gsascuuuCfaUfCfCfu | 212 | usAfsuauUfuCfcAfgg | 329 | |
| 65621.1 | ggaaauauaL96 | | aUfgAfaagucscsa | | |
| AD- | gsascuuuCfaUfCfCfu | 213 | usAfsuauUfuCfCfagg | 330 | |
| 65585.1 | ggaaauauaL96 | | aUfgAfaagucscsa | | |
| AD- | gsascuuuCfaUfCfCfu | 214 | usAfsuauUfuccaggaU | 331 | |
| 65591.1 | ggaaauauaL96 | | fgAfaagucscsa | | |
| AD- | gsascuuuCfauCfCfug | 215 | usAfsuauUfuCfcAfgg | 332 | |
| 65597.1 | gaaauauaL96 | | aUfgAfaagucscsa | | |
| AD- | gsascuuuCfauCfCfug | 216 | usAfsuauUfuCfCfagg | 333 | |
| 65602.1 | gaaauauaL96 | | aUfgAfaagucscsa | | |
| AD- | gsascuuuCfauCfCfug | 217 | usAfsuauUfuccaggaU | 334 | |
| 65607.1 | gaaauauaL96 | | fgAfaagucscsa | | |
| AD- | gsascuuucauccuggaa | 218 | usAfsuAfuUfuCfcAfg | 335 | |
| 65612.1 | (Agn)uauaL96 | | gaUfgAfaAfgUfcscsa | | |
| AD- | gsascuuucaucdCugga | 219 | usAfsuAfuUfuCfcAfg | 336 | |
| 65622.1 | a(Agn)uauaL96 | | gaUfgAfaAfgUfcscsa | | |
| AD- | gsascudTucaucdCugg | 220 | usAfsuAfuUfuCfcAfg | 337 | |
| 65586.1 | aa(Agn)uauaL96 | | gaUfgAfaAfgUfcscsa | | |
| AD- | gsascuudTcaucdCugg | 221 | usAfsuAfuUfuCfcAfg | 338 | |
| 65592.1 | aa(Agn)uauaL96 | | gaUfgAfaAfgUfcscsa | | |
| AD- | gsascuuudCaucdCugg | 222 | usAfsuAfuUfuCfcAfg | 339 | |
| 65598.1 | aa(Agn)uauaL96 | | gaUfgAfaAfgUfcscsa | | |
| AD- | gsascuuucaucdCugga | 223 | usAfsuAfuUfuCfcAfg | 340 | |
| 65603.1 | adAuauaL96 | | gaUfgAfaAfgUfcscsa | | |
| AD- | gsascuuucaucdCugga | 224 | usAfsuAfuUfuCfcAfg | 341 | |
| 65608.1 | adTuauaL96 | | gaUfgAfaAfgUfcscsa | | |
| AD- | gsascuuucaucdCugga | 225 | usAfsuAfuUfuCfcAfg | 342 | |
| 65613.1 | aY34uauaL96 | | gaUfgAfaAfgUfcscsa | | |
| AD- | gsascuuucaucdCuggd | 226 | usAfsuAfuUfuCfcAfg | 343 | |
| 65618.1 | AadTuauaL96 | | gaUfgAfaAfgUfcscsa | | |
| AD- | gsascuuucaucdCugga | 227 | usAfsuAfuUfuCfcAfg | 344 | |
| 65623.1 | adTudAuaL96 | | gaUfgAfaAfgUfcscsa | | |
| AD- | gsascuuucaucdCugga | 228 | usAfsuAfuUfuCfcAfg | 345 | |
| 65587.1 | a(Agn)udAuaL96 | | gaUfgAfaAfgUfcscsa | | |
| AD- | gsascuudTcaucdCugg | 229 | usAfsuAfuUfuCfcAfg | 346 | |
| 65593.1 | aadAudAuaL96 | | gaUfgAfaAfgUfcscsa | | |
| AD- | GfsasCfuUfuCfaUfCf | 230 | usdAsuauuuccdAggad | 347 | |
| 65599.1 | CfuGfgAfaAfuAfuAfL | | Tgaaagucscsa | | |
| | 96 | | | | |
| AD- | GfsasCfuUfuCfaUfCf | 231 | usdAsuauuuccaggadT | 348 | |
| 65604.1 | CfuGfgAfaAfuAfuAfL | | gaaagucscsa | | |
| | 96 | | | | |
| AD- | GfsasCfuUfuCfaUfCf | 232 | usAsuauuuccaggadTg | 349 | |
| 65609.1 | CfuGfgAfaAfuAfuAfL | | aaagucscsa | | |
| | 96 | | | | |
| AD- | GfsasCfuUfuCfaUfCf | 233 | usdAsuaudTuccaggad | 350 | |
| 65614.1 | CfuGfgAfaAfuAfuAfL | | Tgaaagucscsa | | |
| | 96 | | | | |
| AD- | GfsasCfuUfuCfaUfCf | 234 | usAsuaudTuccaggadT | 351 | |
| 65619.1 | CfuGfgAfaAfuAfuAfL | | gaaagucscsa | | |
| | 96 | | | | |
| AD- | GfsasCfuUfuCfaUfCf | 235 | usdAsuauuuccaggadT | 352 | |
| 65624.1 | CfuGfgAfaAfuAfuAfL | | gdAaagucscsa | | |
| | 96 | | | | |
| AD- | GfsasCfuUfuCfaUfCf | 236 | usdAsuaudTuccaggad | 353 | |
| 65588.1 | CfuGfgAfaAfuAfuAfL | | TgdAaagucscsa | | |
| | 96 | | | | |
| AD- | gsascuuucaucdCugga | 237 | usdAsuauuuccdAggad | 354 | |
| 65594.1 | a(Agn)uauaL96 | | Tgaaagucscsa | | |
| AD- | asgsaaagGfuGfUfUfc | 238 | usGfsacaUfcUfUfgaa | 355 | |
| 68309.1 | aagaugucaL96 | | cAfcCfuuucuscsc | | |
| AD- | csasuccuGfgAfAfAfu | 239 | asGfsuuaAfuAfUfauu | 356 | |
| 68303.1 | auauuaacuL96 | | uCfcAfggaugsasa | | |
| AD- | gsasauguGfaAfAfGfu | 240 | usUfsgucGfaUfGfacu | 357 | |
| 65626.5 | caucgacaaL96 | | uUfcAfcauucsusg | | |
| AD- | asgsugcaCfaAfUfAfu | 241 | usAfsuggGfaAfAfaua | 358 | |
| 68295.1 | uuucccauaL96 | | uUfgUfgcacusgsu | | |
| AD- | gsasaaguCfaUfCfGfa | 242 | asAfsuguCfuUfGfucg | 359 | |
| 68273.1 | caagacauuL96 | | aUfgAfcuuucsasc | | |
| AD- | asasugugAfaAfGfUfc | 243 | usUfsuguCfgAfUfgac | 360 | |
| 68297.1 | aucgacaaaL96 | | uUfuCfacauuscsu | | |
| AD- | csusggaaAfuAfUfAfu | 244 | usAfsacaGfuUfAfaua | 361 | |
| 68287.1 | uaacuguuaL96 | | uAfuUfuccagsgsa | | |
| AD- | asusuuucCfcAfUfCfu | 245 | asAfsauaAfuAfCfaga | 362 | |
| 68300.1 | guauuauuuL96 | | uGfgGfaaaausasu | | |
| AD- | usgsucguUfcUfUfUfu | 246 | usUfsuugUfuGfGfaaa | 363 | |
| 68306.1 | ccaacaaaaL96 | | aGfaAfcgacascsc | | |
| AD- | asusccugGfaAfAfUfa | 247 | usAfsguuAfaUfAfuau | 364 | |
| 68292.1 | uauuaacuaL96 | | uUfcCfaggausgsa | | |
| AD- | gscsauuuUfgAfGfAfg | 248 | usAfsucaUfcAfCfcuc | 365 | |
| 68298.1 | gugaugauaL96 | | uCfaAfaaugescsc | | |
| AD- | csasggggGfaGfAfAfa | 249 | usUfsgaaCfaCfCfuuu | 366 | |
| 68277.1 | gguguucaaL96 | | cUfcCfcccugsgsa | | |
| AD- | gsgsaaauAfuAfUfUfa | 250 | usUfsuaaCfaGfUfuaa | 367 | |
| 68289.1 | acuguuaaaL96 | | uAfuAfuuuccsasg | | |
| AD- | csasuuggUfgAfGfGfa | 251 | asAfsggaUfuUfUfucc | 368 | |
| 68272.1 | aaaauccuuL96 | | uCfaCfcaaugsusc | | |
| AD- | gsgsgagaAfaGfGfUfg | 252 | usAfsucuUfgAfAfcac | 369 | |
| 68282.1 | uucaagauaL96 | | cUfuUfcuccescsc | | |
| AD- | gsgscauuUfuGfAfGfa | 253 | asUfscauCfaCfCfucu | 370 | |
| 68285.1 | ggugaugauL96 | | cAfaAfaugccscsu | | |
| AD- | usascaaaGfgGfUfGfu | 254 | asAfsaagAfaCfGfaca | 371 | |
| 68290.1 | cguucuuuuL96 | | cCfcUfuuguasusu | | |
| AD- | usgsggauCfuUfGfGfu | 255 | usGfsauuCfgAfCfacc | 372 | |
| 68296.1 | gucgaaucaL96 | | aAfgAfucccasusu | | |
| AD- | csusgacaGfuGfCfAfc | 256 | usAfsaaaUfaUfUfgug | 373 | |
| 68288.1 | aauauuuuaL96 | | cAfcUfgucagsasu | | |
| AD- | csasgugcAfcAfAfUfa | 257 | asUfsgggAfaAfAfuau | 374 | |
| 68299.1 | uuuucccauL96 | | uGfuGfcacugsusc | | |
| AD- | ascsuuuuCfaAfUfGfg | 258 | usUfsaggAfcAfCfcca | 375 | |
| 68275.1 | guguccuaaL96 | | uUfgAfaaaguscsa | | |
| AD- | ascsauugGfuGfAfGfg | 259 | asGfsgauUfuUfUfccu | 376 | |
| 68274.1 | aaaaauccuL96 | | cAfcCfaauguscsu | | |
| AD- | ususgcuuUfuGfAfCfu | 260 | usCfsauuGfaAfAfagu | 377 | |
| 68294.1 | uuucaaugaL96 | | cAfaAfagcaasusg | | |
| AD- | csasuuuuGfaGfAfGfg | 261 | usCfsaucAfuCfAfccu | 378 | |
| 68302.1 | ugaugaugaL96 | | cUfcAfaaaugscsc | | |
| AD- | ususgacuUfuUfCfAfa | 262 | usGfsacaCfcCfAfuug | 379 | |
| 68279.1 | ugggugucaL96 | | aAfaAfgucaasasa | | |
| AD- | csgsacuuCfuGfUfUfu | 263 | usCfsuguCfcUfAfaaa | 380 | |
| 68304.1 | uaggacagaL96 | | cAfgAfagucgsasc | | |
| AD- | csuscugaGfuGfGfGfu | 264 | usAfsuucUfgGfCfacc | 381 | |
| 68286.1 | gccagaauaL96 | | cAfcUfcagagscsc | | |
| AD- | gsgsgugcCfaGfAfAfu | 265 | usAfscuuUfcAfCfauu | 382 | |
| 68291.1 | gugaaaguaL96 | | cUfgGfcaccesasc | | |
| AD- | uscsaaugGfgUfGfUfc | 266 | usGfsuucCfuAfGfgac | 383 | |
| 68283.1 | cuaggaacaL96 | | aCfcCfauugasasa | | |
| AD- | asasagucAfuCfGfAfc | 267 | usAfsaugUfcUfUfguc | 384 | |
| 68280.1 | aagacauuaL96 | | gAfuGfacuuuscsa | | |
| AD- | asusuuugAfgAfGfGfu | 268 | usGfscauCfaUfCfacc | 385 | |
| 68293.1 | gaugaugcaL96 | | uCfuCfaaaausgsc | | |
| AD- | asuscgacAfaGfAfCfa | 269 | usCfsucaCfcAfAfugu | 386 | |
| 68276.1 | uuggugagaL96 | | cUfuGfucgausgsa | | |
| AD- | gsgsugccAfgAfAfUfg | 270 | usGfsacuUfuCfAfcau | 387 | |
| 68308.1 | ugaaagucaL96 | | uCfuGfgcaccscsa | | |
| AD- | gsascaguGfcAfCfAfa | 271 | usGfsgaaAfaUfAfuug | 388 | |
| 68278.1 | uauuuuccaL96 | | uGfcAfcugucsasg | | |
| AD- | ascsaaagAfgAfCfAfc | 272 | usUfscugCfaCfAfgug | 389 | |
| 68307.1 | ugugcagaaL96 | | uCfuCfuuuguscsa | | |
| AD- | ususuucaAfuGfGfGfu | 273 | usCfscuaGfgAfCfacc | 390 | |
| 68284.1 | guccuaggaL96 | | cAfuUfgaaaasgsu | | |
| AD- | cscsguuuCfcAfAfGfa | 274 | asCfsuguCfaGfAfucu | 391 | |
| 68301.1 | ucugacaguL96 | | uGfgAfaacggscsc | | |
| AD- | asgsggggAfgAfAfAfg | 275 | usUfsugaAfcAfCfcuu | 392 | |
| 68281.1 | guguucaaaL96 | | uCfuCfccccusgsg | | |
| AD- | asgsucauCfgAfCfAfa | 276 | asCfscaaUfgUfCfuug | 393 | |
| 68305.1 | gacauugguL96 | | uCfgAfugacususu | | |

TABLE 2a
HAO1 unmodified sequences (human and human/mouse)

| | SEQ | | SEQ | | Position |
|---|---|---|---|---|---|
| Duplex | ID | | ID | | in |
| Name | NO: | Sense strand sequence | NO: | Antisense strand sequence | NM_017545.2 |
| AD-62933 | 394 | GAAUGUGAAAGUCAUCGACAA | 443 | UUGUCGAUGACUUUCACAUUCUG | 1072-1094 |
| AD-62939 | 395 | UUUUCAAUGGGUGUCCUAGGA | 444 | UCCUAGGACACCCAUUGAAAAGU | 1302-1324 |
| AD-62944 | 396 | GAAAGUCAUCGACAAGACAUU | 445 | AAUGUCUUGUCGAUGACUUUCAC | 1078-1100 |
| AD-62949 | 397 | UCAUCGACAAGACAUUGGUGA | 446 | UCACCAAUGUCUUGUCGAUGACU | 1083-1105 |
| AD-62954 | 398 | UUUCAAUGGGUGUCCUAGGAA | 447 | UUCCUAGGACACCCAUUGAAAAG | 1303-1325 |
| AD-62959 | 399 | AAUGGGUGUCCUAGGAACCUU | 448 | AAGGUUCCUAGGACACCCAUUGA | 1307-1329 |
| AD-62964 | 400 | GACAGUGCACAAUAUUUUCCA | 449 | UGGAAAAUAUUGUGCACUGUCAG | 1134-1156_C21A |
| AD-62969 | 401 | ACUUUUCAAUGGGUGUCCUAA | 450 | UUAGGACACCCAUUGAAAAGUCA | 1300-1322_G21A |
| AD-62934 | 402 | AAGUCAUCGACAAGACAUUGA | 451 | UCAAUGUCUUGUCGAUGACUUUC | 1080-1102_G21A |
| AD-62940 | 403 | AUCGACAAGACAUUGGUGAGA | 452 | UCUCACCAAUGUCUUGUCGAUGA | 1085-1107_G21A |
| AD-62945 | 404 | GGGAGAAAGGUGUUCAAGAUA | 453 | UAUCUUGAACACCUUUCUCCCCC | 996-1018_G21A |
| AD-62950 | 405 | CUUUUCAAUGGGUGUCCUAGA | 454 | UCUAGGACACCCAUUGAAAAGUC | 1301-1323_G21A |
| AD-62955 | 406 | UCAAUGGGUGUCCUAGGAACA | 455 | UGUUCCUAGGACACCCAUUGAAA | 1305-1327_C21A |
| AD-62960 | 407 | UUGACUUUUCAAUGGGUGUCA | 456 | UGACACCCAUUGAAAAGUCAAAA | 1297-1319_C21A |
| AD-62965 | 408 | AAAGUCAUCGACAAGACAUUA | 457 | UAAUGUCUUGUCGAUGACUUUCA | 1079-1101_G21A |
| AD-62970 | 409 | CAGGGGGAGAAAGGUGUUCAA | 458 | UUGAACACCUUUCUCCCCCUGGA | 992-1014 |
| AD-62935 | 410 | CAUUGGUGAGGAAAAAUCCUU | 459 | AAGGAUUUUUCCUCACCAAUGUC | 1095-1117 |
| AD-62941 | 411 | ACAUUGGUGAGGAAAAAUCCU | 460 | AGGAUUUUUCCUCACCAAUGUCU | 1094-1116 |
| AD-62946 | 412 | AGGGGGAGAAAGGUGUUCAAA | 461 | UUUGAACACCUUUCUCCCCCUGG | 993-1015_G21A |
| AD-62974 | 413 | CUCAGGAUGAAAAAUUUUGAA | 462 | UUCAAAAUUUUUCAUCCUGAGUU | 563-585 |
| AD-62978 | 414 | CAGCAUGUAUUACUUGACAAA | 463 | UUUGUCAAGUAAUACAUGCUGAA | 1173-1195 |
| AD-62982 | 415 | UAUGAACAACAUGCUAAAUCA | 464 | UGAUUUAGCAUGUUGUUCAUAAU | 53-75 |
| AD-62986 | 416 | AUAUAUCCAAAUGUUUUAGGA | 465 | UCCUAAAACAUUUGGAUAUAUUC | 1679-1701 |
| AD-62990 | 417 | CCAGAUGGAAGCUGUAUCCAA | 466 | UUGGAUACAGCUUCCAUCUGGAA | 156-178 |
| AD-62994 | 418 | GACUUUCAUCCUGGAAAUAUA | 467 | UAUAUUUCCAGGAUGAAAGUCCA | 1341-1363 |
| AD-62998 | 419 | CCCCGGCUAAUUUGUAUCAAU | 468 | AUUGAUACAAAUUAGCCGGGGGA | 29-51 |
| AD-63002 | 420 | UUAAACAUGGCUUGAAUGGGA | 469 | UCCCAUUCAAGCCAUGUUUAACA | 765-787 |
| AD-62975 | 421 | AAUGUGUUUAGACAACGUCAU | 470 | AUGACGUUGUCUAAACACAUUUU | 1388-1410 |
| AD-62979 | 422 | ACUAAAGGAAGAAUUCCGGUU | 471 | AACCGGAAUUCUUCCUUUAGUAU | 1027-1049 |
| AD-62983 | 423 | UAUAUCCAAAUGUUUUAGGAU | 472 | AUCCUAAAACAUUUGGAUAUAUU | 1680-1702 |
| AD-62987 | 424 | GUGCGGAAAGGCACUGAUGUU | 473 | AACAUCAGUGCCUUUCCGCACAC | 902-924 |
| AD-62991 | 425 | UAAAACAGUGGUUCUUAAAUU | 474 | AAUUUAAGAACCACUGUUUUAAA | 1521-1543 |
| AD-62995 | 426 | AUGAAAAAUUUUGAAACCAGU | 475 | ACUGGUUUCAAAAUUUUUCAUCC | 569-591 |
| AD-62999 | 427 | AACAAAAUAGCAAUCCCUUUU | 476 | AAAAGGGAUUGCUAUUUUGUUGG | 1264-1286 |
| AD-63003 | 428 | CUGAAACAGAUCUGUCGACUU | 477 | AAGUCGACAGAUCUGUUUCAGCA | 195-217 |
| AD-62976 | 429 | UUGUUGCAAAGGGCAUUUUGA | 478 | UCAAAAUGCCCUUUGCAACAAUU | 720-742 |
| AD-62980 | 430 | CUCAUUGUUUAUUAACCUGUA | 479 | UACAGGUUAAUAAACAAUGAGAU | 1483-1505 |
| AD-62984 | 431 | CAACAAAAUAGCAAUCCCUUU | 480 | AAAGGGAUUGCUAUUUUGUUGGA | 1263-1285 |
| AD-62992 | 432 | CAUUGUUUAUUAACCUGUAUU | 481 | AAUACAGGUUAAUAAACAAUGAG | 1485-1507 |
| AD-62996 | 433 | UAUCAGCUGGGAAGAUAUCAA | 482 | UUGAUAUCUUCCCAGCUGAUAGA | 670-692 |
| AD-63000 | 434 | UGUCCUAGGAACCUUUUAGAA | 483 | UUCUAAAAGGUUCCUAGGACACC | 1313-1335 |
| AD-63004 | 435 | UCCAACAAAAUAGCAAUCCCU | 484 | AGGGAUUGCUAUUUUGUUGGAAA | 1261-1283 |
| AD-62977 | 436 | GGUGUGCGGAAAGGCACUGAU | 485 | AUCAGUGCCUUUCCGCACACCCC | 899-921 |
| AD-62981 | 437 | UUGAAACCAGUACUUUAUCAU | 486 | AUGAUAAAGUACUGGUUUCAAAA | 579-601 |
| AD-62985 | 438 | UACUUCCAAAGUCUAUAUAUA | 487 | UAUAUAUAGACUUUGGAAGUACU | 75-97_G21A |
| AD-62989 | 439 | UCCUAGGAACCUUUUAGAAAU | 488 | AUUUCUAAAAGGUUCCUAGGACA | 1315-1337_G21U |
| AD-62993 | 440 | CUCCUGAGGAAAAUUUUGGAA | 489 | UUCCAAAAUUUUCCUCAGGAGAA | 603-625_G21A |
| AD-62997 | 441 | GCUCCGGAAUGUUGCUGAAAU | 490 | AUUUCAGCAACAUUCCGGAGCAU | 181-203_C21U |
| AD-63001 | 442 | GUGUUUGUGGGGAGACCAAUA | 491 | UAUUGGUCUCCCCACAAACACAG | 953-975_C21A |

TABLE 2b
HAO1 unmodified sequences (mouse)

| | SEQ | | SEQ | | Position |
|---|---|---|---|---|---|
| Duplex | ID | Sense strand | ID | Antisense strand | in |
| Name | NO: | sequence | NO: | sequence | NM_010403.2 |
| AD-62951 | 492 | AUGGUGGUAAUUUGUGAUUUU | 514 | AAAAUCACAAAUUACCACCAUCC | 1642-1664 |
| AD-62956 | 493 | GACUUGCAUCCUGGAAAUAUA | 515 | UAUAUUUCCAGGAUGCAAGUCCA | 1338-1360 |
| AD-62961 | 494 | GGAAGGGAAGGUAGAAGUCUU | 516 | AAGACUUCUACCUUCCCUUCCAC | 864-886 |
| AD-62966 | 495 | UGUCUUCUGUUUAGAUUUCCU | 517 | AGGAAAUCUAAACAGAAGACAGG | 1506-1528 |
| AD-62971 | 496 | CUUUGGCUGUUUCCAAGAUCU | 518 | AGAUCUUGGAAACAGCCAAAGGA | 1109-1131 |
| AD-62936 | 497 | AAUGUGUUUGGGCAACGUCAU | 519 | AUGACGUUGCCCAAACACAUUUU | 1385-1407 |
| AD-62942 | 498 | UGUGACUGUGGACACCCCUUA | 520 | UAAGGGGUGUCCACAGUCACAAA | 486-508 |
| AD-62947 | 499 | GAUGGGGUGCCAGCUACUAUU | 521 | AAUAGUAGCUGGCACCCCAUCCA | 814-836 |
| AD-62952 | 500 | GAAAAUGUGUUUGGGCAACGU | 522 | ACGUUGCCCAAACACAUUUUCAA | 1382-1404 |
| AD-62957 | 501 | GGCUGUUUCCAAGAUCUGACA | 523 | UGUCAGAUCUUGGAAACAGCCAA | 1113-1135 |
| AD-62962 | 502 | UCCAACAAAAUAGCCACCCCU | 524 | AGGGGUGGCUAUUUUGUUGGAAA | 1258-1280 |
| AD-62967 | 503 | GUCUUCUGUUUAGAUUUCCUU | 525 | AAGGAAAUCUAAACAGAAGACAG | 1507-1529 |
| AD-62972 | 504 | UGGAAGGGAAGGUAGAAGUCU | 526 | AGACUUCUACCUUCCCUUCCACA | 863-885 |
| AD-62937 | 505 | UCCUUUGGCUGUUUCCAAGAU | 527 | AUCUUGGAAACAGCCAAAGGAUU | 1107-1129 |
| AD-62943 | 506 | CAUCUCUCAGCUGGGAUGAUA | 528 | UAUCAUCCCAGCUGAGAGAUGGG | 662-684 |
| AD-62948 | 507 | GGGGUGCCAGCUACUAUUGAU | 529 | AUCAAUAGUAGCUGGCACCCCAU | 817-839 |
| AD-62953 | 508 | AUGUGUUUGGGCAACGUCAUA | 530 | UAUGACGUUGCCCAAACACAUUU | 1386-1408_C21A |
| AD-62958 | 509 | CUGUUUAGAUUUCCUUAAGAA | 531 | UUCUUAAGGAAAUCUAAACAGAA | 1512-1534_C21A |
| AD-62963 | 510 | AGAAAGAAAUGGACUUGCAUA | 532 | UAUGCAAGUCCAUUUCUUUCUAG | 1327-1349_C21A |
| AD-62968 | 511 | GCAUCCUGGAAAUAUAUUAAA | 533 | UUUAAUAUAUUUCCAGGAUGCAA | 1343-1365_C21A |
| AD-62973 | 512 | CCUGUCAGACCAUGGGAACUA | 534 | UAGUUCCCAUGGUCUGACAGGCU | 308-330_G21A |
| AD-62938 | 513 | AAACAUGGUGUGGAUGGGAUA | 535 | UAUCCCAUCCACACCAUGUUUAA | 763-785_C21A |

TABLE 2c
Additional HAO1 unmodified sequences

| | SEQ ID | | SEQ ID | | Position in |
|---|---|---|---|---|---|
| Duplex Name | NO: | Sense strand sequence | NO: | Antisense strand sequence | NM_017545.2 |
| AD-62933.2 | 394 | GAAUGUGAAAGUCAUCGACAA | 443 | UUGUCGAUGACUUUCACAUUCUG | 1072-1094 |
| AD-62939.2 | 395 | UUUUCAAUGGGUGUCCUAGGA | 444 | UCCUAGGACACCCAUUGAAAAGU | 1302-1324 |
| AD-62944.2 | 396 | GAAAGUCAUCGACAAGACAUU | 445 | AAUGUCUUGUCGAUGACUUUCAC | 1078-1100 |
| AD-62949.2 | 397 | UCAUCGACAAGACAUUGGUGA | 446 | UCACCAAUGUCUUGUCGAUGACU | 1083-1105 |
| AD-62954.2 | 398 | UUUCAAUGGGUGUCCUAGGAA | 447 | UUCCUAGGACACCCAUUGAAAAG | 1303-1325 |
| AD-62959.2 | 399 | AAUGGGUGUCCUAGGAACCUU | 448 | AAGGUUCCUAGGACACCCAUUGA | 1307-1329 |
| AD-62964.2 | 400 | GACAGUGCACAAUAUUUUCCA | 449 | UGGAAAAUAUUGUGCACUGUCAG | 1134-1156_C21A |
| AD-62969.2 | 401 | ACUUUUCAAUGGGUGUCCUAA | 450 | UUAGGACACCCAUUGAAAAGUCA | 1300-1322_G21A |
| AD-62934.2 | 402 | AAGUCAUCGACAAGACAUUGA | 451 | UCAAUGUCUUGUCGAUGACUUUC | 1080-1102_G21A |
| AD-62940.2 | 403 | AUCGACAAGACAUUGGUGAGA | 452 | UCUCACCAAUGUCUUGUCGAUGA | 1085-1107_G21A |
| AD-62945.2 | 404 | GGGAGAAAGGUGUUCAAGAUA | 453 | UAUCUUGAACACCUUUCUCCCCC | 996-1018_G21A |
| AD-62950.2 | 405 | CUUUUCAAUGGGUGUCCUAGA | 454 | UCUAGGACACCCAUUGAAAAGUC | 1301-1323_G21A |
| AD-62955.2 | 406 | UCAAUGGGUGUCCUAGGAACA | 455 | UGUUCCUAGGACACCCAUUGAAA | 1305-1327_C21A |
| AD-62960.2 | 407 | UUGACUUUUCAAUGGGUGUCA | 456 | UGACACCCAUUGAAAAGUCAAAA | 1297-1319_C21A |
| AD-62965.2 | 408 | AAAGUCAUCGACAAGACAUUA | 457 | UAAUGUCUUGUCGAUGACUUUCA | 1079-1101_G21A |
| AD-62970.2 | 409 | CAGGGGGAGAAAGGUGUUCAA | 458 | UUGAACACCUUUCUCCCCCUGGA | 992-1014 |
| AD-62935.2 | 410 | CAUUGGUGAGGAAAAAUCCUU | 459 | AAGGAUUUUUCCUCACCAAUGUC | 1095-1117 |
| AD-62941.2 | 411 | ACAUUGGUGAGGAAAAAUCCU | 460 | AGGAUUUUUCCUCACCAAUGUCU | 1094-1116 |
| AD-62946.2 | 412 | AGGGGGAGAAAGGUGUUCAAA | 461 | UUUGAACACCUUUCUCCCCCUGG | 993-1015_G21A |
| AD-62974.2 | 413 | CUCAGGAUGAAAAAUUUUGAA | 462 | UUCAAAAUUUUUCAUCCUGAGUU | 563-585 |
| AD-62978.2 | 414 | CAGCAUGUAUUACUUGACAAA | 463 | UUUGUCAAGUAAUACAUGCUGAA | 1173-1195 |
| AD-62982.2 | 415 | UAUGAACAACAUGCUAAAUCA | 464 | UGAUUUAGCAUGUUGUUCAUAAU | 53-75 |
| AD-62986.2 | 416 | AUAUAUCCAAAUGUUUUAGGA | 465 | UCCUAAAACAUUUGGAUAUAUUC | 1679-1701 |
| AD-62990.2 | 417 | CCAGAUGGAAGCUGUAUCCAA | 466 | UUGGAUACAGCUUCCAUCUGGAA | 156-178 |
| AD-62994.2 | 418 | GACUUUCAUCCUGGAAAUAUA | 467 | UAUAUUUCCAGGAUGAAAGUCCA | 1341-1363 |
| AD-62998.2 | 419 | CCCCGGCUAAUUUGUAUCAAU | 468 | AUUGAUACAAAUUAGCCGGGGGA | 29-51 |
| AD-63002.2 | 420 | UUAAACAUGGCUUGAAUGGGA | 469 | UCCCAUUCAAGCCAUGUUUAACA | 765-787 |
| AD-62975.2 | 421 | AAUGUGUUUAGACAACGUCAU | 470 | AUGACGUUGUCUAAACACAUUUU | 1388-1410 |
| AD-62979.2 | 422 | ACUAAAGGAAGAAUUCCGGUU | 471 | AACCGGAAUUCUUCCUUUAGUAU | 1027-1049 |
| AD-62983.2 | 423 | UAUAUCCAAAUGUUUUAGGAU | 472 | AUCCUAAAACAUUUGGAUAUAUU | 1680-1702 |
| AD-62987.2 | 424 | GUGCGGAAAGGCACUGAUGUU | 473 | AACAUCAGUGCCUUUCCGCACAC | 902-924 |
| AD-62991.2 | 425 | UAAAACAGUGGUUCUUAAAUU | 474 | AAUUUAAGAACCACUGUUUUAAA | 1521-1543 |
| AD-62995.2 | 426 | AUGAAAAAUUUUGAAACCAGU | 475 | ACUGGUUUCAAAAUUUUUCAUCC | 569-591 |
| AD-62999.2 | 427 | AACAAAAUAGCAAUCCCUUUU | 476 | AAAAGGGAUUGCUAUUUUGUUGG | 1264-1286 |
| AD-63003.2 | 428 | CUGAAACAGAUCUGUCGACUU | 477 | AAGUCGACAGAUCUGUUUCAGCA | 195-217 |
| AD-62976.2 | 429 | UUGUUGCAAAGGGCAUUUUGA | 478 | UCAAAAUGCCCUUUGCAACAAUU | 720-742 |
| AD-62980.2 | 430 | CUCAUUGUUUAUUAACCUGUA | 479 | UACAGGUUAAUAAACAAUGAGAU | 1483-1505 |
| AD-62984.2 | 431 | CAACAAAAUAGCAAUCCCUUU | 480 | AAAGGGAUUGCUAUUUUGUUGGA | 1263-1285 |
| AD-62992.2 | 432 | CAUUGUUUAUUAACCUGUAUU | 481 | AAUACAGGUUAAUAAACAAUGAG | 1485-1507 |
| AD-62996.2 | 433 | UAUCAGCUGGGAAGAUAUCAA | 482 | UUGAUAUCUUCCCAGCUGAUAGA | 670-692 |
| AD-63000.2 | 434 | UGUCCUAGGAACCUUUUAGAA | 483 | UUCUAAAAGGUUCCUAGGACACC | 1313-1335 |
| AD-63004.2 | 435 | UCCAACAAAAUAGCAAUCCCU | 484 | AGGGAUUGCUAUUUUGUUGGAAA | 1261-1283 |
| AD-62977.2 | 436 | GGUGUGCGGAAAGGCACUGAU | 485 | AUCAGUGCCUUUCCGCACACCCC | 899-921 |
| AD-62981.2 | 437 | UUGAAACCAGUACUUUAUCAU | 486 | AUGAUAAAGUACUGGUUUCAAAA | 579-601 |
| AD-62985.2 | 438 | UACUUCCAAAGUCUAUAUAUA | 487 | UAUAUAUAGACUUUGGAAGUACU | 75-97_G21A |
| AD-62989.2 | 439 | UCCUAGGAACCUUUUAGAAAU | 488 | AUUUCUAAAAGGUUCCUAGGACA | 1315-1337_G21U |
| AD-62993.2 | 440 | CUCCUGAGGAAAAUUUUGGAA | 489 | UUCCAAAAUUUUCCUCAGGAGAA | 603-625_G21A |
| AD-62997.2 | 441 | GCUCCGGAAUGUUGCUGAAAU | 490 | AUUUCAGCAACAUUCCGGAGCAU | 181-203_C21U |
| AD-63001.2 | 442 | GUGUUUGUGGGGAGACCAAUA | 491 | UAUUGGUCUCCCCACAAACACAG | 953-975_C21A |
| AD-62951.2 | 492 | AUGGUGGUAAUUUGUGAUUUU | 514 | AAAAUCACAAAUUACCACCAUCC | 1642-1664 |
| AD-62956.2 | 493 | GACUUGCAUCCUGGAAAUAUA | 515 | UAUAUUUCCAGGAUGCAAGUCCA | 1338-1360 |
| AD-62961.2 | 494 | GGAAGGGAAGGUAGAAGUCUU | 516 | AAGACUUCUACCUUCCCUUCCAC | 864-886 |
| AD-62966.2 | 495 | UGUCUUCUGUUUAGAUUUCCU | 517 | AGGAAAUCUAAACAGAAGACAGG | 1506-1528 |
| AD-62971.2 | 496 | CUUUGGCUGUUUCCAAGAUCU | 518 | AGAUCUUGGAAACAGCCAAAGGA | 1109-1131 |
| AD-62936.2 | 497 | AAUGUGUUUGGGCAACGUCAU | 519 | AUGACGUUGCCCAAACACAUUUU | 1385-1407 |
| AD-62942.2 | 498 | UGUGACUGUGGACACCCCUUA | 520 | UAAGGGGUGUCCACAGUCACAAA | 486-508 |
| AD-62947.2 | 499 | GAUGGGGUGCCAGCUACUAUU | 521 | AAUAGUAGCUGGCACCCCAUCCA | 814-836 |
| AD-62952.2 | 500 | GAAAAUGUGUUUGGGCAACGU | 522 | ACGUUGCCCAAACACAUUUUCAA | 1382-1404 |
| AD-62957.2 | 501 | GGCUGUUUCCAAGAUCUGACA | 523 | UGUCAGAUCUUGGAAACAGCCAA | 1113-1135 |
| AD-62962.2 | 502 | UCCAACAAAAUAGCCACCCCU | 524 | AGGGGUGGCUAUUUUGUUGGAAA | 1258-1280 |
| AD-62967.2 | 503 | GUCUUCUGUUUAGAUUUCCUU | 525 | AAGGAAAUCUAAACAGAAGACAG | 1507-1529 |
| AD-62972.2 | 504 | UGGAAGGGAAGGUAGAAGUCU | 526 | AGACUUCUACCUUCCCUUCCACA | 863-885 |
| AD-62937.2 | 505 | UCCUUUGGCUGUUUCCAAGAU | 527 | AUCUUGGAAACAGCCAAAGGAUU | 1107-1129 |
| AD-62943.2 | 506 | CAUCUCUCAGCUGGGAUGAUA | 528 | UAUCAUCCCAGCUGAGAGAUGGG | 662-684 |
| AD-62948.2 | 507 | GGGGUGCCAGCUACUAUUGAU | 529 | AUCAAUAGUAGCUGGCACCCCAU | 817-839 |
| AD-62953.2 | 508 | AUGUGUUUGGGCAACGUCAUA | 530 | UAUGACGUUGCCCAAACACAUUU | 1386-1408_C21A |
| AD-62958.2 | 509 | CUGUUUAGAUUUCCUUAAGAA | 531 | UUCUUAAGGAAAUCUAAACAGAA | 1512-1534_C21A |
| AD-62963.2 | 510 | AGAAAGAAAUGGACUUGCAUA | 532 | UAUGCAAGUCCAUUUCUUUCUAG | 1327-1349_C21A |
| AD-62968.2 | 511 | GCAUCCUGGAAAUAUAUUAAA | 533 | UUUAAUAUAUUUCCAGGAUGCAA | 1343-1365_C21A |
| AD-62973.2 | 512 | CCUGUCAGACCAUGGGAACUA | 534 | UAGUUCCCAUGGUCUGACAGGCU | 308-330_G21A |
| AD-62938.2 | 513 | AAACAUGGUGUGGAUGGGAUA | 535 | UAUCCCAUCCACACCAUGUUUAA | 763-785_C21A |
| AD-62933.1 | 536 | GAAUGUGAAAGUCAUCGACAA | 653 | UUGUCGAUGACUUUCACAUUCUG | 1072-1094 |
| AD-65630.1 | 537 | GAAUGUGAAAGUCAUCGACAA | 654 | UUGUCGAUGACUUUCACAUUCUG | 1072-1094 |
| AD-65636.1 | 538 | GAAUGUGAAAGUCAUCGACAA | 655 | UUGUCGAUGACUUUCACAUUCUG | 1072-1094 |
| AD-65642.1 | 539 | GAAUGUGAAAGUCAUCGACAA | 656 | UUGUCGAUGACUUUCACAUUCUG | 1072-1094 |
| AD-65647.1 | 540 | GAAUGUGAAAGUCAUCGACAA | 657 | UUGUCGAUGACUUUCACAUUCUG | 1072-1094 |
| AD-65652.1 | 541 | GAAUGUGAAAGUCAUCGACAA | 658 | UUGUCGAUGACUUUCACAUUCUG | 1072-1094 |
| AD-65657.1 | 542 | GAAUGUGAAAGUCAUCGACAA | 659 | UUGUCGAUGACUUUCACAUUCUG | 1072-1094 |
| AD-65662.1 | 543 | GAAUGUGAAAGUCAUCGACAA | 660 | UUGUCGAUGACUUUCACAUUCUG | 1072-1094 |
| AD-65625.1 | 544 | AUGUGAAAGUCAUCGACAA | 661 | UUGUCGAUGACUUUCACAUUC | 1072-1094 |
| AD-65631.1 | 545 | AUGUGAAAGUCAUCGACAA | 662 | UUGUCGAUGACUUUCACAUUC | 1072-1094 |
| AD-65637.1 | 546 | GAAUGUGAAAGUCAUCGACAA | 663 | UUGUCGAUGACUUUCACAUUCUG | 1072-1094 |
| AD-65643.1 | 547 | GAAUGUGAAAGUCAUCGACAA | 664 | UUGUCGAUGACUUUCACAUUCUG | 1072-1094 |
| AD-65648.1 | 548 | GAAUGUGAAAGUCAUCGACAA | 665 | UUGUCGAUGACUUUCACAUUCUG | 1072-1094 |
| AD-65653.1 | 549 | GAAUGUGAAAGUCAUCGACAA | 666 | UUGUCGAUGACUUUCACAUUCUG | 1072-1094 |
| AD-65658.1 | 550 | GAAUGUGAAAGUCAUCGACAA | 667 | UUGUCGAUGACUUUCACAUUCUG | 1072-1094 |
| AD-65663.1 | 551 | GAAUGUGAAAGUCAUCGACAA | 668 | UUGUCGAUGACUUUCACAUUCUG | 1072-1094 |
| AD-65626.1 | 552 | GAAUGUGAAAGUCAUCGACAA | 669 | UUGUCGAUGACUUUCACAUUCUG | 1072-1094 |
| AD-65638.1 | 553 | GAAUGUGAAAGUCAUCGACAA | 670 | UUGUCGAUGACUUUCACAUUCUG | 1072-1094 |
| AD-65644.1 | 554 | GAAUGUGAAAGUCAUCGACAA | 671 | UUGUCGAUGACUUUCACAUUCUG | 1072-1094 |
| AD-65649.1 | 555 | GAAUGUGAAAGUCAUCGACAA | 672 | UUGUCGAUGACUUUCACAUUCUG | 1072-1094 |
| AD-65654.1 | 556 | GAAUGUGAAAGUCAUCGACAA | 673 | UUGUCGAUGACUUUCACAUUCUG | 1072-1094 |
| AD-65659.1 | 557 | GAAUGTGAAAGUCAUCGACAA | 674 | UUGUCGAUGACUUUCACAUUCUG | 1072-1094 |
| AD-65627.1 | 558 | GAAUGUGAAAGUCAUCGACAA | 675 | UUGUCGAUGACUUUCACAUUCUG | 1072-1094 |
| AD-65633.1 | 559 | GAAUGTGAAAGUCAUCGACAA | 676 | UUGUCGAUGACUUUCACAUUCUG | 1072-1094 |
| AD-65639.1 | 560 | GAAUGUGAAAGUCAUCGACAA | 677 | UUGUCGAUGACUUUCACAUUCUG | 1072-1094 |
| AD-65645.1 | 561 | GAAUGUGAAAGUCAUCGACAA | 678 | UUGUCGAUGACUUUCACAUUCUG | 1072-1094 |
| AD-65650.1 | 562 | GAAUGUGAAAGUCAUCTACAA | 679 | UUGUCGAUGACUUUCACAUUCUG | 1072-1094 |
| AD-65655.1 | 563 | GAAUGUGAAAGUCAUCACAA | 680 | UUGUCGAUGACUUUCACAUUCUG | 1072-1094 |
| AD-65660.1 | 564 | GAAUGUGAAAGUCATCTACAA | 681 | UUGUCGAUGACUUUCACAUUCUG | 1072-1094 |
| AD-65665.1 | 565 | GAAUGUGAAAGUCAUCGACAA | 682 | UUGUCGAUGACUUUCACAUUCUG | 1072-1094 |
| AD-65628.1 | 566 | GAAUGUGAAAGUCAUCTACAA | 683 | UUGUCGAUGACUUUCACAUUCUG | 1072-1094 |
| AD-65634.1 | 567 | GAAUGUGAAAGUCAUCACAA | 684 | UUGUCGAUGACUUUCACAUUCUG | 1072-1094 |
| AD-65646.1 | 568 | GAAUGUGAAAGUCAUCGACAA | 685 | UTGUCGAUGACUUTCACAUUCUG | 1072-1094 |
| AD-65656.1 | 569 | GAAUGUGAAAGUCAUCGACAA | 686 | UUGUCGAUGACUUTCACAUUCUG | 1072-1094 |
| AD-65661.1 | 570 | GAAUGUGAAAGUCAUCGACAA | 687 | UTGUCGAUGACUUTCACAUUCUG | 1072-1094 |
| AD-65666.1 | 571 | GAAUGUGAAAGUCAUCGACAA | 688 | UUGUCGAUGACUUTCACAUUCUG | 1072-1094 |
| AD-65629.1 | 572 | GAAUGUGAAAGUCAUCGACAA | 689 | UTGUCGAUGACUUTCACAUUCUG | 1072-1094 |
| AD-65635.1 | 573 | GAAUGUGAAAGUCAUCGACAA | 690 | UTGUCGAUGACUUTCACAUUCUG | 1072-1094 |
| AD-65641.1 | 574 | GAAUGUGAAAGUCAUCGACAA | 691 | UTGUCGAUGACUUTCACAUUCUG | 1072-1094 |
| AD-62994.1 | 575 | GACUUUCAUCCUGGAAAUAUA | 692 | UAUAUUUCCAGGAUGAAAGUCCA | 1341-1363 |
| AD-65595.1 | 576 | GACUUUCAUCCUGGAAAUAUA | 693 | UAUAUUUCCAGGAUGAAAGUCCA | 1341-1363 |
| AD-65600.1 | 577 | GACUUUCAUCCUGGAAAUAUA | 694 | UAUAUUUCCAGGAUGAAAGUCCA | 1341-1363 |
| AD-65610.1 | 578 | GACUUUCAUCCUGGAAAUAUA | 695 | UAUAUUUCCAGGAUGAAAGUCCA | 1341-1363 |
| AD-65615.1 | 579 | GACUUUCAUCCUGGAAAUAUA | 696 | UAUAUUUCCAGGAUGAAAGUCCA | 1341-1363 |
| AD-65620.1 | 580 | GACUUUCAUCCUGGAAAUAUA | 697 | UAUAUUUCCAGGAUGAAAGUCCA | 1341-1363 |
| AD-65584.1 | 581 | CUUUCAUCCUGGAAAUAUA | 698 | UAUAUUUCCAGGAUGAAAGUC | 1341-1361 |
| AD-65590.1 | 582 | CUUUCAUCCUGGAAAUAUA | 699 | UAUAUUUCCAGGAUGAAAGUC | 1341-1361 |
| AD-65596.1 | 583 | GACUUUCAUCCUGGAAAUAUA | 700 | UAUAUUUCCAGGAUGAAAGUCCA | 1341-1363 |
| AD-65601.1 | 584 | GACUUUCAUCCUGGAAAUAUA | 701 | UAUAUUUCCAGGAUGAAAGUCCA | 1341-1363 |
| AD-65606.1 | 585 | GACUUUCAUCCUGGAAAUAUA | 702 | UAUAUUUCCAGGAUGAAAGUCCA | 1341-1363 |
| AD-65611.1 | 586 | GACUUUCAUCCUGGAAAUAUA | 703 | UAUAUUUCCAGGAUGAAAGUCCA | 1341-1363 |
| AD-65616.1 | 587 | GACUUUCAUCCUGGAAAUAUA | 704 | UAUAUUUCCAGGAUGAAAGUCCA | 1341-1363 |
| AD-65621.1 | 588 | GACUUUCAUCCUGGAAAUAUA | 705 | UAUAUUUCCAGGAUGAAAGUCCA | 1341-1363 |
| AD-65585.1 | 589 | GACUUUCAUCCUGGAAAUAUA | 706 | UAUAUUUCCAGGAUGAAAGUCCA | 1341-1363 |
| AD-65591.1 | 590 | GACUUUCAUCCUGGAAAUAUA | 707 | UAUAUUUCCAGGAUGAAAGUCCA | 1341-1363 |
| AD-65597.1 | 591 | GACUUUCAUCCUGGAAAUAUA | 708 | UAUAUUUCCAGGAUGAAAGUCCA | 1341-1363 |
| AD-65602.1 | 592 | GACUUUCAUCCUGGAAAUAUA | 709 | UAUAUUUCCAGGAUGAAAGUCCA | 1341-1363 |
| AD-65607.1 | 593 | GACUUUCAUCCUGGAAAUAUA | 710 | UAUAUUUCCAGGAUGAAAGUCCA | 1341-1363 |
| AD-65612.1 | 594 | GACUUUCAUCCUGGAAAUAUA | 711 | UAUAUUUCCAGGAUGAAAGUCCA | 1341-1363 |
| AD-65622.1 | 595 | GACUUUCAUCCUGGAAAUAUA | 712 | UAUAUUUCCAGGAUGAAAGUCCA | 1341-1363 |
| AD-65586.1 | 596 | GACUTUCAUCCUGGAAAUAUA | 713 | UAUAUUUCCAGGAUGAAAGUCCA | 1341-1363 |
| AD-65592.1 | 597 | GACUUTCAUCCUGGAAAUAUA | 714 | UAUAUUUCCAGGAUGAAAGUCCA | 1341-1363 |
| AD-65598.1 | 598 | GACUUUCAUCCUGGAAAUAUA | 715 | UAUAUUUCCAGGAUGAAAGUCCA | 1341-1363 |
| AD-65603.1 | 599 | GACUUUCAUCCUGGAAAUAUA | 716 | UAUAUUUCCAGGAUGAAAGUCCA | 1341-1363 |
| AD-65608.1 | 600 | GACUUUCAUCCUGGAATUAUA | 717 | UAUAUUUCCAGGAUGAAAGUCCA | 1341-1363 |
| AD-65613.1 | 601 | GACUUUCAUCCUGGAAUAUA | 718 | UAUAUUUCCAGGAUGAAAGUCCA | 1341-1363 |
| AD-65618.1 | 602 | GACUUUCAUCCUGGAATUAUA | 719 | UAUAUUUCCAGGAUGAAAGUCCA | 1341-1363 |
| AD-65623.1 | 603 | GACUUUCAUCCUGGAATUAUA | 720 | UAUAUUUCCAGGAUGAAAGUCCA | 1341-1363 |
| AD-65587.1 | 604 | GACUUUCAUCCUGGAAAUAUA | 721 | UAUAUUUCCAGGAUGAAAGUCCA | 1341-1363 |
| AD-65593.1 | 605 | GACUUTCAUCCUGGAAAUAUA | 722 | UAUAUUUCCAGGAUGAAAGUCCA | 1341-1363 |
| AD-65599.1 | 606 | GACUUUCAUCCUGGAAAUAUA | 723 | UAUAUUUCCAGGATGAAAGUCCA | 1341-1363 |
| AD-65604.1 | 607 | GACUUUCAUCCUGGAAAUAUA | 724 | UAUAUUUCCAGGATGAAAGUCCA | 1341-1363 |
| AD-65609.1 | 608 | GACUUUCAUCCUGGAAAUAUA | 725 | UAUAUUUCCAGGATGAAAGUCCA | 1341-1363 |
| AD-65614.1 | 609 | GACUUUCAUCCUGGAAAUAUA | 726 | UAUAUTUCCAGGATGAAAGUCCA | 1341-1363 |
| AD-65619.1 | 610 | GACUUUCAUCCUGGAAAUAUA | 727 | UAUAUTUCCAGGATGAAAGUCCA | 1341-1363 |
| AD-65624.1 | 611 | GACUUUCAUCCUGGAAAUAUA | 728 | UAUAUUUCCAGGATGAAAGUCCA | 1341-1363 |
| AD-65588.1 | 612 | GACUUUCAUCCUGGAAAUAUA | 729 | UAUAUTUCCAGGATGAAAGUCCA | 1341-1363 |
| AD-65594.1 | 613 | GACUUUCAUCCUGGAAAUAUA | 730 | UAUAUUUCCAGGATGAAAGUCCA | 1341-1363 |
| AD-68309.1 | 614 | AGAAAGGUGUUCAAGAUGUCA | 731 | UGACAUCUUGAACACCUUUCUCC | 1001-1022_C21A |
| AD-68303.1 | 615 | CAUCCUGGAAAUAUAUUAACU | 732 | AGUUAAUAUAUUUCCAGGAUGAA | 1349-1370 |
| AD-65626.5 | 616 | GAAUGUGAAAGUCAUCGACAA | 733 | UUGUCGAUGACUUUCACAUUCUG | 1072-1094 |
| AD-68295.1 | 617 | AGUGCACAAUAUUUUCCCAUA | 734 | UAUGGGAAAAUAUUGUGCACUGU | 1139-1160_C21A |
| AD-68273.1 | 618 | GAAAGUCAUCGACAAGACAUU | 735 | AAUGUCUUGUCGAUGACUUUCAC | 1080-1100 |
| AD-68297.1 | 619 | AAUGUGAAAGUCAUCGACAAA | 736 | UUUGUCGAUGACUUUCACAUUCU | 1075-1096_G21A |
| AD-68287.1 | 620 | CUGGAAAUAUAUUAACUGUUA | 737 | UAACAGUUAAUAUAUUUCCAGGA | 1353-1374 |
| AD-68300.1 | 621 | AUUUUCCCAUCUGUAUUAUUU | 738 | AAAUAAUACAGAUGGGAAAAUAU | 1149-1170 |
| AD-68306.1 | 622 | UGUCGUUCUUUUCCAACAAAA | 739 | UUUUGUUGGAAAAGAACGACACC | 1252-1273 |
| AD-68292.1 | 623 | AUCCUGGAAAUAUAUUAACUA | 740 | UAGUUAAUAUAUUUCCAGGAUGA | 1350-1371_G21A |
| AD-68298.1 | 624 | GCAUUUUGAGAGGUGAUGAUA | 741 | UAUCAUCACCUCUCAAAAUGCCC | 734-755_G21A |
| AD-68277.1 | 625 | CAGGGGGAGAAAGGUGUUCAA | 742 | UUGAACACCUUUCUCCCCCUGGA | 994-1014 |
| AD-68289.1 | 626 | GGAAAUAUAUUAACUGUUAAA | 743 | UUUAACAGUUAAUAUAUUUCCAG | 1355-1376 |
| AD-68272.1 | 627 | CAUUGGUGAGGAAAAAUCCUU | 744 | AAGGAUUUUUCCUCACCAAUGUC | 1097-1117 |
| AD-68282.1 | 628 | GGGAGAAAGGUGUUCAAGAUA | 745 | UAUCUUGAACACCUUUCUCCCCC | 998-1018_G21A |
| AD-68285.1 | 629 | GGCAUUUUGAGAGGUGAUGAU | 746 | AUCAUCACCUCUCAAAAUGCCCU | 733-754 |
| AD-68290.1 | 630 | UACAAAGGGUGUCGUUCUUUU | 747 | AAAAGAACGACACCCUUUGUAUU | 1243-1264 |
| AD-68296.1 | 631 | UGGGAUCUUGGUGUCGAAUCA | 748 | UGAUUCGACACCAAGAUCCCAUU | 783-804 |
| AD-68288.1 | 632 | CUGACAGUGCACAAUAUUUUA | 749 | UAAAAUAUUGUGCACUGUCAGAU | 1134-1155_C21A |
| AD-68299.1 | 633 | CAGUGCACAAUAUUUUCCCAU | 750 | AUGGGAAAAUAUUGUGCACUGUC | 1138-1159 |
| AD-68275.1 | 634 | ACUUUUCAAUGGGUGUCCUAA | 751 | UUAGGACACCCAUUGAAAAGUCA | 1302-1322_G21A |
| AD-68274.1 | 635 | ACAUUGGUGAGGAAAAAUCCU | 752 | AGGAUUUUUCCUCACCAAUGUCU | 1096-1116 |
| AD-68294.1 | 636 | UUGCUUUUGACUUUUCAAUGA | 753 | UCAUUGAAAAGUCAAAAGCAAUG | 1293-1314_G21A |
| AD-68302.1 | 637 | CAUUUUGAGAGGUGAUGAUGA | 754 | UCAUCAUCACCUCUCAAAAUGCC | 735-756_C21A |
| AD-68279.1 | 638 | UUGACUUUUCAAUGGGUGUCA | 755 | UGACACCCAUUGAAAAGUCAAAA | 1299-1319_C21A |
| AD-68304.1 | 639 | CGACUUCUGUUUUAGGACAGA | 756 | UCUGUCCUAAAACAGAAGUCGAC | 212-233 |
| AD-68286.1 | 640 | CUCUGAGUGGGUGCCAGAAUA | 757 | UAUUCUGGCACCCACUCAGAGCC | 1058-1079_G21A |
| AD-68291.1 | 641 | GGGUGCCAGAAUGUGAAAGUA | 758 | UACUUUCACAUUCUGGCACCCAC | 1066-1087_C21A |
| AD-68283.1 | 642 | UCAAUGGGUGUCCUAGGAACA | 759 | UGUUCCUAGGACACCCAUUGAAA | 1307-1327_C21A |
| AD-68280.1 | 643 | AAAGUCAUCGACAAGACAUUA | 760 | UAAUGUCUUGUCGAUGACUUUCA | 1081-1101_G21A |
| AD-68293.1 | 644 | AUUUUGAGAGGUGAUGAUGCA | 761 | UGCAUCAUCACCUCUCAAAAUGC | 736-757_C21A |
| AD-68276.1 | 645 | AUCGACAAGACAUUGGUGAGA | 762 | UCUCACCAAUGUCUUGUCGAUGA | 1087-1107_G21A |
| AD-68308.1 | 646 | GGUGCCAGAAUGUGAAAGUCA | 763 | UGACUUUCACAUUCUGGCACCCA | 1067-1088 |
| AD-68278.1 | 647 | GACAGUGCACAAUAUUUUCCA | 764 | UGGAAAAUAUUGUGCACUGUCAG | 1136-1156_C21A |
| AD-68307.1 | 648 | ACAAAGAGACACUGUGCAGAA | 765 | UUCUGCACAGUGUCUCUUUGUCA | 1191-1212_G21A |
| AD-68284.1 | 649 | UUUUCAAUGGGUGUCCUAGGA | 766 | UCCUAGGACACCCAUUGAAAAGU | 1304-1324 |
| AD-68301.1 | 650 | CCGUUUCCAAGAUCUGACAGU | 767 | ACUGUCAGAUCUUGGAAACGGCC | 1121-1142 |
| AD-68281.1 | 651 | AGGGGGAGAAAGGUGUUCAAA | 768 | UUUGAACACCUUUCUCCCCCUGG | 995-1015_G21A |
| AD-68305.1 | 652 | AGUCAUCGACAAGACAUUGGU | 769 | ACCAAUGUCUUGUCGAUGACUUU | 1083-1104 |

### Example 2. In Vitro Single Dose Screen in Primary Monkey Hepatocytes

[0560] The modified and conjugated HAO1 siRNA duplexes were evaluated for efficacy by transfection assays in primary monkey hepatocytes. HAO1 siRNAs were transfected at two doses, 10 nM and 0.1 nM. The results of these assays are shown in Tables 3a and 3b and the data are expressed as a fraction of the message remaining in cells transfected with siRNAs targeting HAO1, relative to cells transfected with a negative control siRNA, AD-1955±the standard deviation (SD).

[0561] The results are also shown in FIG. 3A. FIG. 3B illustrates a dose response with one of the most active conjugates (#31) (AD-62933) from the primary two dose screen; the IC50 was ˜19 μM.

TABLE 3a
HAO1 single dose screen in monkey hepatocytes.

| DUPLEX | | 10 nM | 0.1 nM | SD 10 nM | SD 0.1 nM |
|---|---|---|---|---|---|
| ID | Species | PCH | PCH | PCH | PCH |
| AD-62974 | Hs | 5.3 | 29.8 | 1.87 | 11.11 |
| AD-62975 | Hs | 7.6 | 31.3 | 0.34 | 1.99 |
| AD-62976 | Hs | 4.7 | 35.5 | 0.34 | 13.90 |
| AD-62977 | Hs | 29.2 | 66.9 | 8.32 | 43.88 |
| AD-62978 | Hs | 3.8 | 8.9 | 0.15 | 4.29 |
| AD-62979 | Hs | 27.5 | 80.7 | 1.35 | 19.58 |
| AD-62980 | Hs | 7.4 | 32.2 | 1.26 | 1.42 |
| AD-62981 | Hs | 18.7 | 49.9 | 3.46 | 12.83 |
| AD-62982 | Hs | 2.2 | 8.5 | 0.10 | 7.71 |
| AD-62983 | Hs | 19.4 | 41.0 | 11.19 | 6.60 |
| AD-62984 | Hs | 6.7 | 13.3 | 1.05 | 2.60 |
| AD-62985 | Hs | 2.3 | 8.3 | 0.24 | 2.68 |
| AD-62986 | Hs | 39.0 | 57.2 | 3.82 | 16.31 |
| AD-62987 | Hs | 11.5 | 17.8 | 14.62 | 15.39 |
| AD-62989 | Hs | 10.6 | 34.2 | 2.23 | 2.68 |
| AD-62990 | Hs | 12.0 | 18.4 | 9.11 | 5.23 |
| AD-62991 | Hs | 7.2 | 14.2 | 1.30 | 2.96 |
| AD-62992 | Hs | 3.9 | 16.0 | 1.15 | 1.80 |
| AD-62993 | Hs | 22.3 | 58.4 | 9.91 | 6.28 |
| AD-62994 | Hs | 3.2 | 10.8 | 1.21 | 1.69 |
| AD-62995 | Hs | 5.5 | 17.6 | 4.58 | 3.25 |
| AD-62996 | Hs | 3.4 | 20.7 | 2.16 | 3.73 |
| AD-62997 | Hs | 4.5 | 24.2 | 0.67 | 3.32 |
| AD-62998 | Hs | 4.3 | 14.7 | 0.49 | 0.29 |
| AD-62999 | Hs | 11.4 | 15.5 | 1.23 | 2.50 |
| AD-63000 | Hs | 45.5 | 90.6 | 13.41 | 43.49 |
| AD-63001 | Hs | 13.3 | 31.0 | 0.20 | 2.13 |
| AD-63002 | Hs | 6.6 | 22.0 | 0.26 | 5.75 |
| AD-63003 | Hs | 36.8 | 5.1 | 47.09 | 0.60 |
| AD-63004 | Hs | 12.7 | 35.4 | 1.55 | 9.42 |
| AD-62933 | Hs/Mm | 5.8 | 13.4 | 0.71 | 0.13 |
| AD-62934 | Hs/Mm | 52.2 | 35.9 | 6.64 | 5.08 |
| AD-62935 | Hs/Mm | 7.7 | 22.7 | 1.53 | 4.97 |
| AD-62939 | Hs/Mm | 25.1 | 49.0 | 9.48 | 2.88 |
| AD-62940 | Hs/Mm | 11.9 | 50.4 | 4.12 | 13.91 |
| AD-62941 | Hs/Mm | 9.6 | 30.3 | 7.28 | 3.11 |
| AD-62944 | Hs/Mm | 8.0 | 18.5 | 1.40 | 5.63 |
| AD-62945 | Hs/Mm | 22.9 | 36.5 | 17.16 | 13.81 |
| AD-62946 | Hs/Mm | 19.3 | 29.5 | 15.29 | 1.74 |
| AD-62949 | Hs/Mm | 34.1 | 84.2 | 18.11 | 18.42 |
| AD-62950 | Hs/Mm | 12.7 | 36.2 | 5.69 | 6.54 |
| AD-62954 | Hs/Mm | 46.0 | 53.2 | 37.57 | 10.61 |
| AD-62955 | Hs/Mm | 24.6 | 36.0 | 0.97 | 16.36 |
| AD-62959 | Hs/Mm | 32.3 | 37.4 | 12.49 | 12.08 |
| AD-62960 | Hs/Mm | 18.1 | 37.5 | 2.12 | 3.12 |
| AD-62964 | Hs/Mm | 16.2 | 52.4 | 5.59 | 22.40 |
| AD-62965 | Hs/Mm | 18.5 | 34.5 | 3.77 | 22.38 |
| AD-62969 | Hs/Mm | 11.7 | 34.0 | 0.17 | 12.55 |
| AD-62970 | Hs/Mm | 13.6 | 21.2 | 1.13 | 5.85 |
| AD-62936 | Mm | 91.3 | 55.6 | 16.03 | 0.27 |
| AD-62937 | Mm | 45.8 | 77.7 | 22.77 | 47.01 |
| AD-62938 | Mm | 78.3 | 55.1 | 8.81 | 2.70 |
| AD-62942 | Mm | 18.8 | 21.7 | 7.34 | 8.00 |
| AD-62943 | Mm | 6.7 | 31.0 | 0.79 | 7.22 |
| AD-62947 | Mm | 27.9 | 82.0 | 14.01 | 2.01 |
| AD-62948 | Mm | 21.9 | 52.5 | 6.56 | 21.01 |
| AD-62951 | Mm | 40.1 | 77.4 | 8.76 | 3.03 |
| AD-62952 | Mm | 33.7 | 69.9 | 17.76 | 1.71 |
| AD-62953 | Mm | 79.9 | 65.1 | 96.61 | 22.79 |
| AD-62956 | Mm | 7.6 | 16.4 | 1.01 | 12.39 |
| AD-62957 | Mm | 6.7 | 21.3 | 0.99 | 3.02 |
| AD-62958 | Mm | 38.9 | 54.4 | 21.66 | 29.39 |
| AD-62961 | Mm | 35.3 | 66.0 | 0.35 | 24.65 |
| AD-62962 | Mm | 70.7 | 63.7 | 21.17 | 26.36 |
| AD-62963 | Mm | 35.1 | 66.5 | 35.49 | 9.42 |
| AD-62966 | Mm | 69.0 | 100.3 | 17.07 | 3.44 |
| AD-62967 | Mm | 90.7 | 116.7 | 22.01 | 47.77 |
| AD-62968 | Mm | 46.3 | 72.2 | 28.37 | 67.08 |
| AD-62971 | Mm | 17.9 | 46.3 | 1.23 | 23.41 |
| AD-62972 | Mm | 75.6 | 122.9 | 24.75 | 18.00 |
| AD-62973 | Mm | 102.8 | 73.9 | 22.49 | 14.39 |

TABLE 3b
Additional HAO1 single dose screen in primary monkey hepatocytes.

| DUPLEX | | 10 nM | 0.1 nM | SD 10 nM | SD 0.1 nM |
|---|---|---|---|---|---|
| ID | Species | PCH | PCH | PCH | PCH |
| AD-62974.2 | Hs | 5.3 | 29.8 | 1.87 | 11.11 |
| AD-62975.2 | Hs | 7.6 | 31.3 | 0.34 | 1.99 |
| AD-62976.2 | Hs | 4.7 | 35.5 | 0.34 | 13.90 |
| AD-62977.2 | Hs | 29.2 | 66.9 | 8.32 | 43.88 |
| AD-62978.2 | Hs | 3.8 | 8.9 | 0.15 | 4.29 |
| AD-62979.2 | Hs | 27.5 | 80.7 | 1.35 | 19.58 |
| AD-62980.2 | Hs | 7.4 | 32.2 | 1.26 | 1.42 |
| AD-62981.2 | Hs | 18.7 | 49.9 | 3.46 | 12.83 |
| AD-62982.2 | Hs | 2.2 | 8.5 | 0.10 | 7.71 |
| AD-62983.2 | Hs | 19.4 | 41.0 | 11.19 | 6.60 |
| AD-62984.2 | Hs | 6.7 | 13.3 | 1.05 | 2.60 |
| AD-62985.2 | Hs | 2.3 | 8.3 | 0.24 | 2.68 |
| AD-62986.2 | Hs | 39.0 | 57.2 | 3.82 | 16.31 |
| AD-62987.2 | Hs | 11.5 | 17.8 | 14.62 | 15.39 |
| AD-62989.2 | Hs | 10.6 | 34.2 | 2.23 | 2.68 |
| AD-62990.2 | Hs | 12.0 | 18.4 | 9.11 | 5.23 |
| AD-62991.2 | Hs | 7.2 | 14.2 | 1.30 | 2.96 |
| AD-62992.2 | Hs | 3.9 | 16.0 | 1.15 | 1.80 |
| AD-62993.2 | Hs | 22.3 | 58.4 | 9.91 | 6.28 |
| AD-62994.2 | Hs | 3.2 | 10.8 | 1.21 | 1.69 |
| AD-62995.2 | Hs | 5.5 | 17.6 | 4.58 | 3.25 |
| AD-62996.2 | Hs | 3.4 | 20.7 | 2.16 | 3.73 |
| AD-62997.2 | Hs | 4.5 | 24.2 | 0.67 | 3.32 |
| AD-62998.2 | Hs | 4.3 | 14.7 | 0.49 | 0.29 |
| AD-62999.2 | Hs | 11.4 | 15.5 | 1.23 | 2.50 |
| AD-63000.2 | Hs | 45.5 | 90.6 | 13.41 | 43.49 |
| AD-63001.2 | Hs | 13.3 | 31.0 | 0.20 | 2.13 |
| AD-63002.2 | Hs | 6.6 | 22.0 | 0.26 | 5.75 |
| AD-63003.2 | Hs | 36.8 | 5.1 | 47.09 | 0.60 |
| AD-63004.2 | Hs | 12.7 | 35.4 | 1.55 | 9.42 |
| AD-62933.2 | Hs/Mm | 5.8 | 13.4 | 0.71 | 0.13 |
| AD-62934.2 | Hs/Mm | 52.2 | 35.9 | 6.64 | 5.08 |
| AD-62935.2 | Hs/Mm | 7.7 | 22.7 | 1.53 | 4.97 |
| AD-62939.2 | Hs/Mm | 25.1 | 49.0 | 9.48 | 2.88 |
| AD-62940.2 | Hs/Mm | 11.9 | 50.4 | 4.12 | 13.91 |
| AD-62941.2 | Hs/Mm | 9.6 | 30.3 | 7.28 | 3.11 |
| AD-62944.2 | Hs/Mm | 8.0 | 18.5 | 1.40 | 5.63 |
| AD-62945.2 | Hs/Mm | 22.9 | 36.5 | 17.16 | 13.81 |
| AD-62946.2 | Hs/Mm | 19.3 | 29.5 | 15.29 | 1.74 |
| AD-62949.2 | Hs/Mm | 34.1 | 84.2 | 18.11 | 18.42 |
| AD-62950.2 | Hs/Mm | 12.7 | 36.2 | 5.69 | 6.54 |
| AD-62954.2 | Hs/Mm | 46.0 | 53.2 | 37.57 | 10.61 |
| AD-62955.2 | Hs/Mm | 24.6 | 36.0 | 0.97 | 16.36 |
| AD-62959.2 | Hs/Mm | 32.3 | 37.4 | 12.49 | 12.08 |
| AD-62960.2 | Hs/Mm | 18.1 | 37.5 | 2.12 | 3.12 |
| AD-62964.2 | Hs/Mm | 16.2 | 52.4 | 5.59 | 22.40 |
| AD-62965.2 | Hs/Mm | 18.5 | 34.5 | 3.77 | 22.38 |
| AD-62969.2 | Hs/Mm | 11.7 | 34.0 | 0.17 | 12.55 |
| AD-62970.2 | Hs/Mm | 13.6 | 21.2 | 1.13 | 5.85 |
| AD-62936.2 | Mm | 91.3 | 55.6 | 16.03 | 0.27 |
| AD-62937.2 | Mm | 45.8 | 77.7 | 22.77 | 47.01 |
| AD-62938.2 | Mm | 78.3 | 55.1 | 8.81 | 2.70 |
| AD-62942.2 | Mm | 18.8 | 21.7 | 7.34 | 8.00 |
| AD-62943.2 | Mm | 6.7 | 31.0 | 0.79 | 7.22 |
| AD-62947.2 | Mm | 27.9 | 82.0 | 14.01 | 2.01 |
| AD-62948.2 | Mm | 21.9 | 52.5 | 6.56 | 21.01 |
| AD-62951.2 | Mm | 40.1 | 77.4 | 8.76 | 3.03 |
| AD-62952.2 | Mm | 33.7 | 69.9 | 17.76 | 1.71 |
| AD-62953.2 | Mm | 79.9 | 65.1 | 96.61 | 22.79 |
| AD-62956.2 | Mm | 7.6 | 16.4 | 1.01 | 12.39 |
| AD-62957.2 | Mm | 6.7 | 21.3 | 0.99 | 3.02 |
| AD-62958.2 | Mm | 38.9 | 54.4 | 21.66 | 29.39 |
| AD-62961.2 | Mm | 35.3 | 66.0 | 0.35 | 24.65 |
| AD-62962.2 | Mm | 70.7 | 63.7 | 21.17 | 26.36 |
| AD-62963.2 | Mm | 35.1 | 66.5 | 35.49 | 9.42 |
| AD-62966.2 | Mm | 69.0 | 100.3 | 17.07 | 3.44 |
| AD-62967.2 | Mm | 90.7 | 116.7 | 22.01 | 47.77 |
| AD-62968.2 | Mm | 46.3 | 72.2 | 28.37 | 67.08 |
| AD-62971.2 | Mm | 17.9 | 46.3 | 1.23 | 23.41 |
| AD-62972.2 | Mm | 75.6 | 122.9 | 24.75 | 18.00 |
| AD-62973.2 | Mm | 102.8 | 73.9 | 22.49 | 14.39 |

### Example 3. In Vitro Single Dose Screen in Primary Mouse Hepatocytes

[0562] The modified and conjugated HAO1 siRNA duplexes were evaluated for efficacy by transfection assays in primary mouse hepatocytes. HAO1 siRNAs were transfected at two doses, 20 nM and 0.2 nM. The results of these assays are shown in Tables 4a and 4b and the data are expressed as a fraction of the message remaining in cells transfected with siRNAs targeting HAO1, relative to cells transfected with a negative control siRNA, AD-1955±the standard deviation (SD).

TABLE 4a
HAO1 Single Dose Screen in Primary Mouse Hepatocytes.

| DUPLEX | | 20 nM | 0.2 nM | SD 20 nM | SD 0.2 nM |
|---|---|---|---|---|---|
| ID | Species | PMH | PMH | PMH | PMH |
| AD-62974 | Hs | 1.5 | 11.5 | 0.3 | 8.5 |
| AD-62975 | Hs | 6.2 | 24.5 | 1.9 | 19.4 |
| AD-62976 | Hs | 8.3 | 60.0 | 3.9 | 7.9 |
| AD-62977 | Hs | 69.1 | 106.9 | 44.8 | 18.3 |
| AD-62978 | Hs | 30.0 | 46.3 | 26.0 | 27.3 |
| AD-62979 | Hs | 50.7 | 59.5 | 45.6 | 43.4 |
| AD-62980 | Hs | 65.4 | 89.5 | 68.9 | 29.3 |
| AD-62981 | Hs | 65.8 | 83.3 | 31.9 | 23.7 |
| AD-62982 | Hs | 86.6 | 67.0 | 92.1 | 65.5 |
| AD-62983 | Hs | 81.5 | 103.6 | 61.3 | 68.0 |
| AD-62984 | Hs | 13.5 | 51.8 | 1.2 | 37.7 |
| AD-62985 | Hs | 53.8 | 37.7 | 38.1 | 26.3 |
| AD-62986 | Hs | 138.5 | 153.4 | 140.7 | 119.6 |
| AD-62987 | Hs | 39.0 | 99.6 | 44.9 | 110.7 |
| AD-62989 | Hs | 17.1 | 2.2 | 23.1 | 1.6 |
| AD-62990 | Hs | 4.3 | 46.3 | 4.6 | 46.4 |
| AD-62991 | Hs | 125.2 | 102.6 | 111.9 | 92.9 |
| AD-62992 | Hs | 64.7 | 65.6 | 67.8 | 55.8 |
| AD-62993 | Hs | 83.8 | 79.0 | 63.0 | 22.2 |
| AD-62994 | Hs | 1.9 | 5.4 | 1.5 | 0.2 |
| AD-62995 | Hs | 2.9 | 17.4 | 1.8 | 13.8 |
| AD-62996 | Hs | 49.3 | 61.4 | 43.6 | 49.9 |
| AD-62997 | Hs | 60.2 | 83.4 | 19.1 | 45.7 |
| AD-62998 | Hs | 73.5 | 86.7 | 71.5 | 69.4 |
| AD-62999 | Hs | 38.7 | 50.0 | 29.5 | 22.7 |
| AD-63000 | Hs | 27.3 | 56.6 | 26.1 | 41.4 |
| AD-63001 | Hs | 56.6 | 83.8 | 52.9 | 13.5 |
| AD-63002 | Hs | 81.6 | 74.2 | 67.4 | 70.5 |
| AD-63003 | Hs | 46.4 | 47.7 | 42.4 | 21.4 |
| AD-63004 | Hs | 28.6 | 64.5 | 17.0 | 44.5 |
| AD-62933 | Hs/Mm | 1.1 | 4.6 | 0.5 | 4.0 |
| AD-62934 | Hs/Mm | 7.6 | 43.4 | 0.6 | 32.6 |
| AD-62935 | Hs/Mm | 1.3 | 7.0 | 0.3 | 3.4 |
| AD-62939 | Hs/Mm | 6.1 | 21.4 | 2.2 | 14.5 |
| AD-62940 | Hs/Mm | 6.0 | 16.9 | 1.4 | 3.8 |
| AD-62941 | Hs/Mm | 5.6 | 8.5 | 3.9 | 6.3 |
| AD-62944 | Hs/Mm | 3.3 | 4.3 | 2.9 | 4.5 |
| AD-62945 | Hs/Mm | 6.4 | 7.0 | 1.0 | 7.2 |
| AD-62946 | Hs/Mm | 18.3 | 21.4 | 19.2 | 21.1 |
| AD-62949 | Hs/Mm | 11.4 | 43.7 | 8.9 | 38.3 |
| AD-62950 | Hs/Mm | 9.9 | 21.9 | 4.7 | 20.8 |
| AD-62954 | Hs/Mm | 9.4 | 65.5 | 0.2 | 64.3 |
| AD-62955 | Hs/Mm | 5.8 | 21.8 | 5.5 | 5.8 |
| AD-62959 | Hs/Mm | 4.2 | 9.6 | 1.8 | 5.3 |
| AD-62960 | Hs/Mm | 5.4 | 10.1 | 3.8 | 2.5 |
| AD-62964 | Hs/Mm | 3.7 | 21.2 | 0.9 | 12.7 |
| AD-62965 | Hs/Mm | 8.0 | 20.8 | 5.3 | 23.5 |
| AD-62969 | Hs/Mm | 6.4 | 4.7 | 3.8 | 5.1 |
| AD-62970 | Hs/Mm | 19.6 | 5.2 | 14.6 | 6.1 |
| AD-62936 | Mm | 7.0 | 17.5 | 0.1 | 9.9 |
| AD-62937 | Mm | 4.0 | 16.9 | 0.8 | 10.2 |
| AD-62938 | Mm | 4.0 | 49.1 | 0.7 | 42.4 |
| AD-62942 | Mm | 3.4 | 4.9 | 1.2 | 5.3 |
| AD-62943 | Mm | 3.8 | 14.9 | 2.2 | 10.6 |
| AD-62947 | Mm | 10.9 | 6.4 | 9.6 | 1.6 |
| AD-62948 | Mm | 6.7 | 18.7 | 6.9 | 15.8 |
| AD-62951 | Mm | 8.1 | 11.8 | 8.6 | 14.5 |
| AD-62952 | Mm | 9.4 | 23.2 | 10.1 | 29.2 |
| AD-62953 | Mm | 11.3 | 10.3 | 13.7 | 12.1 |
| AD-62956 | Mm | 2.2 | 3.9 | 1.8 | 1.6 |
| AD-62957 | Mm | 3.2 | 22.5 | 3.1 | 20.0 |
| AD-62958 | Mm | 7.5 | 16.0 | 5.8 | 13.2 |
| AD-62961 | Mm | 4.3 | 6.9 | 2.8 | 5.6 |
| AD-62962 | Mm | 17.1 | 42.4 | 14.2 | 49.5 |
| AD-62963 | Mm | 2.3 | 10.8 | 0.6 | 8.3 |
| AD-62966 | Mm | 5.7 | 11.6 | 5.8 | 5.6 |
| AD-62967 | Mm | 3.8 | 21.7 | 2.0 | 23.0 |
| AD-62968 | Mm | 3.5 | 9.4 | 0.3 | 9.0 |
| AD-62971 | Mm | 4.6 | 3.1 | 5.0 | 2.7 |
| AD-62972 | Mm | 13.8 | 22.7 | 17.0 | 24.9 |
| AD-62973 | Mm | 19.3 | 51.9 | 19.7 | 21.9 |

TABLE 4b
Additional HAO1 Single Dose Screen
in Primary Mouse Hepatocytes.

| | | | 20 | 0.2 | SD | SD |
|---|---|---|---|---|---|---|
| | | Sense | nM | nM | 20 nM | 0.2 nM |
| DUPLEX ID | Species | OligoName | PMH | PMH | PMH | PMH |
| AD-62974.2 | Hs | A-126176.1 | 1.5 | 11.5 | 0.3 | 8.5 |
| AD-62975.2 | Hs | A-126192.1 | 6.2 | 24.5 | 1.9 | 19.4 |
| AD-62976.2 | Hs | A-126208.1 | 8.3 | 60.0 | 3.9 | 7.9 |
| AD-62977.2 | Hs | A-126224.1 | 69.1 | 106.9 | 44.8 | 18.3 |
| AD-62978.2 | Hs | A-126178.1 | 30.0 | 46.3 | 26.0 | 27.3 |
| AD-62979.2 | Hs | A-126194.1 | 50.7 | 59.5 | 45.6 | 43.4 |
| AD-62980.2 | Hs | A-126210.1 | 65.4 | 89.5 | 68.9 | 29.3 |
| AD-62981.2 | Hs | A-126226.1 | 65.8 | 83.3 | 31.9 | 23.7 |
| AD-62982.2 | Hs | A-126180.1 | 86.6 | 67.0 | 92.1 | 65.5 |
| AD-62983.2 | Hs | A-126196.1 | 81.5 | 103.6 | 61.3 | 68.0 |
| AD-62984.2 | Hs | A-126212.1 | 13.5 | 51.8 | 1.2 | 37.7 |
| AD-62985.2 | Hs | A-126228.1 | 53.8 | 37.7 | 38.1 | 26.3 |
| AD-62986.2 | Hs | A-126182.1 | 138.5 | 153.4 | 140.7 | 119.6 |
| AD-62987.2 | Hs | A-126198.1 | 39.0 | 99.6 | 44.9 | 110.7 |
| AD-62989.2 | Hs | A-126230.1 | 17.1 | 2.2 | 23.1 | 1.6 |
| AD-62990.2 | Hs | A-126184.1 | 4.3 | 46.3 | 4.6 | 46.4 |
| AD-62991.2 | Hs | A-126200.1 | 125.2 | 102.6 | 111.9 | 92.9 |
| AD-62992.2 | Hs | A-126216.1 | 64.7 | 65.6 | 67.8 | 55.8 |
| AD-62993.2 | Hs | A-126232.1 | 83.8 | 79.0 | 63.0 | 22.2 |
| AD-62994.2 | Hs | A-126186.1 | 1.9 | 5.4 | 1.5 | 0.2 |
| AD-62995.2 | Hs | A-126202.1 | 2.9 | 17.4 | 1.8 | 13.8 |
| AD-62996.2 | Hs | A-126218.1 | 49.3 | 61.4 | 43.6 | 49.9 |
| AD-62997.2 | Hs | A-126234.1 | 60.2 | 83.4 | 19.1 | 45.7 |
| AD-62998.2 | Hs | A-126188.1 | 73.5 | 86.7 | 71.5 | 69.4 |
| AD-62999.2 | Hs | A-126204.1 | 38.7 | 50.0 | 29.5 | 22.7 |
| AD-63000.2 | Hs | A-126220.1 | 27.3 | 56.6 | 26.1 | 41.4 |
| AD-63001.2 | Hs | A-126236.1 | 56.6 | 83.8 | 52.9 | 13.5 |
| AD-63002.2 | Hs | A-126190.1 | 81.6 | 74.2 | 67.4 | 70.5 |
| AD-63003.2 | Hs | A-126206.1 | 46.4 | 47.7 | 42.4 | 21.4 |
| AD-63004.2 | Hs | A-126222.1 | 28.6 | 64.5 | 17.0 | 44.5 |
| AD-62933.2 | Hs/Mm | A-126094.1 | 1.1 | 4.6 | 0.5 | 4.0 |
| AD-62934.2 | Hs/Mm | A-126110.1 | 7.6 | 43.4 | 0.6 | 32.6 |
| AD-62935.2 | Hs/Mm | A-126126.1 | 1.3 | 7.0 | 0.3 | 3.4 |
| AD-62939.2 | Hs/Mm | A-126096.1 | 6.1 | 21.4 | 2.2 | 14.5 |
| AD-62940.2 | Hs/Mm | A-126112.1 | 6.0 | 16.9 | 1.4 | 3.8 |
| AD-62941.2 | Hs/Mm | A-126128.1 | 5.6 | 8.5 | 3.9 | 6.3 |
| AD-62944.2 | Hs/Mm | A-126098.1 | 3.3 | 4.3 | 2.9 | 4.5 |
| AD-62945.2 | Hs/Mm | A-126114.1 | 6.4 | 7.0 | 1.0 | 7.2 |
| AD-62946.2 | Hs/Mm | A-126130.1 | 18.3 | 21.4 | 19.2 | 21.1 |
| AD-62949.2 | Hs/Mm | A-126100.1 | 11.4 | 43.7 | 8.9 | 38.3 |
| AD-62950.2 | Hs/Mm | A-126116.1 | 9.9 | 21.9 | 4.7 | 20.8 |
| AD-62954.2 | Hs/Mm | A-126102.1 | 9.4 | 65.5 | 0.2 | 64.3 |
| AD-62955.2 | Hs/Mm | A-126118.1 | 5.8 | 21.8 | 5.5 | 5.8 |
| AD-62959.2 | Hs/Mm | A-126104.1 | 4.2 | 9.6 | 1.8 | 5.3 |
| AD-62960.2 | Hs/Mm | A-126120.1 | 5.4 | 10.1 | 3.8 | 2.5 |
| AD-62964.2 | Hs/Mm | A-126106.1 | 3.7 | 21.2 | 0.9 | 12.7 |
| AD-62965.2 | Hs/Mm | A-126122.1 | 8.0 | 20.8 | 5.3 | 23.5 |
| AD-62969.2 | Hs/Mm | A-126108.1 | 6.4 | 4.7 | 3.8 | 5.1 |
| AD-62970.2 | Hs/Mm | A-126124.1 | 19.6 | 5.2 | 14.6 | 6.1 |
| AD-62936.2 | Mm | A-126142.1 | 7.0 | 17.5 | 0.1 | 9.9 |
| AD-62937.2 | Mm | A-126158.1 | 4.0 | 16.9 | 0.8 | 10.2 |
| AD-62938.2 | Mm | A-126174.1 | 4.0 | 49.1 | 0.7 | 42.4 |
| AD-62942.2 | Mm | A-126144.1 | 3.4 | 4.9 | 1.2 | 5.3 |
| AD-62943.2 | Mm | A-126160.1 | 3.8 | 14.9 | 2.2 | 10.6 |
| AD-62947.2 | Mm | A-126146.1 | 10.9 | 6.4 | 9.6 | 1.6 |
| AD-62948.2 | Mm | A-126162.1 | 6.7 | 18.7 | 6.9 | 15.8 |
| AD-62951.2 | Mm | A-126132.1 | 8.1 | 11.8 | 8.6 | 14.5 |
| AD-62952.2 | Mm | A-126148.1 | 9.4 | 23.2 | 10.1 | 29.2 |
| AD-62953.2 | Mm | A-126164.1 | 11.3 | 10.3 | 13.7 | 12.1 |
| AD-62956.2 | Mm | A-126134.1 | 2.2 | 3.9 | 1.8 | 1.6 |
| AD-62957.2 | Mm | A-126150.1 | 3.2 | 22.5 | 3.1 | 20.0 |
| AD-62958.2 | Mm | A-126166.1 | 7.5 | 16.0 | 5.8 | 13.2 |
| AD-62961.2 | Mm | A-126136.1 | 4.3 | 6.9 | 2.8 | 5.6 |
| AD-62962.2 | Mm | A-126152.1 | 17.1 | 42.4 | 14.2 | 49.5 |
| AD-62963.2 | Mm | A-126168.1 | 2.3 | 10.8 | 0.6 | 8.3 |
| AD-62966.2 | Mm | A-126138.1 | 5.7 | 11.6 | 5.8 | 5.6 |
| AD-62967.2 | Mm | A-126154.1 | 3.8 | 21.7 | 2.0 | 23.0 |
| AD-62968.2 | Mm | A-126170.1 | 3.5 | 9.4 | 0.3 | 9.0 |
| AD-62971.2 | Mm | A-126140.1 | 4.6 | 3.1 | 5.0 | 2.7 |
| AD-62972.2 | Mm | A-126156.1 | 13.8 | 22.7 | 17.0 | 24.9 |
| AD-62973.2 | Mm | A-126172.1 | 19.3 | 51.9 | 19.7 | 21.9 |

### Example 4. Dose Response Screen in Primary Monkey Hepatocytes

[0563] The IC50s of modified and conjugated HAO1 siRNA duplexes were determined in primary mouse hepatocytes. HAO1 siRNAs were transfected over a range of doses from 10 nM to 36 fM final duplex concentration over 8, 6-fold dilutions. The results of these assays are shown in Tables 5a and

TABLE 5a
HAO1 Dose Response Screen in Primary Mouse Hepatocytes.

| DUPLEX ID | Species | IC₅₀ PCH (nM) |
|---|---|---|
| AD-62984 | Hs | 0.017 |
| AD-62994 | Hs | 0.029 |
| AD-62989 | Hs | 0.175 |
| AD-62974 | Hs | 0.288 |
| AD-62975 | Hs | 0.399 |
| AD-62933 | Hs/Mm | 0.019 |
| AD-62944 | Hs/Mm | 0.027 |
| AD-62935 | Hs/Mm | 0.137 |
| AD-62965 | Hs/Mm | 0.155 |
| AD-62941 | Hs/Mm | 0.245 |
| AD-62940 | Hs/Mm | 0.927 |

TABLE 5b
Additional HAO1 Dose Response Screen in Primary Mouse Hepatocytes.

| DUPLEX ID | Species | IC₅₀ PCH (nM) |
|---|---|---|
| AD-62984.2 | Hs | 0.017 |
| AD-62994.2 | Hs | 0.029 |
| AD-62989.2 | Hs | 0.175 |
| AD-62974.2 | Hs | 0.288 |
| AD-62975.2 | Hs | 0.399 |
| AD-62933.2 | Hs/Mm | 0.019 |
| AD-62944.2 | Hs/Mm | 0.027 |
| AD-62935.2 | Hs/Mm | 0.137 |
| AD-62965.2 | Hs/Mm | 0.155 |
| AD-62941.2 | Hs/Mm | 0.245 |
| AD-62940.2 | Hs/Mm | 0.927 |

### Example 5. Dose Response Screen in Primary Mouse Hepatocytes

[0564] The IC50s of modified and conjugated HAO1 siRNA duplexes were determined in primary mouse hepatocytes and primary monkey hepatocytes. HAO1 siRNAs were transfected over a range of doses from 10 nM to 36 fM final duplex concentration over 8, 6-fold dilutions. The results of these assays are shown in Tables 6a, 6b, 7, and 8.

TABLE 6a
HAO1 Dose Response Screen in Primary Mouse Hepatocytes.

| DUPLEX ID | Species | IC₅₀ PMH (nM) |
|---|---|---|
| AD-62989 | Hs | 0.003 |
| AD-62994 | Hs | 0.006 |
| AD-62975 | Hs | 0.059 |
| AD-62974 | Hs | 0.122 |
| AD-62984 | Hs | 0.264 |
| AD-62944 | Hs/Mm | 0.002 |
| AD-62935 | Hs/Mm | 0.007 |
| AD-62965 | Hs/Mm | 0.008 |
| AD-62933 | Hs/Mm | 0.008 |
| AD-62941 | Hs/Mm | 0.087 |
| AD-62940 | Hs/Mm | 0.090 |

TABLE 6b
Additional HAO1 Dose Response Screen in Primary Mouse Hepatocytes.

| DUPLEX ID | Species | IC₅₀ PMH (nM) |
|---|---|---|
| AD-62989.2 | Hs | 0.003 |
| AD-62994.2 | Hs | 0.006 |
| AD-62975.2 | Hs | 0.059 |
| AD-62974.2 | Hs | 0.122 |
| AD-62984.2 | Hs | 0.264 |
| AD-62944.2 | Hs/Mm | 0.002 |
| AD-62935.2 | Hs/Mm | 0.007 |
| AD-62965.2 | Hs/Mm | 0.008 |
| AD-62933.2 | Hs/Mm | 0.008 |
| AD-62941.2 | Hs/Mm | 0.087 |
| AD-62940.2 | Hs/Mm | 0.090 |

TABLE 7
Additional HAO1 Single Dose Screen in Primary Cyno and Mouse Hepatocytes

| | | | SD | SD | | | SD | SD |
|---|---|---|---|---|---|---|---|---|
| | 10 nM | 0.1 nM | 10 nM | 0.1 nM | 10 nM | 0.1 nM | 10 nM | 0.1 nM |
| Duplex ID | PCH | PCH | PCH | PCH | PMH | PMH | PMH | PMH |
| AD-62933.1 | 26.1 | 22.8 | 17.0 | 6.0 | 9.0 | 26.3 | 6.0 | 7.6 |
| AD-65584.1 | 12.9 | 28.0 | 5.1 | 6.0 | 3.8 | 12.3 | 0.7 | 7.3 |
| AD-65585.1 | 9.8 | 21.0 | 4.1 | 1.0 | 6.8 | 11.6 | 4.5 | 5.7 |
| AD-65586.1 | 24.3 | 24.2 | 10.9 | 2.7 | 16.7 | 19.0 | 5.1 | 1.8 |
| AD-65587.1 | 24.7 | 31.7 | 10.2 | 21.9 | 13.6 | 27.1 | 5.7 | 10.3 |
| AD-65588.1 | 39.2 | 33.0 | 35.6 | 5.6 | 27.1 | 33.5 | 11.0 | 8.3 |
| AD-65590.1 | 5.6 | 15.4 | 0.4 | 6.6 | 4.2 | 8.7 | 1.1 | 0.5 |
| AD-65591.1 | 13.9 | 20.4 | 5.0 | 4.9 | 7.6 | 18.4 | 0.1 | 2.9 |
| AD-65592.1 | 15.6 | 24.3 | 7.4 | 3.7 | 10.1 | 24.5 | 3.1 | 1.0 |
| AD-65593.1 | 30.8 | 37.5 | 4.4 | 8.7 | 38.4 | 41.3 | 5.2 | 10.4 |
| AD-65594.1 | 18.0 | 21.8 | 5.6 | 2.6 | 24.7 | 25.3 | 0.5 | 7.6 |
| AD-65595.1 | 19.9 | 31.9 | 0.1 | 11.3 | 9.1 | 12.2 | 5.0 | 5.7 |
| AD-65596.1 | 12.3 | 19.2 | 0.6 | 1.6 | 10.0 | 19.9 | 1.0 | 1.9 |
| AD-65597.1 | 10.2 | 34.8 | 2.8 | 10.1 | 22.8 | 32.0 | 6.2 | 5.7 |
| AD-65598.1 | 14.4 | 21.2 | 3.2 | 8.6 | 10.8 | 22.0 | 2.6 | 8.8 |
| AD-65599.1 | 15.0 | 28.3 | 2.5 | 21.3 | 18.0 | 25.4 | 1.7 | 8.3 |
| AD-65600.1 | 11.8 | 13.7 | 5.6 | 0.3 | 6.4 | 14.5 | 5.7 | 6.8 |
| AD-65601.1 | 15.4 | 20.5 | 0.5 | 1.6 | 5.5 | 17.2 | 0.3 | 3.9 |
| AD-65602.1 | 12.9 | 23.3 | 0.8 | 12.0 | 11.0 | 25.4 | 2.6 | 2.6 |
| AD-65603.1 | 33.8 | 41.0 | 2.2 | 6.8 | 37.4 | 58.6 | 3.0 | 10.5 |
| AD-65604.1 | 10.4 | 18.7 | 1.3 | 2.3 | 12.9 | 24.5 | 0.9 | 9.2 |
| AD-65606.1 | 14.3 | 12.3 | 0.2 | 3.1 | 4.8 | 14.0 | 2.0 | 4.2 |
| AD-65607.1 | 9.2 | 18.5 | 2.1 | 3.6 | 14.4 | 32.8 | 1.9 | 1.6 |
| AD-65608.1 | 36.6 | 31.1 | 7.9 | 11.6 | 27.5 | 29.8 | 8.5 | 4.6 |
| AD-65609.1 | 14.2 | 19.8 | 5.1 | 0.8 | 14.6 | 23.6 | 5.3 | 1.5 |
| AD-65610.1 | 59.1 | 59.6 | 15.0 | 13.3 | 35.0 | 70.9 | 10.0 | 0.1 |
| AD-65611.1 | 12.9 | 14.2 | 5.4 | 1.8 | 4.5 | 17.3 | 0.6 | 2.2 |
| AD-65612.1 | 19.3 | 20.5 | 1.5 | 9.0 | 16.2 | 23.3 | 3.8 | 1.7 |
| AD-65613.1 | 20.0 | 19.3 | 5.7 | 0.7 | 11.0 | 23.9 | 1.0 | 5.4 |
| AD-65614.1 | 12.4 | 27.1 | 2.2 | 0.5 | 14.2 | 16.7 | 3.8 | 11.9 |
| AD-65615.1 | 53.1 | 60.3 | 1.4 | 7.7 | 48.2 | 80.9 | 9.9 | 39.4 |
| AD-65616.1 | 21.7 | 12.5 | 17.8 | 5.5 | 5.3 | 13.3 | 0.5 | 7.2 |
| AD-65618.1 | 19.4 | 67.6 | 3.4 | 35.9 | 16.7 | 21.6 | 4.2 | 4.8 |
| AD-65619.1 | 17.0 | 27.2 | 0.5 | 12.4 | 12.5 | 26.3 | 3.2 | 2.3 |
| AD-65620.1 | 58.0 | 70.5 | 21.8 | 2.8 | 37.9 | 54.8 | 0.4 | 12.7 |
| AD-65621.1 | 12.3 | 17.5 | 4.6 | 2.3 | 3.8 | 11.3 | 1.3 | 0.3 |
| AD-65622.1 | 17.7 | 20.4 | 6.1 | 0.9 | 10.8 | 13.9 | 6.3 | 3.1 |
| AD-65623.1 | 44.4 | 32.9 | 7.9 | NA | 37.7 | 20.6 | 28.5 | 0.9 |
| AD-65624.1 | 13.0 | 23.3 | 5.0 | 9.8 | 9.2 | 7.9 | 2.8 | 0.4 |
| AD-65625.1 | 9.8 | 13.3 | 0.6 | 1.5 | 10.0 | 19.2 | 4.6 | 1.6 |
| AD-65626.1 | 7.7 | 15.0 | 1.1 | 4.9 | 8.6 | 14.7 | 3.6 | 2.4 |
| AD-65627.1 | 18.8 | 24.8 | 7.8 | 1.8 | 19.7 | 18.5 | 8.1 | 12.0 |
| AD-65628.1 | 27.3 | 31.7 | 4.9 | 3.9 | 29.7 | 43.4 | 6.4 | 19.6 |
| AD-65629.1 | 12.8 | 20.8 | 1.0 | 8.1 | 18.9 | 23.2 | 3.2 | 13.9 |
| AD-65630.1 | 7.2 | 14.0 | 0.3 | 5.3 | 6.1 | 8.5 | 1.3 | 2.1 |
| AD-65631.1 | 6.7 | 17.2 | 0.7 | 5.7 | 12.0 | 23.1 | 4.0 | 0.9 |
| AD-65633.1 | 13.8 | 28.6 | 3.4 | 5.4 | 17.0 | 26.2 | 1.2 | 3.9 |
| AD-65634.1 | 12.2 | 23.6 | 6.6 | 1.2 | 21.6 | 35.2 | 1.4 | 8.2 |
| AD-65635.1 | 11.7 | 27.7 | 5.7 | 4.7 | 18.5 | 38.4 | 2.5 | 6.5 |
| AD-65636.1 | 13.1 | 29.4 | 0.6 | 12.9 | 21.3 | 35.6 | 3.1 | 13.1 |
| AD-65637.1 | 16.0 | 22.8 | 5.1 | 9.6 | 8.3 | 18.5 | 0.6 | 0.4 |
| AD-65638.1 | 11.5 | 15.9 | 4.3 | 2.1 | 20.8 | 31.8 | 3.5 | 3.2 |
| AD-65639.1 | 14.6 | 28.3 | 7.4 | 5.5 | 18.6 | 35.2 | 0.2 | 0.3 |
| AD-65641.1 | 32.3 | 49.3 | 3.4 | 8.9 | 29.1 | 34.0 | 4.8 | 8.8 |
| AD-65642.1 | 10.4 | 23.0 | 0.1 | 4.7 | 10.1 | 21.3 | 1.0 | 6.5 |
| AD-65643.1 | 12.6 | 13.7 | 0.3 | 2.5 | 5.3 | 20.6 | 1.8 | 6.8 |
| AD-65644.1 | 8.1 | 13.5 | 0.1 | 0.3 | 16.4 | 24.1 | 3.4 | 4.2 |
| AD-65645.1 | 69.5 | 88.7 | 6.3 | 26.6 | 81.8 | 75.5 | 13.6 | 5.8 |
| AD-65646.1 | 8.9 | 47.0 | 0.9 | 15.6 | 26.5 | 37.7 | 3.7 | 4.7 |
| AD-65647.1 | 11.0 | 14.0 | 2.9 | 0.3 | 16.6 | 23.7 | 2.6 | 0.7 |
| AD-65648.1 | 7.3 | 25.4 | 3.3 | 2.9 | 5.9 | 13.9 | 2.1 | 0.9 |
| AD-65649.1 | 11.6 | 23.0 | 1.9 | 3.4 | 20.7 | 29.8 | 2.1 | 3.6 |
| AD-65650.1 | 27.9 | 40.6 | 13.1 | 14.0 | 27.6 | 30.6 | 9.7 | 6.8 |
| AD-65652.1 | 73.4 | 72.2 | 5.2 | 1.8 | 47.6 | 59.7 | 7.5 | 21.4 |
| AD-65653.1 | 9.6 | 32.4 | 2.7 | 4.7 | 5.9 | 24.3 | 0.0 | 6.7 |
| AD-65654.1 | 41.6 | 45.5 | 10.4 | 11.7 | 22.8 | 35.7 | 2.9 | 3.1 |
| AD-65655.1 | 19.2 | 18.3 | 0.1 | 4.8 | 17.8 | 18.8 | 3.8 | 3.9 |
| AD-65656.1 | 10.8 | 16.1 | 4.7 | 3.1 | 6.2 | 13.8 | 1.6 | 1.8 |
| AD-65657.1 | 107.8 | 114.5 | 8.7 | 6.7 | 36.3 | 51.2 | 1.6 | 14.1 |
| AD-65658.1 | 9.6 | 13.5 | 0.7 | 1.3 | 4.8 | 11.7 | 0.2 | 3.3 |
| AD-65659.1 | 17.5 | 39.8 | 1.1 | 1.4 | 13.0 | 24.6 | 3.5 | 3.3 |
| AD-65660.1 | 21.5 | 33.1 | 5.4 | 1.6 | 14.6 | 29.0 | 0.5 | 4.1 |
| AD-65661.1 | 13.9 | 40.1 | 2.2 | 12.8 | 13.2 | 27.3 | 6.8 | 7.1 |
| AD-65662.1 | 111.2 | 242.2 | 29.9 | 179.6 | 42.5 | 47.9 | 4.6 | 1.6 |
| AD-65663.1 | 11.5 | 28.2 | 3.8 | NA | 5.5 | 7.6 | 1.4 | 0.1 |
| AD-65665.1 | 104.8 | 141.7 | 13.0 | 26.9 | 39.4 | 44.2 | 13.1 | 5.3 |
| AD-65666.1 | 14.4 | 28.1 | 6.9 | 1.8 | 3.8 | 12.7 | 0.3 | 4.8 |

TABLE 8
Additional Single Dose Screen in Primary Cyno Hepatocytes.

| | 10 nM | 10 nM | 0.1 nM | 0.1 nM |
|---|---|---|---|---|
| Duplex | PCH | PCH SD | PCH | PCH SD |
| AD-65626.5 | 7.1 | 0.7 | 23.5 | 3.7 |
| AD-68272.1 | 10.1 | 1.9 | 39.5 | 10.3 |
| AD-68273.1 | 6.8 | 2.2 | 29.7 | 10.1 |
| AD-68274.1 | 15.7 | 4.7 | 49.4 | 12.1 |
| AD-68275.1 | 15.5 | 2.7 | 47.4 | 10.4 |
| AD-68276.1 | 22.3 | 8.1 | 83.0 | 21.7 |
| AD-68277.1 | 14.2 | 1.1 | 25.2 | 7.9 |
| AD-68278.1 | 18.6 | 3.2 | 97.5 | 25.4 |
| AD-68279.1 | 14.7 | 3.8 | 62.5 | 19.6 |
| AD-68280.1 | 24.9 | 2.6 | 54.7 | 8.1 |
| AD-68281.1 | 38.3 | 18.6 | 70.7 | 8.8 |
| AD-68282.1 | 11.3 | 3.1 | 35.9 | 3.6 |
| AD-68283.1 | 14.4 | 3.6 | 79.9 | 26.5 |
| AD-68284.1 | 25.1 | 4.7 | 82.3 | 8.2 |
| AD-68285.1 | 10.4 | 1.3 | 39.3 | 10.3 |
| AD-68286.1 | 14.7 | 4.5 | 71.9 | 18.3 |
| AD-68287.1 | 8.0 | 2.3 | 28.4 | 3.5 |
| AD-68288.1 | 14.8 | 3.5 | 31.7 | 6.3 |
| AD-68289.1 | 11.8 | 2.5 | 30.8 | 3.5 |
| AD-68290.1 | 11.5 | 4.9 | 40.3 | 8.4 |
| AD-68291.1 | 15.8 | 6.3 | 69.9 | 6.6 |
| AD-68292.1 | 9.8 | 3.0 | 37.3 | 20.7 |
| AD-68293.1 | 20.2 | 6.1 | 85.2 | 20.8 |
| AD-68294.1 | 12.9 | 5.0 | 68.7 | 21.6 |
| AD-68295.1 | 7.5 | 1.4 | 22.6 | 3.9 |
| AD-68296.1 | 8.5 | 1.1 | 51.3 | 7.0 |
| AD-68297.1 | 8.2 | 2.4 | 27.4 | 4.0 |
| AD-68298.1 | 10.1 | 2.8 | 35.6 | 10.4 |
| AD-68299.1 | 11.8 | 2.4 | 47.7 | 16.2 |
| AD-68300.1 | 7.2 | 1.7 | 33.8 | 4.6 |
| AD-68301.1 | 34.2 | 14.3 | 78.3 | 25.8 |
| AD-68302.1 | 15.6 | 5.8 | 57.1 | 10.0 |
| AD-68303.1 | 7.0 | 2.0 | 23.9 | 4.5 |
| AD-68304.1 | 14.8 | 2.4 | 64.2 | 12.1 |
| AD-68305.1 | 25.3 | 3.8 | 106.5 | 23.8 |
| AD-68306.1 | 12.4 | 2.0 | 19.8 | 1.8 |
| AD-68307.1 | 22.2 | 8.9 | 93.1 | 22.6 |
| AD-68308.1 | 22.2 | 4.0 | 79.6 | 7.8 |
| AD-68309.1 | 8.0 | 2.7 | 19.9 | 3.7 |

### Example 6. In Vivo Evaluation of GO-GalNac Conjugates in C571B6 Mice

[0565] GO-GalNAc conjugates were dosed subcutaneously in C571B6 mice at 10, 5, 2.5, or 1.25 mg/kg and mRNA knockdown in liver was evaluated after 72 hours post dose using qPCR. The single dose ED50s were approximately 1.25 and 2.5 mg/kg for compound A (AD-62994) and compound B (AD-62933) respectively. In repeat dose studies conjugates were dosed subcutaneously weekly (QW) for 4 weeks and liver GO mRNA levels were evaluated at 72 hours post the 4th dose. The repeat dose ED50s were ˜0.3 mg/kg for both compounds. The results are shown in FIG. 4.

### Example 7. In Vivo Evaluation of GO Knockdown and Impact on Oxalate Levels in AGXT KO Mice

[0566] A GO siRNA (AD-40257) in a lipid nanoparticle (LNP) was dosed intravenously in AGXT KO mice (Salido et al (2006) PNAS 103:18249) at 1 mg/kg. Urinary oxalate or glycolate levels were measured on day 15 using ion chromatography/mass spectroscopy. The results are shown in FIG. 5. Data is expressed relative to pre dose values and was normalized to creatinine (Cr) to control for urine diluteness. N=4 mice per group and error bars represent standard deviation.

### Example 8. In Vivo Evaluation of GO-GalNac Conjugates in a Rat AGXT Knockdown Model

[0567] To generate a rat PH1 model, an AGXT siRNA (AD-63102) in an LNP (AF-011-63102) was dosed at 1 mg/kg intravenously to female Sprague Dawley rats on day 1 and day 7 to maintain knockdown of AGXT in rat liver and 1% Ethylene Glycol was added to the drinking water to further stimulate oxalate production. On day 0 and day 7 some rats were also dosed with a GO GalNAc-siRNA (AD-62994) conjugate or PBS control. The results are shown in FIG. 6. FIG. 6A shows quantitation of liver AGXT mRNA levels 72 hours after a single 1 mg/kg dose of AGXT siRNA in an LNP. In FIG. 6B, levels of urinary oxalate were quantified from 24 hour urines collected from day −1 to 0, day 3 to 4, day 5 to 6, and day 7 to 8. Data was normalized to creatinine to control for the diluteness of the urine. N=3 for AGXT groups and N=2 for PBS control group. In FIG. 6C, these same rats (as in FIG. 6B) were followed out to 49 days with continued weekly dosing on days 14 and 21 of both AF-011-63102 and AD-62994 and 24 hour urine collections as shown. Ethylene glycol remained in the drinking water until day 28. In FIG. 6D, duration of HAO1 knockdown in rats is shown by measuring mRNA levels either one week or four weeks after the last of 4 doses (corresponding to days 28 and 49 in FIG. 6C) and expressed relative to levels seen in rats treated with PBS. Error bars represent standard deviation throughout.

TABLE 9

| duplexName | target | Sense Name |
|---|---|---|
| AD-40257.1 | HAO1 | NM_017545.2_1306-1324_s |
| AD-40257.2 | HAO1 | NM_017545.2_1306-1324_s |
| AD-63102.1 | AGXT | NM_016702.3_1109-1127_s |
| AD-63102.2 | AGXT | NM_016702.3_1109-1127_s |
| AD-63102.3 | AGXT | NM_016702.3_1109-1127_s |

TABLE 10

| | Modified | Unmodified | SEQ |
|---|---|---|---|
| Duplex | sense strand | sense strand | ID |
| Name | sequence | sequence | NO: |
| AD-40257.1 | uucAAuGGGuGu | UUCAAUGGGU | 770 & |
| | ccuAGGAdTsdT | GUCCUAGGA | 771 |
| AD-40257.2 | uucAAuGGGuGu | UUCAAUGGGU | 770 & |
| | ccuAGGAdTsdT | GUCCUAGGA | 771 |
| AD-63102.1 | AcAAcuGGAGGG | ACAACUGGAG | 772 & |
| | AcAucGudTsdT | GGACAUCGU | 773 |
| AD-63102.2 | AcAAcuGGAGGG | ACAACUGGAG | 772 & |
| | AcAucGudTsdT | GGACAUCGU | 773 |
| AD-63102.3 | AcAAcuGGAGGG | ACAACUGGAG | 772 & |
| | AcAucGudTsdT | GGACAUCGU | 773 |

TABLE 11

| | Modified | Unmodified | |
|---|---|---|---|
| | antisense | antisense | SEQ |
| Duplex | strand | strand | ID |
| Name | sequence | sequence | NO: |
| AD- | UCCuAGGAcACC | UCCUAGGACA | 774 & |
| 40257.1 | cAUUGAAdTsdT | CCCAUUGAA | 775 |
| AD- | UCCuAGGAcACC | UCCUAGGACA | 774 & |
| 40257.2 | cAUUGAAdTsdT | CCCAUUGAA | 775 |
| AD- | ACGAUGUCCCUC | ACGAUGUCCC | 776 & |
| 63102.1 | cAGUUGUdTsdT | UCCAGUUGU | 777 |
| AD- | ACGAUGUCCCUC | ACGAUGUCCC | 776 & |
| 63102.2 | cAGUUGUdTsdT | UCCAGUUGU | 777 |
| AD- | ACGAUGUCCCUC | ACGAUGUCCC | 776 & |
| 63102.3 | cAGUUGUdTsdT | UCCAGUUGU | 777 |

### Example 9: In Vivo Evaluation of GO-GalNac Conjugates

[0568] Female C57BL/6 Mice, aged 6-8 weeks, were administered a single subcutaneous dose of the GO siRNA-GalNac conjugates in Table 12. The mice were sacrificed after 72 hours and the liver was assayed for HAO mRNA by bDNA analysis. The results are shown in FIG. 13.

TABLE 12
GO (HAO) siRNA-GalNac conjugates.

| | | SEQ |
|---|---|---|
| Duplex | Modified sense | ID |
| Name | strand sequence | NO: |
| AD-62989.2 | UfscsCfuAfgGfaAfCfC | 778 |
| | fuUfuUfaGfaAfaUfL96 | |
| AD-62994.2 | GfsasCfuUfuCfaUfCfC | 779 |
| | fuGfgAfaAfuAfuAfL96 | |
| AD-62933.2 | GfsasAfuGfuGfaAfAfG | 780 |
| | fuCfaUfcGfaCfaAfL96 | |
| AD-62935.2 | CfsasUfuGfgUfgAfGfG | 781 |
| | faAfaAfaUfcCfuUfL96 | |
| AD-62940.2 | AfsusCfgAfcAfaGfAfC | 782 |
| | faUfuGfgUfgAfgAfL96 | |
| AD-62941.2 | AfscsAfuUfgGfuGfAfG | 783 |
| | fgAfaAfaAfuCfcUfL96 | |
| AD-62944.2 | GfsasAfaGfuCfaUfCfG | 784 |
| | faCfaAfgAfcAfuUfL96 | |
| AD-62965.2 | AfsasAfgUfcAfuCfGfA | 785 |
| | fcAfaGfaCfaUfuAfL96 | |

TABLE 13

| | Modified | SEQ |
|---|---|---|
| Duplex | antisense | ID |
| Name | strand | NO: |
| AD-62989.2 | asUfsuUfcUfaAfaAfg | 786 |
| | guUfcCfuAfgGfascsa | |
| AD-62994.2 | usAfsuAfuUfuCfcAfg | 787 |
| | gaUfgAfaAfgUfcscsa | |
| AD-62933.2 | usUfsgUfcGfaUfgAfc | 788 |
| | uuUfcAfcAfuUfcsusg | |
| AD-62935.2 | asAfsgGfaUfuUfuUfc | 789 |
| | cuCfaCfcAfaUfgsusc | |
| AD-62940.2 | usCfsuCfaCfcAfaUfg | 790 |
| | ucUfuGfuCfgAfusgsa | |
| AD-62941.2 | asGfsgAfuUfuUfuCfc | 791 |
| | ucAfcCfaAfuGfuscsu | |
| AD-62944.2 | asAfsuGfuCfuUfgUfc | 792 |
| | gaUfgAfcUfuUfcsasc | |
| AD-62965.2 | usAfsaUfgUfcUfuGfu | 793 |
| | cgAfuGfaCfuUfuscsa | |

TABLE 14

| Duplex | | Guinea | | |
|---|---|---|---|---|
| Name | Crossreactivity | Pig? | MM to mouse | MM to GP |
| AD-62989.2 | Hs | yes | pos8 | |
| AD-62994.2 | Hs | no | pos16 | pos2, 12, 16 |
| AD-62933.2 | Hs/Mm | yes | | |
| AD-62935.2 | Hs/Mm | yes | | |
| AD-62940.2 | Hs/Mm | yes | | |
| AD-62941.2 | Hs/Mm | yes | | |
| AD-62944.2 | Hs/Mm | yes | | |
| AD-62965.2 | Hs/Mm | yes | | |

### Example 10: In Vivo Evaluation of GO-GalNAc Conjugates in Mice

[0569] Female C57 BL/6 mice were administered a single subcutaneous 3 mg/Kg dose of the a number of GO siRNA-GalNAc conjugates described herein or PBS control. Mice were sacrificed after 72 hours and HAO1 mRNA knockdown in liver was evaluated using qPCR. The results are shown in FIG. 14, expressed relative to the PBS control.

### Example 11: Dose-Response Evaluation of GO-GalNAc Conjugates in Mice

[0570] Female C57 BL/6 mice were administered a single subcutaneous dose of either 1 or 3 mg/Kg of one of the GO siRNA-GalNAc conjugates compound A (AD-62994), compound B (AD-62933), compound C (AD-65644), compound D (AD-65626), compound E (AD-65590), compound F (AD-65585) or PBS control. Ten days later mice were sacrificed and HAO1 mRNA knockdown in liver was evaluated using qPCR. In repeat dose studies, compounds C, D, F or PBS control were dosed subcutaneously weekly (QW) for 4 weeks and liver HAO1 mRNA levels were evaluated 10 days after the last dose. The results of single-dose are shown in FIG. 15 and repeat-dose experiments are shown in FIG. 16, expressed relative to the PBS control. These data showed improved potency for compounds AD-65644 and AD-65626 relative to AD-62933 and for compounds AD-65590 and AD-65585 relative to AD-62994.

### Example 12: Dose-Response Evaluation of Compound D in Mice

[0571] Female C57 BL/6 mice were administered a single subcutaneous dose of 0.1, 0.3, 1, 3, or 10 mg/Kg of AD-65626 or PBS control. Ten days later mice were sacrificed and HAO1 mRNA knockdown in liver was evaluated using qPCR with results expressed relative to the PBS control as shown in FIG. 17. These results demonstrate a greater than 3-fold improvement in potency compared to compound AD-62933.

### Example 13: Relationship of mRNA Knockdown to Serum Glycolate Levels in Mice

[0572] Female C57 BL/6 mice were administered a single subcutaneous dose of 0.1, 0.3, 1, 3, or 10 mg/Kg of AD-65585 or PBS control. Ten days later mice were sacrificed and HAO1 mRNA knockdown in liver was evaluated using qPCR, with results expressed relative to the PBS control. Glycolate levels in serum samples from these same mice were quantified using ion chromatography coupled to mass spectrometry as previously described (Knight et al., Anal. Biochem. 2012 Feb. 1; 421(1): 121-124). The results for these experiments are shown in FIG. 18.

[0573] These results demonstrate that AD-65585 is as potent as AD-65626, both having a single-dose ED50 of ˜0.3 mg/kg in WT mice. Additionally, HAO1 mRNA silencing results in dose-responsive serum glycolate increases of up to 4-fold (approximately 200 uM) at the highest two doses.

### Example 14: Relationship of mRNA Knockdown to Serum Glycolate Levels in Rats

[0574] Male Sprague Dawley rats were administered a single subcutaneous dose of 1, 3, or 10 mg/Kg of AD-65626 or PBS control. Fourteen days later rats were sacrificed and HAO1 mRNA knockdown in liver was evaluated using qPCR, with results expressed relative to the PBS control. Glycolate levels in serum samples from these same rats collected both prior to dosing and at day 14 were quantified using ion chromatography coupled to mass spectrometry, again as described (Knight et al., Anal. Biochem. 2012 Feb. 1; 421(1): 121-124). The results for these experiments are shown in FIG. 19.

[0575] As observed in wild-type mice, these results demonstrate that HAO1 mRNA silencing in Sprague Dawley rats results in dose-responsive serum glycolate increases of up to 12-fold (approximately 140 μM) at the highest dose.

### Example 15: Pharmacology Studies with ALN-65585

[0576] HAO1 Inhibition in Hepatocytes.

[0577] Primary cyno hepatocytes were transfected with RNAimax (Invitrogen) with serially diluted AD-65585 (ALN-65585, “ALN-GO1”) or a non-targeting mRNA Luciferase control (AD1955) at 10 nM. Relative levels of HAO1 mRNA were determined by normalizing to GAPDH mRNA levels as quantified by real-time RT-PCR. The data was plotted to calculate the IC50 value of 10 pM. The results are shown FIG. 20.

[0578] In vitro transfection of AD-65585 demonstrates an ED50 of approximately 10 pM in primary cynomolgus hepatocytes.

[0579] Single Dose Pharmacology in Mouse

[0580] ALN-GO1 pharmacology was evaluated in mice by quantifying liver HAO1 mRNA and serum glycolate levels (FIG. 21). A single SC dose of ALN-GO1 resulted in a dose dependent suppression of HAO1 mRNA with a dose of 10 mg/kg resulting in ED90 silencing. The ED50 dose for GO1 silencing in the mouse was estimated to be 0.3 mg/kg. Serum glycolate levels increased in a dose-responsive manner with a maximum level approximately 4-fold above baseline levels. The results are shown in FIG. 21, illustrating levels of liver HAO1 mRNA and serum glycolate 10 days after a single subcutaneous dose of ALN-65585 in C57BL/6 mice. Bars represent the mean of 3 or 4 animals and error bars depict the standard deviation.

[0581] Single Dose Duration in Mouse

[0582] GO1 silencing was durable and reversible post a single SC dose (FIG. 22). A single SC dose of ALN-GO1 in mice at 3 mg/kg resulted in ≥70% mRNA silencing for approximately 6 weeks, after which mRNA levels recovered to baseline levels through 12 weeks post-dose. The results are shown in FIG. 22: Levels of liver HAO1 mRNA at multiple time points following a single subcutaneous dose of ALN-65585 in C57BL/6 mice. Each data point represents the mean of 3 animals and error bars depict the standard deviation.

[0583] Single Dose Pharmacology in Rat

[0584] ALN-GO1 pharmacology was also evaluated in rats by quantifying liver HAO1 mRNA levels (FIG. 23). A single SC administration of ALN-GO1 to male Sprague Dawley rats resulted in a dose dependent suppression of HAO1 mRNA with a dose of ≥3 mg/kg resulting in ED90 silencing. The results are shown in FIG. 23: Levels of liver HAO1 mRNA 10 days after a single subcutaneous dose of ALN-65585 in Sprague Dawley rats. Bars represent the mean of 3 animals and error bars depict the standard deviation. The ED50 dose for GO1 silencing in the rat was estimated to be 0.3 mg/kg.

[0585] Single Dose Pharmacology in AGXT KO Mouse

[0586] The impact of ALN-GO1 on oxalate levels was evaluated in an AGXT KO mouse model of PHI. The results are shown in FIG. 24: 24 hr urinary oxalate (top) and glycolate (bottom) excretion of Agxt KO mice after a single subcutaneous dose of ALN-65585. Different letters means significant difference between the 3 dose groups at each specific week (n=3 per dose). Urinary excretions over time did not change significantly in the PBS control animal (n=1).

[0587] Urinary oxalate levels showed dose-dependent reductions after a single dose of ALN-GO1 with a maximum of approximately 50% oxalate lowering at the 3 mg/kg dose that lasted for ≥3 weeks before recovery to pre-dose levels. Urinary glycolate levels showed dose-dependent increases after a single dose of ALN-GO1 with a maximum of approximately 5-fold increases at the 3 mg/kg dose that lasted for ≥4 weeks.

[0588] Single Dose Pharmacology in PH1 Induced Rat Model

[0589] ALN-GO1 was evaluated in a second PH1 rodent model where liver AGXT was inhibited in rats using siRNA and oxalate levels were stimulated with ethylene glycol (FIG. 25A and FIG. 25B). Liver HAO1 mRNA and 24-hour urinary oxalate were quantified to determine the degree of HAO1 lowering required for maximal oxalate reduction. The results are shown in FIG. 25A and FIG. 25B: Levels of liver HAO1 mRNA a rat induced model of PH1 14 days after a single subcutaneous dose of ALN-65585 and weekly dosing of AF-011-AGXT siRNA (2 doses, of 1 mg/kg). 24 hr urinary oxalate normalized to urinary creatinine. Bars represent the mean of 3 animals and error bars depict the standard deviation. mRNA and oxalate lowering correlation plot represents individual animals from multiple experiments.

[0590] A single dose of ALN-GO1 in this model demonstrated dose-responsive mRNA and urinary oxalate lowering with approximately 85% maximum mRNA reduction and approximately 90% maximum urinary oxalate reduction observed at the highest dose of ALN-GO1 (FIG. 25A and FIG. 25B). In this induced rat model of PH1, mRNA and urinary oxalate reductions resulted in a 1:1 correlation.

[0591] Multi-Dose Pharmacology in PH1 Induced Rat Model

[0592] Potency of ALN-GO1 was evaluated in studies in normal rats with inhibited AGXT activity and ethylene glycol (an induced model of PH1) by quantifying liver HAO1 mRNA and 24-hour urinary oxalate. The results are shown in FIG. 26: Levels of liver HAO1 mRNA a rat induced model of PH1 28 days after repeat subcutaneous dosing of ALN-65585 and repeat IV dosing of AF-011-AGXT siRNA (4 doses, of 1 mg/kg). 24 hr urinary oxalate normalized to urinary creatinine. Bars represent the mean of 2 or 3 animals and error bars depict the standard deviation.

[0593] Treatment with ALN-GO1 resulted in sustained urinary oxalate reductions in all treatment groups for approximately 3 weeks. On day 28 after repeat dosing of ALN-GO1 (and four doses of AF-011-AGXT) all groups showed >95% mRNA reduction >85% urinary oxalate lowering.

[0594] Multi-Dose Pharmacology in NHP

[0595] ALN-GO1 pharmacology was evaluated in cynomolgus monkeys (non-human primate (NHP)) by quantifying HAO1 mRNA in liver biopsy, and serum glycolate levels. The following table shows the NHP Pharmacology study outline detailing dose level and dose regimen.

| Group # | Test Article | Dose level (mg/kg) | Dose frequency |
|---|---|---|---|
| 1 | PBS | Na | QM × 6 |
| 2 | AD-65585 | 0.25 | QM × 8 |
| 3 | AD-65585 | 1 | QM × 8 |
| 4 | AD-65585 | 1 | QM × 6 |
| 5 | AD-65585 | 2 | QM × 6 |
| 6 | AD-65585 | 4 | QM × 6 |
| 7 | AD-65585 | 2 -> 1 | QM × 4 -> QM × 5 |

[0596] The results are shown in FIG. 27. NHP serum glycolate levels for all groups out to day 85, data represents group averages of 3 animals per group, lines represent standard deviation. Liver biopsy HAO1 mRNA on Day 29, lines represent group averages, symbols represent individual animal mRNA levels relative to PBS control on Day 29.

[0597] After the first month of dosing (day 29), dose-responsive mRNA silencing was observed in all groups, with up to 99% mRNA silencing in groups 6 and 7 dosed with 4 mg/kg monthly or 2 mg/kg weekly. Maximum elevated serum glycolate levels of approximately 70 M were maintained for at least 3 weeks in group 6 dosed with 4 mg/kg monthly.

### Example 16: Additional siRNA Sequences

[0598] Additional siRNA design was carried out to identify siRNAs targeting HAO1 NM_017545.2.

TABLE 15

| Unmodified sequence | SEQ | Modified sequence | SEQ | Strand | Length |
|---|---|---|---|---|---|
| AUGUAUGUUACUUCUUAGAGA | 794 | asusguauGfuUfAfCfuucuuagagaL96 | 1890 | sense | 21 |
| UCUCUAAGAAGUAACAUACAUCC | 795 | usCfsucuAfaGfAfaguaAfcAfuacauscsc | 1891 | antis | 23 |
| UGUAUGUUACUUCUUAGAGAG | 796 | usgsuaugUfuAfCfUfucuuagagagL96 | 1892 | sense | 21 |
| CUCUCUAAGAAGUAACAUACAUC | 797 | csUfscucUfaAfGfaaguAfaCfauacasusc | 1893 | antis | 23 |
| UAGGAUGUAUGUUACUUCUUA | 798 | usasggauGfuAfUfGfuuacuucuuaL96 | 1894 | sense | 21 |
| UAAGAAGUAACAUACAUCCUAAA | 799 | usAfsagaAfgUfAfacauAfcAfuccuasasa | 1895 | antis | 23 |
| UUAGGAUGUAUGUUACUUCUU | 800 | ususaggaUfgUfAfUfguuacuucuuL96 | 1896 | sense | 21 |
| AAGAAGUAACAUACAUCCUAAAA | 801 | asAfsgaaGfuAfAfcauaCfaUfccuaasasa | 1897 | antis | 23 |
| AGAAAGGUGUUCAAGAUGUCC | 802 | asgsaaagGfuGfUfUfcaagauguccL96 | 1898 | sense | 21 |
| GGACAUCUUGAACACCUUUCUCC | 803 | gsGfsacaUfcUfUfgaacAfcCfuuucuscsc | 1899 | antis | 23 |
| GAAAGGUGUUCAAGAUGUCCU | 804 | gsasaaggUfgUfUfCfaagauguccuL96 | 1900 | sense | 21 |
| AGGACAUCUUGAACACCUUUCUC | 805 | asGfsgacAfuCfUfugaaCfaCfcuuucsusc | 1901 | antis | 23 |
| GGGGAGAAAGGUGUUCAAGAU | 806 | gsgsggagAfaAfGfGfuguucaagauL96 | 1902 | sense | 21 |
| AUCUUGAACACCUUUCUCCCCCU | 807 | asUfscuuGfaAfCfaccuUfuCfuccccscsu | 1903 | antis | 23 |
| GGGGGAGAAAGGUGUUCAAGA | 808 | gsgsgggaGfaAfAfGfguguucaagaL96 | 1904 | sense | 21 |
| UCUUGAACACCUUUCUCCCCCUG | 809 | usCfsuugAfaCfAfccuuUfcUfcccccsusg | 1905 | antis | 23 |
| AGAAACUUUGGCUGAUAAUAU | 810 | asgsaaacUfuUfGfGfcugauaauauL96 | 1906 | sense | 21 |
| AUAUUAUCAGCCAAAGUUUCUUC | 811 | asUfsauuAfuCfAfgccaAfaGfuuucususc | 1907 | antis | 23 |
| GAAACUUUGGCUGAUAAUAUU | 812 | gsasaacuUfuGfGfCfugauaauauuL96 | 1908 | sense | 21 |
| AAUAUUAUCAGCCAAAGUUUCUU | 813 | asAfsuauUfaUfCfagccAfaAfguuucsusu | 1909 | antis | 23 |
| AUGAAGAAACUUUGGCUGAUA | 814 | asusgaagAfaAfCfUfuuggcugauaL96 | 1910 | sense | 21 |
| UAUCAGCCAAAGUUUCUUCAUCA | 815 | usAfsucaGfcCfAfaaguUfuCfuucauscsa | 1911 | antis | 23 |
| GAUGAAGAAACUUUGGCUGAU | 816 | gsasugaaGfaAfAfCfuuuggcugauL96 | 1912 | sense | 21 |
| AUCAGCCAAAGUUUCUUCAUCAU | 817 | asUfscagCfcAfAfaguuUfcUfucaucsasu | 1913 | antis | 23 |
| AAGGCACUGAUGUUCUGAAAG | 818 | asasggcaCfuGfAfUfguucugaaagL96 | 1914 | sense | 21 |
| CUUUCAGAACAUCAGUGCCUUUC | 819 | csUfsuucAfgAfAfcaucAfgUfgccuususc | 1915 | antis | 23 |
| AGGCACUGAUGUUCUGAAAGC | 820 | asgsgcacUfgAfUfGfuucugaaagcL96 | 1916 | sense | 21 |
| GCUUUCAGAACAUCAGUGCCUUU | 821 | gsCfsuuuCfaGfAfacauCfaGfugccususu | 1917 | antis | 23 |
| CGGAAAGGCACUGAUGUUCUG | 822 | csgsgaaaGfgCfAfCfugauguucugL96 | 1918 | sense | 21 |
| CAGAACAUCAGUGCCUUUCCGCA | 823 | csAfsgaaCfaUfCfagugCfcUfuuccgscsa | 1919 | antis | 23 |
| GCGGAAAGGCACUGAUGUUCU | 824 | gscsggaaAfgGfCfAfcugauguucuL96 | 1920 | sense | 21 |
| AGAACAUCAGUGCCUUUCCGCAC | 825 | asGfsaacAfuCfAfgugcCfuUfuccgcsasc | 1921 | antis | 23 |
| AGAAGACUGACAUCAUUGCCA | 826 | asgsaagaCfuGfAfCfaucauugccaL96 | 1922 | sense | 21 |
| UGGCAAUGAUGUCAGUCUUCUCA | 827 | usGfsgcaAfuGfAfugucAfgUfcuucuscsa | 1923 | antis | 23 |
| GAAGACUGACAUCAUUGCCAA | 828 | gsasagacUfgAfCfAfucauugccaaL96 | 1924 | sense | 21 |
| UUGGCAAUGAUGUCAGUCUUCUC | 829 | usUfsggcAfaUfGfauguCfaGfucuucsusc | 1925 | antis | 23 |
| GCUGAGAAGACUGACAUCAUU | 830 | gscsugagAfaGfAfCfugacaucauuL96 | 1926 | sense | 21 |
| AAUGAUGUCAGUCUUCUCAGCCA | 831 | asAfsugaUfgUfCfagucUfuCfucagescsa | 1927 | antis | 23 |
| GGCUGAGAAGACUGACAUCAU | 832 | gsgscugaGfaAfGfAfcugacaucauL96 | 1928 | sense | 21 |
| AUGAUGUCAGUCUUCUCAGCCAU | 833 | asUfsgauGfuCfAfgucuUfcUfcagccsasu | 1929 | antis | 23 |
| UAAUGCCUGAUUCACAACUUU | 834 | usasaugcCfuGfAfUfucacaacuuuL96 | 1930 | sense | 21 |
| AAAGUUGUGAAUCAGGCAUUACC | 835 | asAfsaguUfgUfGfaaucAfgGfcauuascsc | 1931 | antis | 23 |
| AAUGCCUGAUUCACAACUUUG | 836 | asasugccUfgAfUfUfcacaacuuugL96 | 1932 | sense | 21 |
| CAAAGUUGUGAAUCAGGCAUUAC | 837 | csAfsaagUfuGfUfgaauCfaGfgcauusasc | 1933 | antis | 23 |
| UUGGUAAUGCCUGAUUCACAA | 838 | ususgguaAfuGfCfCfugauucacaaL96 | 1934 | sense | 21 |
| UUGUGAAUCAGGCAUUACCAACA | 839 | usUfsgugAfaUfCfaggcAfuUfaccaascsa | 1935 | antis | 23 |
| GUUGGUAAUGCCUGAUUCACA | 840 | gsusugguAfaUfGfCfcugauucacaL96 | 1936 | sense | 21 |
| UGUGAAUCAGGCAUUACCAACAC | 841 | usGfsugaAfuCfAfggcaUfuAfccaacsasc | 1937 | antis | 23 |
| UAUCAAAUGGCUGAGAAGACU | 842 | usasucaaAfuGfGfCfugagaagacuL96 | 1938 | sense | 21 |
| AGUCUUCUCAGCCAUUUGAUAUC | 843 | asGfsucuUfcUfCfagccAfuUfugauasusc | 1939 | antis | 23 |
| AUCAAAUGGCUGAGAAGACUG | 844 | asuscaaaUfgGfCfUfgagaagacugL96 | 1940 | sense | 21 |
| CAGUCUUCUCAGCCAUUUGAUAU | 845 | csAfsgucUfuCfUfcagcCfaUfuugausasu | 1941 | antis | 23 |
| AAGAUAUCAAAUGGCUGAGAA | 846 | asasgauaUfcAfAfAfuggcugagaaL96 | 1942 | sense | 21 |
| UUCUCAGCCAUUUGAUAUCUUCC | 847 | usUfscucAfgCfCfauuuGfaUfaucuuscsc | 1943 | antis | 23 |
| GAAGAUAUCAAAUGGCUGAGA | 848 | gsasagauAfuCfAfAfauggcugagaL96 | 1944 | sense | 21 |
| UCUCAGCCAUUUGAUAUCUUCCC | 849 | usCfsucaGfcCfAfuuugAfuAfucuucscsc | 1945 | antis | 23 |
| UCUGACAGUGCACAAUAUUUU | 850 | uscsugacAfgUfGfCfacaauauuuuL96 | 1946 | sense | 21 |
| AAAAUAUUGUGCACUGUCAGAUC | 851 | asAfsaauAfuUfGfugcaCfuGfucagasusc | 1947 | antis | 23 |
| CUGACAGUGCACAAUAUUUUC | 852 | csusgacaGfuGfCfAfcaauauuuucL96 | 1948 | sense | 21 |
| GAAAAUAUUGUGCACUGUCAGAU | 853 | gsAfsaaaUfaUfUfgugcAfcUfgucagsasu | 1949 | antis | 23 |
| AAGAUCUGACAGUGCACAAUA | 854 | asasgaucUfgAfCfAfgugcacaauaL96 | 1950 | sense | 21 |
| UAUUGUGCACUGUCAGAUCUUGG | 855 | usAfsuugUfgCfAfcuguCfaGfaucuusgsg | 1951 | antis | 23 |
| CAAGAUCUGACAGUGCACAAU | 856 | csasagauCfuGfAfCfagugcacaauL96 | 1952 | sense | 21 |
| AUUGUGCACUGUCAGAUCUUGGA | 857 | asUfsuguGfcAfCfugucAfgAfucuugsgsa | 1953 | antis | 23 |
| ACUGAUGUUCUGAAAGCUCUG | 858 | ascsugauGfuUfCfUfgaaagcucugL96 | 1954 | sense | 21 |
| CAGAGCUUUCAGAACAUCAGUGC | 859 | csAfsgagCfuUfUfcagaAfcAfucagusgsc | 1955 | antis | 23 |
| CUGAUGUUCUGAAAGCUCUGG | 860 | csusgaugUfuCfUfGfaaagcucuggL96 | 1956 | sense | 21 |
| CCAGAGCUUUCAGAACAUCAGUG | 861 | csCfsagaGfcUfUfucagAfaCfaucagsusg | 1957 | antis | 23 |
| AGGCACUGAUGUUCUGAAAGC | 862 | asgsgcacUfgAfUfGfuucugaaagcL96 | 1958 | sense | 21 |
| GCUUUCAGAACAUCAGUGCCUUU | 863 | gsCfsuuuCfaGfAfacauCfaGfugccususu | 1959 | antis | 23 |
| AAGGCACUGAUGUUCUGAAAG | 864 | asasggcaCfuGfAfUfguucugaaagL96 | 1960 | sense | 21 |
| CUUUCAGAACAUCAGUGCCUUUC | 865 | csUfsuucAfgAfAfcaucAfgUfgccuususc | 1961 | antis | 23 |
| AACAACAUGCUAAAUCAGUAC | 866 | asascaacAfuGfCfUfaaaucaguacL96 | 1962 | sense | 21 |
| GUACUGAUUUAGCAUGUUGUUCA | 867 | gsUfsacuGfaUfUfuagcAfuGfuuguuscsa | 1963 | antis | 23 |
| ACAACAUGCUAAAUCAGUACU | 868 | ascsaacaUfgCfUfAfaaucaguacuL96 | 1964 | sense | 21 |
| AGUACUGAUUUAGCAUGUUGUUC | 869 | asGfsuacUfgAfUfuuagCfaUfguugususc | 1965 | antis | 23 |
| UAUGAACAACAUGCUAAAUCA | 870 | usasugaaCfaAfCfAfugcuaaaucaL96 | 1966 | sense | 21 |
| UGAUUUAGCAUGUUGUUCAUAAU | 871 | usGfsauuUfaGfCfauguUfgUfucauasasu | 1967 | antis | 23 |
| UUAUGAACAACAUGCUAAAUC | 872 | ususaugaAfcAfAfCfaugcuaaaucL96 | 1968 | sense | 21 |
| GAUUUAGCAUGUUGUUCAUAAUC | 873 | gsAfsuuuAfgCfAfuguuGfuUfcauaasusc | 1969 | antis | 23 |
| UCUUUAGUGUCUGAAUAUAUC | 874 | uscsuuuaGfuGfUfCfugaauauaucL96 | 1970 | sense | 21 |
| GAUAUAUUCAGACACUAAAGAUG | 875 | gsAfsuauAfuUfCfagacAfcUfaaagasusg | 1971 | antis | 23 |
| CUUUAGUGUCUGAAUAUAUCC | 876 | csusuuagUfgUfCfUfgaauauauccL96 | 1972 | sense | 21 |
| GGAUAUAUUCAGACACUAAAGAU | 877 | gsGfsauaUfaUfUfcagaCfaCfuaaagsasu | 1973 | antis | 23 |
| CACAUCUUUAGUGUCUGAAUA | 878 | csascaucUfuUfAfGfugucugaauaL96 | 1974 | sense | 21 |
| UAUUCAGACACUAAAGAUGUGAU | 879 | usAfsuucAfgAfCfacuaAfaGfaugugsasu | 1975 | antis | 23 |
| UCACAUCUUUAGUGUCUGAAU | 880 | uscsacauCfuUfUfAfgugucugaauL96 | 1976 | sense | 21 |
| AUUCAGACACUAAAGAUGUGAUU | 881 | asUfsucaGfaCfAfcuaaAfgAfugugasusu | 1977 | antis | 23 |
| UGAUACUUCUUUGAAUGUAGA | 882 | usgsauacUfuCfUfUfugaauguagaL96 | 1978 | sense | 21 |
| UCUACAUUCAAAGAAGUAUCACC | 883 | usCfsuacAfuUfCfaaagAfaGfuaucascsc | 1979 | antis | 23 |
| GAUACUUCUUUGAAUGUAGAU | 884 | gsasuacuUfcUfUfUfgaauguagauL96 | 1980 | sense | 21 |
| AUCUACAUUCAAAGAAGUAUCAC | 885 | asUfscuaCfaUfUfcaaaGfaAfguaucsasc | 1981 | antis | 23 |
| UUGGUGAUACUUCUUUGAAUG | 886 | ususggugAfuAfCfUfucuuugaaugL96 | 1982 | sense | 21 |
| CAUUCAAAGAAGUAUCACCAAUU | 887 | csAfsuucAfaAfGfaaguAfuCfaccaasusu | 1983 | antis | 23 |
| AUUGGUGAUACUUCUUUGAAU | 888 | asusugguGfaUfAfCfuucuuugaauL96 | 1984 | sense | 21 |
| AUUCAAAGAAGUAUCACCAAUUA | 889 | asUfsucaAfaGfAfaguaUfcAfccaaususa | 1985 | antis | 23 |
| AAUAACCUGUGAAAAUGCUCC | 890 | asasuaacCfuGfUfGfaaaaugcuccL96 | 1986 | sense | 21 |
| GGAGCAUUUUCACAGGUUAUUGC | 891 | gsGfsagcAfuUfUfucacAfgGfuuauusgsc | 1987 | antis | 23 |
| AUAACCUGUGAAAAUGCUCCC | 892 | asusaaccUfgUfGfAfaaaugcucccL96 | 1988 | sense | 21 |
| GGGAGCAUUUUCACAGGUUAUUG | 893 | gsGfsgagCfaUfUfuucaCfaGfguuaususg | 1989 | antis | 23 |
| UAGCAAUAACCUGUGAAAAUG | 894 | usasgcaaUfaAfCfCfugugaaaaugL96 | 1990 | sense | 21 |
| CAUUUUCACAGGUUAUUGCUAUC | 895 | csAfsuuuUfcAfCfagguUfaUfugcuasusc | 1991 | antis | 23 |
| AUAGCAAUAACCUGUGAAAAU | 896 | asusagcaAfuAfAfCfcugugaaaauL96 | 1992 | sense | 21 |
| AUUUUCACAGGUUAUUGCUAUCC | 897 | asUfsuuuCfaCfAfgguuAfuUfgcuauscsc | 1993 | antis | 23 |
| AAUCACAUCUUUAGUGUCUGA | 898 | asasucacAfuCfUfUfuagugucugaL96 | 1994 | sense | 21 |
| UCAGACACUAAAGAUGUGAUUGG | 899 | usCfsagaCfaCfUfaaagAfuGfugauusgsg | 1995 | antis | 23 |
| AUCACAUCUUUAGUGUCUGAA | 900 | asuscacaUfcUfUfUfagugucugaaL96 | 1996 | sense | 21 |
| UUCAGACACUAAAGAUGUGAUUG | 901 | usUfscagAfcAfCfuaaaGfaUfgugaususg | 1997 | antis | 23 |
| UUCCAAUCACAUCUUUAGUGU | 902 | ususccaaUfcAfCfAfucuuuaguguL96 | 1998 | sense | 21 |
| ACACUAAAGAUGUGAUUGGAAAU | 903 | asCfsacuAfaAfGfauguGfaUfuggaasasu | 1999 | antis | 23 |
| UUUCCAAUCACAUCUUUAGUG | 904 | ususuccaAfuCfAfCfaucuuuagugL96 | 2000 | sense | 21 |
| CACUAAAGAUGUGAUUGGAAAUC | 905 | csAfscuaAfaGfAfugugAfuUfggaaasusc | 2001 | antis | 23 |
| ACGGGCAUGAUGUUGAGUUCC | 906 | ascsgggcAfuGfAfUfguugaguuccL96 | 2002 | sense | 21 |
| GGAACUCAACAUCAUGCCCGUUC | 907 | gsGfsaacUfcAfAfcaucAfuGfcccgususc | 2003 | antis | 23 |
| CGGGCAUGAUGUUGAGUUCCU | 908 | csgsggcaUfgAfUfGfuugaguuccuL96 | 2004 | sense | 21 |
| AGGAACUCAACAUCAUGCCCGUU | 909 | asGfsgaaCfuCfAfacauCfaUfgcccgsusu | 2005 | antis | 23 |
| GGGAACGGGCAUGAUGUUGAG | 910 | gsgsgaacGfgGfCfAfugauguugagL96 | 2006 | sense | 21 |
| CUCAACAUCAUGCCCGUUCCCAG | 911 | csUfscaaCfaUfCfaugcCfcGfuucccsasg | 2007 | antis | 23 |
| UGGGAACGGGCAUGAUGUUGA | 912 | usgsggaaCfgGfGfCfaugauguugaL96 | 2008 | sense | 21 |
| UCAACAUCAUGCCCGUUCCCAGG | 913 | usCfsaacAfuCfAfugccCfgUfucccasgsg | 2009 | antis | 23 |
| ACUAAGGUGAAAAGAUAAUGA | 914 | ascsuaagGfuGfAfAfaagauaaugaL96 | 2010 | sense | 21 |
| UCAUUAUCUUUUCACCUUAGUGU | 915 | usCfsauuAfuCfUfuuucAfcCfuuagusgsu | 2011 | antis | 23 |
| CUAAGGUGAAAAGAUAAUGAU | 916 | csusaaggUfgAfAfAfagauaaugauL96 | 2012 | sense | 21 |
| AUCAUUAUCUUUUCACCUUAGUG | 917 | asUfscauUfaUfCfuuuuCfaCfcuuagsusg | 2013 | antis | 23 |
| AAACACUAAGGUGAAAAGAUA | 918 | asasacacUfaAfGfGfugaaaagauaL96 | 2014 | sense | 21 |
| UAUCUUUUCACCUUAGUGUUUGC | 919 | usAfsucuUfuUfCfaccuUfaGfuguuusgsc | 2015 | antis | 23 |
| CAAACACUAAGGUGAAAAGAU | 920 | csasaacaCfuAfAfGfgugaaaagauL96 | 2016 | sense | 21 |
| AUCUUUUCACCUUAGUGUUUGCU | 921 | asUfscuuUfuCfAfccuuAfgUfguuugscsu | 2017 | antis | 23 |
| AGGUAGCACUGGAGAGAAUUG | 922 | asgsguagCfaCfUfGfgagagaauugL96 | 2018 | sense | 21 |
| CAAUUCUCUCCAGUGCUACCUUC | 923 | csAfsauuCfuCfUfccagUfgCfuaccususc | 2019 | antis | 23 |
| GGUAGCACUGGAGAGAAUUGG | 924 | gsgsuagcAfcUfGfGfagagaauuggL96 | 2020 | sense | 21 |
| CCAAUUCUCUCCAGUGCUACCUU | 925 | csCfsaauUfcUfCfuccaGfuGfcuaccsusu | 2021 | antis | 23 |
| GAGAAGGUAGCACUGGAGAGA | 926 | gsasgaagGfuAfGfCfacuggagagaL96 | 2022 | sense | 21 |
| UCUCUCCAGUGCUACCUUCUCAA | 927 | usCfsucuCfcAfGfugcuAfcCfuucucsasa | 2023 | antis | 23 |
| UGAGAAGGUAGCACUGGAGAG | 928 | usgsagaaGfgUfAfGfcacuggagagL96 | 2024 | sense | 21 |
| CUCUCCAGUGCUACCUUCUCAAA | 929 | csUfscucCfaGfUfgcuaCfcUfucucasasa | 2025 | antis | 23 |
| AGUGGACUUGCUGCAUAUGUG | 930 | asgsuggaCfuUfGfCfugcauaugugL96 | 2026 | sense | 21 |
| CACAUAUGCAGCAAGUCCACUGU | 931 | csAfscauAfuGfCfagcaAfgUfccacusgsu | 2027 | antis | 23 |
| GUGGACUUGCUGCAUAUGUGG | 932 | gsusggacUfuGfCfUfgcauauguggL96 | 2028 | sense | 21 |
| CCACAUAUGCAGCAAGUCCACUG | 933 | csCfsacaUfaUfGfcagcAfaGfuccacsusg | 2029 | antis | 23 |
| CGACAGUGGACUUGCUGCAUA | 934 | csgsacagUfgGfAfCfuugcugcauaL96 | 2030 | sense | 21 |
| UAUGCAGCAAGUCCACUGUCGUC | 935 | usAfsugcAfgCfAfagucCfaCfugucgsusc | 2031 | antis | 23 |
| ACGACAGUGGACUUGCUGCAU | 936 | ascsgacaGfuGfGfAfcuugcugcauL96 | 2032 | sense | 21 |
| AUGCAGCAAGUCCACUGUCGUCU | 937 | asUfsgcaGfcAfAfguccAfcUfgucguscsu | 2033 | antis | 23 |
| AAGGUGUUCAAGAUGUCCUCG | 938 | asasggugUfuCfAfAfgauguccucgL96 | 2034 | sense | 21 |
| CGAGGACAUCUUGAACACCUUUC | 939 | csGfsaggAfcAfUfcuugAfaCfaccuususc | 2035 | antis | 23 |
| AGGUGUUCAAGAUGUCCUCGA | 940 | asgsguguUfcAfAfGfauguccucgaL96 | 2036 | sense | 21 |
| UCGAGGACAUCUUGAACACCUUU | 941 | usCfsgagGfaCfAfucuuGfaAfcaccususu | 2037 | antis | 23 |
| GAGAAAGGUGUUCAAGAUGUC | 942 | gsasgaaaGfgUfGfUfucaagaugucL96 | 2038 | sense | 21 |
| GACAUCUUGAACACCUUUCUCCC | 943 | gsAfscauCfuUfGfaacaCfcUfuucucscsc | 2039 | antis | 23 |
| GGAGAAAGGUGUUCAAGAUGU | 944 | gsgsagaaAfgGfUfGfuucaagauguL96 | 2040 | sense | 21 |
| ACAUCUUGAACACCUUUCUCCCC | 945 | asCfsaucUfuGfAfacacCfuUfucuccscsc | 2041 | antis | 23 |
| AACCGUCUGGAUGAUGUGCGU | 946 | asasccguCfuGfGfAfugaugugcguL96 | 2042 | sense | 21 |
| ACGCACAUCAUCCAGACGGUUGC | 947 | asCfsgcaCfaUfCfauccAfgAfcgguusgsc | 2043 | antis | 23 |
| ACCGUCUGGAUGAUGUGCGUA | 948 | ascscgucUfgGfAfUfgaugugcguaL96 | 2044 | sense | 21 |
| UACGCACAUCAUCCAGACGGUUG | 949 | usAfscgcAfcAfUfcaucCfaGfacggususg | 2045 | antis | 23 |
| GGGCAACCGUCUGGAUGAUGU | 950 | gsgsgcaaCfcGfUfCfuggaugauguL96 | 2046 | sense | 21 |
| ACAUCAUCCAGACGGUUGCCCAG | 951 | asCfsaucAfuCfCfagacGfgUfugcccsasg | 2047 | antis | 23 |
| UGGGCAACCGUCUGGAUGAUG | 952 | usgsggcaAfcCfGfUfcuggaugaugL96 | 2048 | sense | 21 |
| CAUCAUCCAGACGGUUGCCCAGG | 953 | csAfsucaUfcCfAfgacgGfuUfgcccasgsg | 2049 | antis | 23 |
| GAAACUUUGGCUGAUAAUAUU | 954 | gsasaacuUfuGfGfCfugauaauauuL96 | 2050 | sense | 21 |
| AAUAUUAUCAGCCAAAGUUUCUU | 955 | asAfsuauUfaUfCfagccAfaAfguuucsusu | 2051 | antis | 23 |
| AAACUUUGGCUGAUAAUAUUG | 956 | asasacuuUfgGfCfUfgauaauauugL96 | 2052 | sense | 21 |
| CAAUAUUAUCAGCCAAAGUUUCU | 957 | csAfsauaUfuAfUfcagcCfaAfaguuuscsu | 2053 | antis | 23 |
| UGAAGAAACUUUGGCUGAUAA | 958 | usgsaagaAfaCfUfUfuggcugauaaL96 | 2054 | sense | 21 |
| UUAUCAGCCAAAGUUUCUUCAUC | 959 | usUfsaucAfgCfCfaaagUfuUfcuucasusc | 2055 | antis | 23 |
| AUGAAGAAACUUUGGCUGAUA | 960 | asusgaagAfaAfCfUfuuggcugauaL96 | 2056 | sense | 21 |
| UAUCAGCCAAAGUUUCUUCAUCA | 961 | usAfsucaGfcCfAfaaguUfuCfuucauscsa | 2057 | antis | 23 |
| AAAGGUGUUCAAGAUGUCCUC | 962 | asasagguGfuUfCfAfagauguccucL96 | 2058 | sense | 21 |
| GAGGACAUCUUGAACACCUUUCU | 963 | gsAfsggaCfaUfCfuugaAfcAfccuuuscsu | 2059 | antis | 23 |
| AAGGUGUUCAAGAUGUCCUCG | 964 | asasggugUfuCfAfAfgauguccucgL96 | 2060 | sense | 21 |
| CGAGGACAUCUUGAACACCUUUC | 965 | csGfsaggAfcAfUfcuugAfaCfaccuususc | 2061 | antis | 23 |
| GGAGAAAGGUGUUCAAGAUGU | 966 | gsgsagaaAfgGfUfGfuucaagauguL96 | 2062 | sense | 21 |
| ACAUCUUGAACACCUUUCUCCCC | 967 | asCfsaucUfuGfAfacacCfuUfucuccscsc | 2063 | antis | 23 |
| GGGAGAAAGGUGUUCAAGAUG | 968 | gsgsgagaAfaGfGfUfguucaagaugL96 | 2064 | sense | 21 |
| CAUCUUGAACACCUUUCUCCCCC | 969 | csAfsucuUfgAfAfcaccUfuUfcucccscsc | 2065 | antis | 23 |
| AAAUCAGUACUUCCAAAGUCU | 970 | asasaucaGfuAfCfUfuccaaagucuL96 | 2066 | sense | 21 |
| AGACUUUGGAAGUACUGAUUUAG | 971 | asGfsacuUfuGfGfaaguAfcUfgauuusasg | 2067 | antis | 23 |
| AAUCAGUACUUCCAAAGUCUA | 972 | asasucagUfaCfUfUfccaaagucuaL96 | 2068 | sense | 21 |
| UAGACUUUGGAAGUACUGAUUUA | 973 | usAfsgacUfuUfGfgaagUfaCfugauususa | 2069 | antis | 23 |
| UGCUAAAUCAGUACUUCCAAA | 974 | usgscuaaAfuCfAfGfuacuuccaaaL96 | 2070 | sense | 21 |
| UUUGGAAGUACUGAUUUAGCAUG | 975 | usUfsuggAfaGfUfacugAfuUfuagcasusg | 2071 | antis | 23 |
| AUGCUAAAUCAGUACUUCCAA | 976 | asusgcuaAfaUfCfAfguacuuccaaL96 | 2072 | sense | 21 |
| UUGGAAGUACUGAUUUAGCAUGU | 977 | usUfsggaAfgUfAfcugaUfuUfagcausgsu | 2073 | antis | 23 |
| ACAUCUUUAGUGUCUGAAUAU | 978 | ascsaucuUfuAfGfUfgucugaauauL96 | 2074 | sense | 21 |
| AUAUUCAGACACUAAAGAUGUGA | 979 | asUfsauuCfaGfAfcacuAfaAfgaugusgsa | 2075 | antis | 23 |
| CAUCUUUAGUGUCUGAAUAUA | 980 | csasucuuUfaGfUfGfucugaauauaL96 | 2076 | sense | 21 |
| UAUAUUCAGACACUAAAGAUGUG | 981 | usAfsuauUfcAfGfacacUfaAfagaugsusg | 2077 | antis | 23 |
| AAUCACAUCUUUAGUGUCUGA | 982 | asasucacAfuCfUfUfuagugucugaL96 | 2078 | sense | 21 |
| UCAGACACUAAAGAUGUGAUUGG | 983 | usCfsagaCfaCfUfaaagAfuGfugauusgsg | 2079 | antis | 23 |
| CAAUCACAUCUUUAGUGUCUG | 984 | csasaucaCfaUfCfUfuuagugucugL96 | 2080 | sense | 21 |
| CAGACACUAAAGAUGUGAUUGGA | 985 | csAfsgacAfcUfAfaagaUfgUfgauugsgsa | 2081 | antis | 23 |
| GCAUGUAUUACUUGACAAAGA | 986 | gscsauguAfuUfAfCfuugacaaagaL96 | 2082 | sense | 21 |
| UCUUUGUCAAGUAAUACAUGCUG | 987 | usCfsuuuGfuCfAfaguaAfuAfcaugcsusg | 2083 | antis | 23 |
| CAUGUAUUACUUGACAAAGAG | 988 | csasuguaUfuAfCfUfugacaaagagL96 | 2084 | sense | 21 |
| CUCUUUGUCAAGUAAUACAUGCU | 989 | csUfscuuUfgUfCfaaguAfaUfacaugscsu | 2085 | antis | 23 |
| UUCAGCAUGUAUUACUUGACA | 990 | ususcagcAfuGfUfAfuuacuugacaL96 | 2086 | sense | 21 |
| UGUCAAGUAAUACAUGCUGAAAA | 991 | usGfsucaAfgUfAfauacAfuGfcugaasasa | 2087 | antis | 23 |
| UUUCAGCAUGUAUUACUUGAC | 992 | ususucagCfaUfGfUfauuacuugacL96 | 2088 | sense | 21 |
| GUCAAGUAAUACAUGCUGAAAAA | 993 | gsUfscaaGfuAfAfuacaUfgCfugaaasasa | 2089 | antis | 23 |
| AUGUUACUUCUUAGAGAGAAA | 994 | asusguuaCfuUfCfUfuagagagaaaL96 | 2090 | sense | 21 |
| UUUCUCUCUAAGAAGUAACAUAC | 995 | usUfsucuCfuCfUfaagaAfgUfaacausasc | 2091 | antis | 23 |
| UGUUACUUCUUAGAGAGAAAU | 996 | usgsuuacUfuCfUfUfagagagaaauL96 | 2092 | sense | 21 |
| AUUUCUCUCUAAGAAGUAACAUA | 997 | asUfsuucUfcUfCfuaagAfaGfuaacasusa | 2093 | antis | 23 |
| AUGUAUGUUACUUCUUAGAGA | 998 | asusguauGfuUfAfCfuucuuagagaL96 | 2094 | sense | 21 |
| UCUCUAAGAAGUAACAUACAUCC | 999 | usCfsucuAfaGfAfaguaAfcAfuacauscsc | 2095 | antis | 23 |
| GAUGUAUGUUACUUCUUAGAG | 1000 | gsasuguaUfgUfUfAfcuucuuagagL96 | 2096 | sense | 21 |
| CUCUAAGAAGUAACAUACAUCCU | 1001 | csUfscuaAfgAfAfguaaCfaUfacaucscsu | 2097 | antis | 23 |
| ACAACUUUGAGAAGGUAGCAC | 1002 | ascsaacuUfuGfAfGfaagguagcacL96 | 2098 | sense | 21 |
| GUGCUACCUUCUCAAAGUUGUGA | 1003 | gsUfsgcuAfcCfUfucucAfaAfguugusgsa | 2099 | antis | 23 |
| CAACUUUGAGAAGGUAGCACU | 1004 | csasacuuUfgAfGfAfagguagcacuL96 | 2100 | sense | 21 |
| AGUGCUACCUUCUCAAAGUUGUG | 1005 | asGfsugcUfaCfCfuucuCfaAfaguugsusg | 2101 | antis | 23 |
| AUUCACAACUUUGAGAAGGUA | 1006 | asusucacAfaCfUfUfugagaagguaL96 | 2102 | sense | 21 |
| UACCUUCUCAAAGUUGUGAAUCA | 1007 | usAfsccuUfcUfCfaaagUfuGfugaauscsa | 2103 | antis | 23 |
| GAUUCACAACUUUGAGAAGGU | 1008 | gsasuucaCfaAfCfUfuugagaagguL96 | 2104 | sense | 21 |
| ACCUUCUCAAAGUUGUGAAUCAG | 1009 | asCfscuuCfuCfAfaaguUfgUfgaaucsasg | 2105 | antis | 23 |
| AACAUGCUAAAUCAGUACUUC | 1010 | asascaugCfuAfAfAfucaguacuucL96 | 2106 | sense | 21 |
| GAAGUACUGAUUUAGCAUGUUGU | 1011 | gsAfsaguAfcUfGfauuuAfgCfauguusgsu | 2107 | antis | 23 |
| ACAUGCUAAAUCAGUACUUCC | 1012 | ascsaugcUfaAfAfUfcaguacuuccL96 | 2108 | sense | 21 |
| GGAAGUACUGAUUUAGCAUGUUG | 1013 | gsGfsaagUfaCfUfgauuUfaGfcaugususg | 2109 | antis | 23 |
| GAACAACAUGCUAAAUCAGUA | 1014 | gsasacaaCfaUfGfCfuaaaucaguaL96 | 2110 | sense | 21 |
| UACUGAUUUAGCAUGUUGUUCAU | 1015 | usAfscugAfuUfUfagcaUfgUfuguucsasu | 2111 | antis | 23 |
| UGAACAACAUGCUAAAUCAGU | 1016 | usgsaacaAfcAfUfGfcuaaaucaguL96 | 2112 | sense | 21 |
| ACUGAUUUAGCAUGUUGUUCAUA | 1017 | asCfsugaUfuUfAfgcauGfuUfguucasusa | 2113 | antis | 23 |
| AAACCAGUACUUUAUCAUUUU | 1018 | asasaccaGfuAfCfUfuuaucauuuuL96 | 2114 | sense | 21 |
| AAAAUGAUAAAGUACUGGUUUCA | 1019 | asAfsaauGfaUfAfaaguAfcUfgguuuscsa | 2115 | antis | 23 |
| AACCAGUACUUUAUCAUUUUC | 1020 | asasccagUfaCfUfUfuaucauuuucL96 | 2116 | sense | 21 |
| GAAAAUGAUAAAGUACUGGUUUC | 1021 | gsAfsaaaUfgAfUfaaagUfaCfugguususc | 2117 | antis | 23 |
| UUUGAAACCAGUACUUUAUCA | 1022 | ususugaaAfcCfAfGfuacuuuaucaL96 | 2118 | sense | 21 |
| UGAUAAAGUACUGGUUUCAAAAU | 1023 | usGfsauaAfaGfUfacugGfuUfucaaasasu | 2119 | antis | 23 |
| UUUUGAAACCAGUACUUUAUC | 1024 | ususuugaAfaCfCfAfguacuuuaucL96 | 2120 | sense | 21 |
| GAUAAAGUACUGGUUUCAAAAUU | 1025 | gsAfsuaaAfgUfAfcuggUfuUfcaaaasusu | 2121 | antis | 23 |
| GAGAAGAUGGGCUACAAGGCC | 1026 | gsasgaagAfuGfGfGfcuacaaggccL96 | 2122 | sense | 21 |
| GGCCUUGUAGCCCAUCUUCUCUG | 1027 | gsGfsccuUfgUfAfgcccAfuCfuucucsusg | 2123 | antis | 23 |
| AGAAGAUGGGCUACAAGGCCA | 1028 | asgsaagaUfgGfGfCfuacaaggccaL96 | 2124 | sense | 21 |
| UGGCCUUGUAGCCCAUCUUCUCU | 1029 | usGfsgccUfuGfUfagccCfaUfcuucuscsu | 2125 | antis | 23 |
| GGCAGAGAAGAUGGGCUACAA | 1030 | gsgscagaGfaAfGfAfugggcuacaaL96 | 2126 | sense | 21 |
| UUGUAGCCCAUCUUCUCUGCCUG | 1031 | usUfsguaGfcCfCfaucuUfcUfcugccsusg | 2127 | antis | 23 |
| AGGCAGAGAAGAUGGGCUACA | 1032 | asgsgcagAfgAfAfGfaugggcuacaL96 | 2128 | sense | 21 |
| UGUAGCCCAUCUUCUCUGCCUGC | 1033 | usGfsuagCfcCfAfucuuCfuCfugccusgsc | 2129 | antis | 23 |
| AACGGGCAUGAUGUUGAGUUC | 1034 | asascgggCfaUfGfAfuguugaguucL96 | 2130 | sense | 21 |
| GAACUCAACAUCAUGCCCGUUCC | 1035 | gsAfsacuCfaAfCfaucaUfgCfccguuscsc | 2131 | antis | 23 |
| ACGGGCAUGAUGUUGAGUUCC | 1036 | ascsgggcAfuGfAfUfguugaguuccL96 | 2132 | sense | 21 |
| GGAACUCAACAUCAUGCCCGUUC | 1037 | gsGfsaacUfcAfAfcaucAfuGfcccgususc | 2133 | antis | 23 |
| UGGGAACGGGCAUGAUGUUGA | 1038 | usgsggaaCfgGfGfCfaugauguugaL96 | 2134 | sense | 21 |
| UCAACAUCAUGCCCGUUCCCAGG | 1039 | usCfsaacAfuCfAfugccCfgUfucccasgsg | 2135 | antis | 23 |
| CUGGGAACGGGCAUGAUGUUG | 1040 | csusgggaAfcGfGfGfcaugauguugL96 | 2136 | sense | 21 |
| CAACAUCAUGCCCGUUCCCAGGG | 1041 | csAfsacaUfcAfUfgcccGfuUfcccagsgsg | 2137 | antis | 23 |
| AUGUGGCUAAAGCAAUAGACC | 1042 | asusguggCfuAfAfAfgcaauagaccL96 | 2138 | sense | 21 |
| GGUCUAUUGCUUUAGCCACAUAU | 1043 | gsGfsucuAfuUfGfcuuuAfgCfcacausasu | 2139 | antis | 23 |
| UGUGGCUAAAGCAAUAGACCC | 1044 | usgsuggcUfaAfAfGfcaauagacccL96 | 2140 | sense | 21 |
| GGGUCUAUUGCUUUAGCCACAUA | 1045 | gsGfsgucUfaUfUfgcuuUfaGfccacasusa | 2141 | antis | 23 |
| GCAUAUGUGGCUAAAGCAAUA | 1046 | gscsauauGfuGfGfCfuaaagcaauaL96 | 2142 | sense | 21 |
| UAUUGCUUUAGCCACAUAUGCAG | 1047 | usAfsuugCfuUfUfagccAfcAfuaugcsasg | 2143 | antis | 23 |
| UGCAUAUGUGGCUAAAGCAAU | 1048 | usgscauaUfgUfGfGfcuaaagcaauL96 | 2144 | sense | 21 |
| AUUGCUUUAGCCACAUAUGCAGC | 1049 | asUfsugcUfuUfAfgccaCfaUfaugcasgsc | 2145 | antis | 23 |
| AGGAUGCUCCGGAAUGUUGCU | 1050 | asgsgaugCfuCfCfGfgaauguugcuL96 | 2146 | sense | 21 |
| AGCAACAUUCCGGAGCAUCCUUG | 1051 | asGfscaaCfaUfUfccggAfgCfauccususg | 2147 | antis | 23 |
| GGAUGCUCCGGAAUGUUGCUG | 1052 | gsgsaugcUfcCfGfGfaauguugcugL96 | 2148 | sense | 21 |
| CAGCAACAUUCCGGAGCAUCCUU | 1053 | csAfsgcaAfcAfUfuccgGfaGfcauccsusu | 2149 | antis | 23 |
| UCCAAGGAUGCUCCGGAAUGU | 1054 | uscscaagGfaUfGfCfuccggaauguL96 | 2150 | sense | 21 |
| ACAUUCCGGAGCAUCCUUGGAUA | 1055 | asCfsauuCfcGfGfagcaUfcCfuuggasusa | 2151 | antis | 23 |
| AUCCAAGGAUGCUCCGGAAUG | 1056 | asusccaaGfgAfUfGfcuccggaaugL96 | 2152 | sense | 21 |
| CAUUCCGGAGCAUCCUUGGAUAC | 1057 | csAfsuucCfgGfAfgcauCfcUfuggausasc | 2153 | antis | 23 |
| UCACAUCUUUAGUGUCUGAAU | 1058 | uscsacauCfuUfUfAfgugucugaauL96 | 2154 | sense | 21 |
| AUUCAGACACUAAAGAUGUGAUU | 1059 | asUfsucaGfaCfAfcuaaAfgAfugugasusu | 2155 | antis | 23 |
| CACAUCUUUAGUGUCUGAAUA | 1060 | csascaucUfuUfAfGfugucugaauaL96 | 2156 | sense | 21 |
| UAUUCAGACACUAAAGAUGUGAU | 1061 | usAfsuucAfgAfCfacuaAfaGfaugugsasu | 2157 | antis | 23 |
| CCAAUCACAUCUUUAGUGUCU | 1062 | cscsaaucAfcAfUfCfuuuagugucuL96 | 2158 | sense | 21 |
| AGACACUAAAGAUGUGAUUGGAA | 1063 | asGfsacaCfuAfAfagauGfuGfauuggsasa | 2159 | antis | 23 |
| UCCAAUCACAUCUUUAGUGUC | 1064 | uscscaauCfaCfAfUfcuuuagugucL96 | 2160 | sense | 21 |
| GACACUAAAGAUGUGAUUGGAAA | 1065 | gsAfscacUfaAfAfgaugUfgAfuuggasasa | 2161 | antis | 23 |
| AAAUGUGUUUAGACAACGUCA | 1066 | asasauguGfuUfUfAfgacaacgucaL96 | 2162 | sense | 21 |
| UGACGUUGUCUAAACACAUUUUC | 1067 | usGfsacgUfuGfUfcuaaAfcAfcauuususc | 2163 | antis | 23 |
| AAUGUGUUUAGACAACGUCAU | 1068 | asasugugUfuUfAfGfacaacgucauL96 | 2164 | sense | 21 |
| AUGACGUUGUCUAAACACAUUUU | 1069 | asUfsgacGfuUfGfucuaAfaCfacauususu | 2165 | antis | 23 |
| UUGAAAAUGUGUUUAGACAAC | 1070 | ususgaaaAfuGfUfGfuuuagacaacL96 | 2166 | sense | 21 |
| GUUGUCUAAACACAUUUUCAAUG | 1071 | gsUfsuguCfuAfAfacacAfuUfuucaasusg | 2167 | antis | 23 |
| AUUGAAAAUGUGUUUAGACAA | 1072 | asusugaaAfaUfGfUfguuuagacaaL96 | 2168 | sense | 21 |
| UUGUCUAAACACAUUUUCAAUGU | 1073 | usUfsgucUfaAfAfcacaUfuUfucaausgsu | 2169 | antis | 23 |
| UACUAAAGGAAGAAUUCCGGU | 1074 | usascuaaAfgGfAfAfgaauuccgguL96 | 2170 | sense | 21 |
| ACCGGAAUUCUUCCUUUAGUAUC | 1075 | asCfscggAfaUfUfcuucCfuUfuaguasusc | 2171 | antis | 23 |
| ACUAAAGGAAGAAUUCCGGUU | 1076 | ascsuaaaGfgAfAfGfaauuccgguuL96 | 2172 | sense | 21 |
| AACCGGAAUUCUUCCUUUAGUAU | 1077 | asAfsccgGfaAfUfucuuCfcUfuuagusasu | 2173 | antis | 23 |
| GAGAUACUAAAGGAAGAAUUC | 1078 | gsasgauaCfuAfAfAfggaagaauucL96 | 2174 | sense | 21 |
| GAAUUCUUCCUUUAGUAUCUCGA | 1079 | gsAfsauuCfuUfCfcuuuAfgUfaucucsgsa | 2175 | antis | 23 |
| CGAGAUACUAAAGGAAGAAUU | 1080 | csgsagauAfcUfAfAfaggaagaauuL96 | 2176 | sense | 21 |
| AAUUCUUCCUUUAGUAUCUCGAG | 1081 | asAfsuucUfuCfCfuuuaGfuAfucucgsasg | 2177 | antis | 23 |
| AACUUUGGCUGAUAAUAUUGC | 1082 | asascuuuGfgCfUfGfauaauauugcL96 | 2178 | sense | 21 |
| GCAAUAUUAUCAGCCAAAGUUUC | 1083 | gsCfsaauAfuUfAfucagCfcAfaaguususc | 2179 | antis | 23 |
| ACUUUGGCUGAUAAUAUUGCA | 1084 | ascsuuugGfcUfGfAfuaauauugcaL96 | 2180 | sense | 21 |
| UGCAAUAUUAUCAGCCAAAGUUU | 1085 | usGfscaaUfaUfUfaucaGfcCfaaagususu | 2181 | antis | 23 |
| AAGAAACUUUGGCUGAUAAUA | 1086 | asasgaaaCfuUfUfGfgcugauaauaL96 | 2182 | sense | 21 |
| UAUUAUCAGCCAAAGUUUCUUCA | 1087 | usAfsuuaUfcAfGfccaaAfgUfuucuuscsa | 2183 | antis | 23 |
| GAAGAAACUUUGGCUGAUAAU | 1088 | gsasagaaAfcUfUfUfggcugauaauL96 | 2184 | sense | 21 |
| AUUAUCAGCCAAAGUUUCUUCAU | 1089 | asUfsuauCfaGfCfcaaaGfuUfucuucsasu | 2185 | antis | 23 |
| AAAUGGCUGAGAAGACUGACA | 1090 | asasauggCfuGfAfGfaagacugacaL96 | 2186 | sense | 21 |
| UGUCAGUCUUCUCAGCCAUUUGA | 1091 | usGfsucaGfuCfUfucucAfgCfcauuusgsa | 2187 | antis | 23 |
| AAUGGCUGAGAAGACUGACAU | 1092 | asasuggcUfgAfGfAfagacugacauL96 | 2188 | sense | 21 |
| AUGUCAGUCUUCUCAGCCAUUUG | 1093 | asUfsgucAfgUfCfuucuCfaGfccauususg | 2189 | antis | 23 |
| UAUCAAAUGGCUGAGAAGACU | 1094 | usasucaaAfuGfGfCfugagaagacuL96 | 2190 | sense | 21 |
| AGUCUUCUCAGCCAUUUGAUAUC | 1095 | asGfsucuUfcUfCfagccAfuUfugauasusc | 2191 | antis | 23 |
| AUAUCAAAUGGCUGAGAAGAC | 1096 | asusaucaAfaUfGfGfcugagaagacL96 | 2192 | sense | 21 |
| GUCUUCUCAGCCAUUUGAUAUCU | 1097 | gsUfscuuCfuCfAfgccaUfuUfgauauscsu | 2193 | antis | 23 |
| GUGGUUCUUAAAUUGUAAGCU | 1098 | gsusgguuCfuUfAfAfauuguaagcuL96 | 2194 | sense | 21 |
| AGCUUACAAUUUAAGAACCACUG | 1099 | asGfscuuAfcAfAfuuuaAfgAfaccacsusg | 2195 | antis | 23 |
| UGGUUCUUAAAUUGUAAGCUC | 1100 | usgsguucUfuAfAfAfuuguaagcucL96 | 2196 | sense | 21 |
| GAGCUUACAAUUUAAGAACCACU | 1101 | gsAfsgcuUfaCfAfauuuAfaGfaaccascsu | 2197 | antis | 23 |
| AACAGUGGUUCUUAAAUUGUA | 1102 | asascaguGfgUfUfCfuuaaauuguaL96 | 2198 | sense | 21 |
| UACAAUUUAAGAACCACUGUUUU | 1103 | usAfscaaUfuUfAfagaaCfcAfcuguususu | 2199 | antis | 23 |
| AAACAGUGGUUCUUAAAUUGU | 1104 | asasacagUfgGfUfUfcuuaaauuguL96 | 2200 | sense | 21 |
| ACAAUUUAAGAACCACUGUUUUA | 1105 | asCfsaauUfuAfAfgaacCfaCfuguuususa | 2201 | antis | 23 |
| AAGUCAUCGACAAGACAUUGG | 1106 | asasgucaUfcGfAfCfaagacauuggL96 | 2202 | sense | 21 |
| CCAAUGUCUUGUCGAUGACUUUC | 1107 | csCfsaauGfuCfUfugucGfaUfgacuususc | 2203 | antis | 23 |
| AGUCAUCGACAAGACAUUGGU | 1108 | asgsucauCfgAfCfAfagacauugguL96 | 2204 | sense | 21 |
| ACCAAUGUCUUGUCGAUGACUUU | 1109 | asCfscaaUfgUfCfuuguCfgAfugacususu | 2205 | antis | 23 |
| GUGAAAGUCAUCGACAAGACA | 1110 | gsusgaaaGfuCfAfUfcgacaagacaL96 | 2206 | sense | 21 |
| UGUCUUGUCGAUGACUUUCACAU | 1111 | usGfsucuUfgUfCfgaugAfcUfuucacsasu | 2207 | antis | 23 |
| UGUGAAAGUCAUCGACAAGAC | 1112 | usgsugaaAfgUfCfAfucgacaagacL96 | 2208 | sense | 21 |
| GUCUUGUCGAUGACUUUCACAUU | 1113 | gsUfscuuGfuCfGfaugaCfuUfucacasusu | 2209 | antis | 23 |
| GAUAAUAUUGCAGCAUUUUCC | 1114 | gsasuaauAfuUfGfCfagcauuuuccL96 | 2210 | sense | 21 |
| GGAAAAUGCUGCAAUAUUAUCAG | 1115 | gsGfsaaaAfuGfCfugcaAfuAfuuaucsasg | 2211 | antis | 23 |
| AUAAUAUUGCAGCAUUUUCCA | 1116 | asusaauaUfuGfCfAfgcauuuuccaL96 | 2212 | sense | 21 |
| UGGAAAAUGCUGCAAUAUUAUCA | 1117 | usGfsgaaAfaUfGfcugcAfaUfauuauscsa | 2213 | antis | 23 |
| GGCUGAUAAUAUUGCAGCAUU | 1118 | gsgscugaUfaAfUfAfuugcagcauuL96 | 2214 | sense | 21 |
| AAUGCUGCAAUAUUAUCAGCCAA | 1119 | asAfsugcUfgCfAfauauUfaUfcagccsasa | 2215 | antis | 23 |
| UGGCUGAUAAUAUUGCAGCAU | 1120 | usgsgcugAfuAfAfUfauugcagcauL96 | 2216 | sense | 21 |
| AUGCUGCAAUAUUAUCAGCCAAA | 1121 | asUfsgcuGfcAfAfuauuAfuCfagccasasa | 2217 | antis | 23 |
| GCUAAUUUGUAUCAAUGAUUA | 1122 | gscsuaauUfuGfUfAfucaaugauuaL96 | 2218 | sense | 21 |
| UAAUCAUUGAUACAAAUUAGCCG | 1123 | usAfsaucAfuUfGfauacAfaAfuuagcscsg | 2219 | antis | 23 |
| CUAAUUUGUAUCAAUGAUUAU | 1124 | csusaauuUfgUfAfUfcaaugauuauL96 | 2220 | sense | 21 |
| AUAAUCAUUGAUACAAAUUAGCC | 1125 | asUfsaauCfaUfUfgauaCfaAfauuagscsc | 2221 | antis | 23 |
| CCCGGCUAAUUUGUAUCAAUG | 1126 | cscscggcUfaAfUfUfuguaucaaugL96 | 2222 | sense | 21 |
| CAUUGAUACAAAUUAGCCGGGGG | 1127 | csAfsuugAfuAfCfaaauUfaGfccgggsgsg | 2223 | antis | 23 |
| CCCCGGCUAAUUUGUAUCAAU | 1128 | cscsccggCfuAfAfUfuuguaucaauL96 | 2224 | sense | 21 |
| AUUGAUACAAAUUAGCCGGGGGA | 1129 | asUfsugaUfaCfAfaauuAfgCfcggggsgsa | 2225 | antis | 23 |
| UAAUUGGUGAUACUUCUUUGA | 1130 | usasauugGfuGfAfUfacuucuuugaL96 | 2226 | sense | 21 |
| UCAAAGAAGUAUCACCAAUUACC | 1131 | usCfsaaaGfaAfGfuaucAfcCfaauuascsc | 2227 | antis | 23 |
| AAUUGGUGAUACUUCUUUGAA | 1132 | asasuuggUfgAfUfAfcuucuuugaaL96 | 2228 | sense | 21 |
| UUCAAAGAAGUAUCACCAAUUAC | 1133 | usUfscaaAfgAfAfguauCfaCfcaauusasc | 2229 | antis | 23 |
| GCGGUAAUUGGUGAUACUUCU | 1134 | gscsgguaAfuUfGfGfugauacuucuL96 | 2230 | sense | 21 |
| AGAAGUAUCACCAAUUACCGCCA | 1135 | asGfsaagUfaUfCfaccaAfuUfaccgcscsa | 2231 | antis | 23 |
| GGCGGUAAUUGGUGAUACUUC | 1136 | gsgscgguAfaUfUfGfgugauacuucL96 | 2232 | sense | 21 |
| GAAGUAUCACCAAUUACCGCCAC | 1137 | gsAfsaguAfuCfAfccaaUfuAfccgccsasc | 2233 | antis | 23 |
| CAGUGGUUCUUAAAUUGUAAG | 1138 | csasguggUfuCfUfUfaaauuguaagL96 | 2234 | sense | 21 |
| CUUACAAUUUAAGAACCACUGUU | 1139 | csUfsuacAfaUfUfuaagAfaCfcacugsusu | 2235 | antis | 23 |
| AGUGGUUCUUAAAUUGUAAGC | 1140 | asgsugguUfcUfUfAfaauuguaagcL96 | 2236 | sense | 21 |
| GCUUACAAUUUAAGAACCACUGU | 1141 | gsCfsuuaCfaAfUfuuaaGfaAfccacusgsu | 2237 | antis | 23 |
| AAAACAGUGGUUCUUAAAUUG | 1142 | asasaacaGfuGfGfUfucuuaaauugL96 | 2238 | sense | 21 |
| CAAUUUAAGAACCACUGUUUUAA | 1143 | csAfsauuUfaAfGfaaccAfcUfguuuusasa | 2239 | antis | 23 |
| UAAAACAGUGGUUCUUAAAUU | 1144 | usasaaacAfgUfGfGfuucuuaaauuL96 | 2240 | sense | 21 |
| AAUUUAAGAACCACUGUUUUAAA | 1145 | asAfsuuuAfaGfAfaccaCfuGfuuuuasasa | 2241 | antis | 23 |
| ACCUGUAUUCUGUUUACAUGU | 1146 | ascscuguAfuUfCfUfguuuacauguL96 | 2242 | sense | 21 |
| ACAUGUAAACAGAAUACAGGUUA | 1147 | asCfsaugUfaAfAfcagaAfuAfcaggususa | 2243 | antis | 23 |
| CCUGUAUUCUGUUUACAUGUC | 1148 | cscsuguaUfuCfUfGfuuuacaugucL96 | 2244 | sense | 21 |
| GACAUGUAAACAGAAUACAGGUU | 1149 | gsAfscauGfuAfAfacagAfaUfacaggsusu | 2245 | antis | 23 |
| AUUAACCUGUAUUCUGUUUAC | 1150 | asusuaacCfuGfUfAfuucuguuuacL96 | 2246 | sense | 21 |
| GUAAACAGAAUACAGGUUAAUAA | 1151 | gsUfsaaaCfaGfAfauacAfgGfuuaausasa | 2247 | antis | 23 |
| UAUUAACCUGUAUUCUGUUUA | 1152 | usasuuaaCfcUfGfUfauucuguuuaL96 | 2248 | sense | 21 |
| UAAACAGAAUACAGGUUAAUAAA | 1153 | usAfsaacAfgAfAfuacaGfgUfuaauasasa | 2249 | antis | 23 |
| AAGAAACUUUGGCUGAUAAUA | 1154 | asasgaaaCfuUfUfGfgcugauaauaL96 | 2250 | sense | 21 |
| UAUUAUCAGCCAAAGUUUCUUCA | 1155 | usAfsuuaUfcAfGfccaaAfgUfuucuuscsa | 2251 | antis | 23 |
| AGAAACUUUGGCUGAUAAUAU | 1156 | asgsaaacUfuUfGfGfcugauaauauL96 | 2252 | sense | 21 |
| AUAUUAUCAGCCAAAGUUUCUUC | 1157 | asUfsauuAfuCfAfgccaAfaGfuuucususc | 2253 | antis | 23 |
| GAUGAAGAAACUUUGGCUGAU | 1158 | gsasugaaGfaAfAfCfuuuggcugauL96 | 2254 | sense | 21 |
| AUCAGCCAAAGUUUCUUCAUCAU | 1159 | asUfscagCfcAfAfaguuUfcUfucaucsasu | 2255 | antis | 23 |
| UGAUGAAGAAACUUUGGCUGA | 1160 | usgsaugaAfgAfAfAfcuuuggcugaL96 | 2256 | sense | 21 |
| UCAGCCAAAGUUUCUUCAUCAUU | 1161 | usCfsagcCfaAfAfguuuCfuUfcaucasusu | 2257 | antis | 23 |
| GAAAGGUGUUCAAGAUGUCCU | 1162 | gsasaaggUfgUfUfCfaagauguccuL96 | 2258 | sense | 21 |
| AGGACAUCUUGAACACCUUUCUC | 1163 | asGfsgacAfuCfUfugaaCfaCfcuuucsusc | 2259 | antis | 23 |
| AAAGGUGUUCAAGAUGUCCUC | 1164 | asasagguGfuUfCfAfagauguccucL96 | 2260 | sense | 21 |
| GAGGACAUCUUGAACACCUUUCU | 1165 | gsAfsggaCfaUfCfuugaAfcAfccuuuscsu | 2261 | antis | 23 |
| GGGAGAAAGGUGUUCAAGAUG | 1166 | gsgsgagaAfaGfGfUfguucaagaugL96 | 2262 | sense | 21 |
| CAUCUUGAACACCUUUCUCCCCC | 1167 | csAfsucuUfgAfAfcaccUfuUfcuccescsc | 2263 | antis | 23 |
| GGGGAGAAAGGUGUUCAAGAU | 1168 | gsgsggagAfaAfGfGfuguucaagauL96 | 2264 | sense | 21 |
| AUCUUGAACACCUUUCUCCCCCU | 1169 | asUfscuuGfaAfCfaccuUfuCfuccccscsu | 2265 | antis | 23 |
| AUCUUGGUGUCGAAUCAUGGG | 1170 | asuscuugGfuGfUfCfgaaucaugggL96 | 2266 | sense | 21 |
| CCCAUGAUUCGACACCAAGAUCC | 1171 | csCfscauGfaUfUfcgacAfcCfaagauscsc | 2267 | antis | 23 |
| UCUUGGUGUCGAAUCAUGGGG | 1172 | uscsuuggUfgUfCfGfaaucauggggL96 | 2268 | sense | 21 |
| CCCCAUGAUUCGACACCAAGAUC | 1173 | csCfsccaUfgAfUfucgaCfaCfcaagasusc | 2269 | antis | 23 |
| UGGGAUCUUGGUGUCGAAUCA | 1174 | usgsggauCfuUfGfGfugucgaaucaL96 | 2270 | sense | 21 |
| UGAUUCGACACCAAGAUCCCAUU | 1175 | usGfsauuCfgAfCfaccaAfgAfucccasusu | 2271 | antis | 23 |
| AUGGGAUCUUGGUGUCGAAUC | 1176 | asusgggaUfcUfUfGfgugucgaaucL96 | 2272 | sense | 21 |
| GAUUCGACACCAAGAUCCCAUUC | 1177 | gsAfsuucGfaCfAfccaaGfaUfcccaususc | 2273 | antis | 23 |
| GCUACAAGGCCAUAUUUGUGA | 1178 | gscsuacaAfgGfCfCfauauuugugaL96 | 2274 | sense | 21 |
| UCACAAAUAUGGCCUUGUAGCCC | 1179 | usCfsacaAfaUfAfuggcCfuUfguagescsc | 2275 | antis | 23 |
| CUACAAGGCCAUAUUUGUGAC | 1180 | csusacaaGfgCfCfAfuauuugugacL96 | 2276 | sense | 21 |
| GUCACAAAUAUGGCCUUGUAGCC | 1181 | gsUfscacAfaAfUfauggCfcUfuguagscsc | 2277 | antis | 23 |
| AUGGGCUACAAGGCCAUAUUU | 1182 | asusgggcUfaCfAfAfggccauauuuL96 | 2278 | sense | 21 |
| AAAUAUGGCCUUGUAGCCCAUCU | 1183 | asAfsauaUfgGfCfcuugUfaGfcccauscsu | 2279 | antis | 23 |
| GAUGGGCUACAAGGCCAUAUU | 1184 | gsasugggCfuAfCfAfaggccauauuL96 | 2280 | sense | 21 |
| AAUAUGGCCUUGUAGCCCAUCUU | 1185 | asAfsuauGfgCfCfuuguAfgCfccaucsusu | 2281 | antis | 23 |
| ACUGGAGAGAAUUGGAAUGGG | 1186 | ascsuggaGfaGfAfAfuuggaaugggL96 | 2282 | sense | 21 |
| CCCAUUCCAAUUCUCUCCAGUGC | 1187 | csCfscauUfcCfAfauucUfcUfccagusgsc | 2283 | antis | 23 |
| CUGGAGAGAAUUGGAAUGGGU | 1188 | csusggagAfgAfAfUfuggaauggguL96 | 2284 | sense | 21 |
| ACCCAUUCCAAUUCUCUCCAGUG | 1189 | asCfsccaUfuCfCfaauuCfuCfuccagsusg | 2285 | antis | 23 |
| UAGCACUGGAGAGAAUUGGAA | 1190 | usasgcacUfgGfAfGfagaauuggaaL96 | 2286 | sense | 21 |
| UUCCAAUUCUCUCCAGUGCUACC | 1191 | usUfsccaAfuUfCfucucCfaGfugcuascsc | 2287 | antis | 23 |
| GUAGCACUGGAGAGAAUUGGA | 1192 | gsusagcaCfuGfGfAfgagaauuggaL96 | 2288 | sense | 21 |
| UCCAAUUCUCUCCAGUGCUACCU | 1193 | usCfscaaUfuCfUfcuccAfgUfgcuacscsu | 2289 | antis | 23 |
| ACAGUGGACACACCUUACCUG | 1194 | ascsagugGfaCfAfCfaccuuaccugL96 | 2290 | sense | 21 |
| CAGGUAAGGUGUGUCCACUGUCA | 1195 | csAfsgguAfaGfGfugugUfcCfacuguscsa | 2291 | antis | 23 |
| CAGUGGACACACCUUACCUGG | 1196 | csasguggAfcAfCfAfccuuaccuggL96 | 2292 | sense | 21 |
| CCAGGUAAGGUGUGUCCACUGUC | 1197 | csCfsaggUfaAfGfguguGfuCfcacugsusc | 2293 | antis | 23 |
| UGUGACAGUGGACACACCUUA | 1198 | usgsugacAfgUfGfGfacacaccuuaL96 | 2294 | sense | 21 |
| UAAGGUGUGUCCACUGUCACAAA | 1199 | usAfsaggUfgUfGfuccaCfuGfucacasasa | 2295 | antis | 23 |
| UUGUGACAGUGGACACACCUU | 1200 | ususgugaCfaGfUfGfgacacaccuuL96 | 2296 | sense | 21 |
| AAGGUGUGUCCACUGUCACAAAU | 1201 | asAfsgguGfuGfUfccacUfgUfcacaasasu | 2297 | antis | 23 |
| GAAGACUGACAUCAUUGCCAA | 1202 | gsasagacUfgAfCfAfucauugccaaL96 | 2298 | sense | 21 |
| UUGGCAAUGAUGUCAGUCUUCUC | 1203 | usUfsggcAfaUfGfauguCfaGfucuucsusc | 2299 | antis | 23 |
| AAGACUGACAUCAUUGCCAAU | 1204 | asasgacuGfaCfAfUfcauugccaauL96 | 2300 | sense | 21 |
| AUUGGCAAUGAUGUCAGUCUUCU | 1205 | asUfsuggCfaAfUfgaugUfcAfgucuuscsu | 2301 | antis | 23 |
| CUGAGAAGACUGACAUCAUUG | 1206 | csusgagaAfgAfCfUfgacaucauugL96 | 2302 | sense | 21 |
| CAAUGAUGUCAGUCUUCUCAGCC | 1207 | csAfsaugAfuGfUfcaguCfuUfcucagscsc | 2303 | antis | 23 |
| GCUGAGAAGACUGACAUCAUU | 1208 | gscsugagAfaGfAfCfugacaucauuL96 | 2304 | sense | 21 |
| AAUGAUGUCAGUCUUCUCAGCCA | 1209 | asAfsugaUfgUfCfagucUfuCfucagescsa | 2305 | antis | 23 |
| GCUCAGGUUCAAAGUGUUGGU | 1210 | gscsucagGfuUfCfAfaaguguugguL96 | 2306 | sense | 21 |
| ACCAACACUUUGAACCUGAGCUU | 1211 | asCfscaaCfaCfUfuugaAfcCfugagesusu | 2307 | antis | 23 |
| CUCAGGUUCAAAGUGUUGGUA | 1212 | csuscaggUfuCfAfAfaguguugguaL96 | 2308 | sense | 21 |
| UACCAACACUUUGAACCUGAGCU | 1213 | usAfsccaAfcAfCfuuugAfaCfcugagscsu | 2309 | antis | 23 |
| GUAAGCUCAGGUUCAAAGUGU | 1214 | gsusaagcUfcAfGfGfuucaaaguguL96 | 2310 | sense | 21 |
| ACACUUUGAACCUGAGCUUACAA | 1215 | asCfsacuUfuGfAfaccuGfaGfcuuacsasa | 2311 | antis | 23 |
| UGUAAGCUCAGGUUCAAAGUG | 1216 | usgsuaagCfuCfAfGfguucaaagugL96 | 2312 | sense | 21 |
| CACUUUGAACCUGAGCUUACAAU | 1217 | csAfscuuUfgAfAfccugAfgCfuuacasasu | 2313 | antis | 23 |
| AUGUAUUACUUGACAAAGAGA | 1218 | asusguauUfaCfUfUfgacaaagagaL96 | 2314 | sense | 21 |
| UCUCUUUGUCAAGUAAUACAUGC | 1219 | usCfsucuUfuGfUfcaagUfaAfuacausgsc | 2315 | antis | 23 |
| UGUAUUACUUGACAAAGAGAC | 1220 | usgsuauuAfcUfUfGfacaaagagacL96 | 2316 | sense | 21 |
| GUCUCUUUGUCAAGUAAUACAUG | 1221 | gsUfscucUfuUfGfucaaGfuAfauacasusg | 2317 | antis | 23 |
| CAGCAUGUAUUACUUGACAAA | 1222 | csasgcauGfuAfUfUfacuugacaaaL96 | 2318 | sense | 21 |
| UUUGUCAAGUAAUACAUGCUGAA | 1223 | usUfsuguCfaAfGfuaauAfcAfugcugsasa | 2319 | antis | 23 |
| UCAGCAUGUAUUACUUGACAA | 1224 | uscsagcaUfgUfAfUfuacuugacaaL96 | 2320 | sense | 21 |
| UUGUCAAGUAAUACAUGCUGAAA | 1225 | usUfsgucAfaGfUfaauaCfaUfgcugasasa | 2321 | antis | 23 |
| CUGCAACUGUAUAUCUACAAG | 1226 | csusgcaaCfuGfUfAfuaucuacaagL96 | 2322 | sense | 21 |
| CUUGUAGAUAUACAGUUGCAGCC | 1227 | csUfsuguAfgAfUfauacAfgUfugcagscsc | 2323 | antis | 23 |
| UGCAACUGUAUAUCUACAAGG | 1228 | usgscaacUfgUfAfUfaucuacaaggL96 | 2324 | sense | 21 |
| CCUUGUAGAUAUACAGUUGCAGC | 1229 | csCfsuugUfaGfAfuauaCfaGfuugcasgsc | 2325 | antis | 23 |
| UUGGCUGCAACUGUAUAUCUA | 1230 | ususggcuGfcAfAfCfuguauaucuaL96 | 2326 | sense | 21 |
| UAGAUAUACAGUUGCAGCCAACG | 1231 | usAfsgauAfuAfCfaguuGfcAfgccaascsg | 2327 | antis | 23 |
| GUUGGCUGCAACUGUAUAUCU | 1232 | gsusuggcUfgCfAfAfcuguauaucuL96 | 2328 | sense | 21 |
| AGAUAUACAGUUGCAGCCAACGA | 1233 | asGfsauaUfaCfAfguugCfaGfccaacsgsa | 2329 | antis | 23 |
| CAAAUGAUGAAGAAACUUUGG | 1234 | csasaaugAfuGfAfAfgaaacuuuggL96 | 2330 | sense | 21 |
| CCAAAGUUUCUUCAUCAUUUGCC | 1235 | csCfsaaaGfuUfUfcuucAfuCfauuugscsc | 2331 | antis | 23 |
| AAAUGAUGAAGAAACUUUGGC | 1236 | asasaugaUfgAfAfGfaaacuuuggcL96 | 2332 | sense | 21 |
| GCCAAAGUUUCUUCAUCAUUUGC | 1237 | gsCfscaaAfgUfUfucuuCfaUfcauuusgsc | 2333 | antis | 23 |
| GGGGCAAAUGAUGAAGAAACU | 1238 | gsgsggcaAfaUfGfAfugaagaaacuL96 | 2334 | sense | 21 |
| AGUUUCUUCAUCAUUUGCCCCAG | 1239 | asGfsuuuCfuUfCfaucaUfuUfgccccsasg | 2335 | antis | 23 |
| UGGGGCAAAUGAUGAAGAAAC | 1240 | usgsgggcAfaAfUfGfaugaagaaacL96 | 2336 | sense | 21 |
| GUUUCUUCAUCAUUUGCCCCAGA | 1241 | gsUfsuucUfuCfAfucauUfuGfccccasgsa | 2337 | antis | 23 |
| CAAAGGGUGUCGUUCUUUUCC | 1242 | csasaaggGfuGfUfCfguucuuuuccL96 | 2338 | sense | 21 |
| GGAAAAGAACGACACCCUUUGUA | 1243 | gsGfsaaaAfgAfAfcgacAfcCfcuuugsusa | 2339 | antis | 23 |
| AAAGGGUGUCGUUCUUUUCCA | 1244 | asasagggUfgUfCfGfuucuuuuccaL96 | 2340 | sense | 21 |
| UGGAAAAGAACGACACCCUUUGU | 1245 | usGfsgaaAfaGfAfacgaCfaCfccuuusgsu | 2341 | antis | 23 |
| AAUACAAAGGGUGUCGUUCUU | 1246 | asasuacaAfaGfGfGfugucguucuuL96 | 2342 | sense | 21 |
| AAGAACGACACCCUUUGUAUUGA | 1247 | asAfsgaaCfgAfCfacccUfuUfguauusgsa | 2343 | antis | 23 |
| CAAUACAAAGGGUGUCGUUCU | 1248 | csasauacAfaAfGfGfgugucguucuL96 | 2344 | sense | 21 |
| AGAACGACACCCUUUGUAUUGAA | 1249 | asGfsaacGfaCfAfcccuUfuGfuauugsasa | 2345 | antis | 23 |
| AAAGGCACUGAUGUUCUGAAA | 1250 | asasaggcAfcUfGfAfuguucugaaaL96 | 2346 | sense | 21 |
| UUUCAGAACAUCAGUGCCUUUCC | 1251 | usUfsucaGfaAfCfaucaGfuGfccuuuscsc | 2347 | antis | 23 |
| AAGGCACUGAUGUUCUGAAAG | 1252 | asasggcaCfuGfAfUfguucugaaagL96 | 2348 | sense | 21 |
| CUUUCAGAACAUCAGUGCCUUUC | 1253 | csUfsuucAfgAfAfcaucAfgUfgccuususc | 2349 | antis | 23 |
| GCGGAAAGGCACUGAUGUUCU | 1254 | gscsggaaAfgGfCfAfcugauguucuL96 | 2350 | sense | 21 |
| AGAACAUCAGUGCCUUUCCGCAC | 1255 | asGfsaacAfuCfAfgugcCfuUfuccgcsasc | 2351 | antis | 23 |
| UGCGGAAAGGCACUGAUGUUC | 1256 | usgscggaAfaGfGfCfacugauguucL96 | 2352 | sense | 21 |
| GAACAUCAGUGCCUUUCCGCACA | 1257 | gsAfsacaUfcAfGfugccUfuUfccgcascsa | 2353 | antis | 23 |
| AAGGAUGCUCCGGAAUGUUGC | 1258 | asasggauGfcUfCfCfggaauguugcL96 | 2354 | sense | 21 |
| GCAACAUUCCGGAGCAUCCUUGG | 1259 | gsCfsaacAfuUfCfcggaGfcAfuccuusgsg | 2355 | antis | 23 |
| AGGAUGCUCCGGAAUGUUGCU | 1260 | asgsgaugCfuCfCfGfgaauguugcuL96 | 2356 | sense | 21 |
| AGCAACAUUCCGGAGCAUCCUUG | 1261 | asGfscaaCfaUfUfccggAfgCfauccususg | 2357 | antis | 23 |
| AUCCAAGGAUGCUCCGGAAUG | 1262 | asusccaaGfgAfUfGfcuccggaaugL96 | 2358 | sense | 21 |
| CAUUCCGGAGCAUCCUUGGAUAC | 1263 | csAfsuucCfgGfAfgcauCfcUfuggausasc | 2359 | antis | 23 |
| UAUCCAAGGAUGCUCCGGAAU | 1264 | usasuccaAfgGfAfUfgcuccggaauL96 | 2360 | sense | 21 |
| AUUCCGGAGCAUCCUUGGAUACA | 1265 | asUfsuccGfgAfGfcaucCfuUfggauascsa | 2361 | antis | 23 |
| AAUGGGUGGCGGUAAUUGGUG | 1266 | asasugggUfgGfCfGfguaauuggugL96 | 2362 | sense | 21 |
| CACCAAUUACCGCCACCCAUUCC | 1267 | csAfsccaAfuUfAfccgcCfaCfccauuscsc | 2363 | antis | 23 |
| AUGGGUGGCGGUAAUUGGUGA | 1268 | asusggguGfgCfGfGfuaauuggugaL96 | 2364 | sense | 21 |
| UCACCAAUUACCGCCACCCAUUC | 1269 | usCfsaccAfaUfUfaccgCfcAfcccaususc | 2365 | antis | 23 |
| UUGGAAUGGGUGGCGGUAAUU | 1270 | ususggaaUfgGfGfUfggcgguaauuL96 | 2366 | sense | 21 |
| AAUUACCGCCACCCAUUCCAAUU | 1271 | asAfsuuaCfcGfCfcaccCfaUfuccaasusu | 2367 | antis | 23 |
| AUUGGAAUGGGUGGCGGUAAU | 1272 | asusuggaAfuGfGfGfuggcgguaauL96 | 2368 | sense | 21 |
| AUUACCGCCACCCAUUCCAAUUC | 1273 | asUfsuacCfgCfCfacccAfuUfccaaususc | 2369 | antis | 23 |
| GGAAAGGCACUGAUGUUCUGA | 1274 | gsgsaaagGfcAfCfUfgauguucugaL96 | 2370 | sense | 21 |
| UCAGAACAUCAGUGCCUUUCCGC | 1275 | usCfsagaAfcAfUfcaguGfcCfuuuccsgsc | 2371 | antis | 23 |
| GAAAGGCACUGAUGUUCUGAA | 1276 | gsasaaggCfaCfUfGfauguucugaaL96 | 2372 | sense | 21 |
| UUCAGAACAUCAGUGCCUUUCCG | 1277 | usUfscagAfaCfAfucagUfgCfcuuucscsg | 2373 | antis | 23 |
| GUGCGGAAAGGCACUGAUGUU | 1278 | gsusgcggAfaAfGfGfcacugauguuL96 | 2374 | sense | 21 |
| AACAUCAGUGCCUUUCCGCACAC | 1279 | asAfscauCfaGfUfgccuUfuCfcgcacsasc | 2375 | antis | 23 |
| UGUGCGGAAAGGCACUGAUGU | 1280 | usgsugcgGfaAfAfGfgcacugauguL96 | 2376 | sense | 21 |
| ACAUCAGUGCCUUUCCGCACACC | 1281 | asCfsaucAfgUfGfccuuUfcCfgcacascsc | 2377 | antis | 23 |
| AAUUGUAAGCUCAGGUUCAAA | 1282 | asasuuguAfaGfCfUfcagguucaaaL96 | 2378 | sense | 21 |
| UUUGAACCUGAGCUUACAAUUUA | 1283 | usUfsugaAfcCfUfgagcUfuAfcaauususa | 2379 | antis | 23 |
| AUUGUAAGCUCAGGUUCAAAG | 1284 | asusuguaAfgCfUfCfagguucaaagL96 | 2380 | sense | 21 |
| CUUUGAACCUGAGCUUACAAUUU | 1285 | csUfsuugAfaCfCfugagCfuUfacaaususu | 2381 | antis | 23 |
| CUUAAAUUGUAAGCUCAGGUU | 1286 | csusuaaaUfuGfUfAfagcucagguuL96 | 2382 | sense | 21 |
| AACCUGAGCUUACAAUUUAAGAA | 1287 | asAfsccuGfaGfCfuuacAfaUfuuaagsasa | 2383 | antis | 23 |
| UCUUAAAUUGUAAGCUCAGGU | 1288 | uscsuuaaAfuUfGfUfaagcucagguL96 | 2384 | sense | 21 |
| ACCUGAGCUUACAAUUUAAGAAC | 1289 | asCfscugAfgCfUfuacaAfuUfuaagasasc | 2385 | antis | 23 |
| GCAAACACUAAGGUGAAAAGA | 1290 | gscsaaacAfcUfAfAfggugaaaagaL96 | 2386 | sense | 21 |
| UCUUUUCACCUUAGUGUUUGCUA | 1291 | usCfsuuuUfcAfCfcuuaGfuGfuuugcsusa | 2387 | antis | 23 |
| CAAACACUAAGGUGAAAAGAU | 1292 | csasaacaCfuAfAfGfgugaaaagauL96 | 2388 | sense | 21 |
| AUCUUUUCACCUUAGUGUUUGCU | 1293 | asUfscuuUfuCfAfccuuAfgUfguuugscsu | 2389 | antis | 23 |
| GGUAGCAAACACUAAGGUGAA | 1294 | gsgsuagcAfaAfCfAfcuaaggugaaL96 | 2390 | sense | 21 |
| UUCACCUUAGUGUUUGCUACCUC | 1295 | usUfscacCfuUfAfguguUfuGfcuaccsusc | 2391 | antis | 23 |
| AGGUAGCAAACACUAAGGUGA | 1296 | asgsguagCfaAfAfCfacuaaggugaL96 | 2392 | sense | 21 |
| UCACCUUAGUGUUUGCUACCUCC | 1297 | usCfsaccUfuAfGfuguuUfgCfuaccuscsc | 2393 | antis | 23 |
| AGGUAGCAAACACUAAGGUGA | 1298 | asgsguagCfaAfAfCfacuaaggugaL96 | 2394 | sense | 21 |
| UCACCUUAGUGUUUGCUACCUCC | 1299 | usCfsaccUfuAfGfuguuUfgCfuaccuscsc | 2395 | antis | 23 |
| GGUAGCAAACACUAAGGUGAA | 1300 | gsgsuagcAfaAfCfAfcuaaggugaaL96 | 2396 | sense | 21 |
| UUCACCUUAGUGUUUGCUACCUC | 1301 | usUfscacCfuUfAfguguUfuGfcuaccsusc | 2397 | antis | 23 |
| UUGGAGGUAGCAAACACUAAG | 1302 | ususggagGfuAfGfCfaaacacuaagL96 | 2398 | sense | 21 |
| CUUAGUGUUUGCUACCUCCAAUU | 1303 | csUfsuagUfgUfUfugcuAfcCfuccaasusu | 2399 | antis | 23 |
| AUUGGAGGUAGCAAACACUAA | 1304 | asusuggaGfgUfAfGfcaaacacuaaL96 | 2400 | sense | 21 |
| UUAGUGUUUGCUACCUCCAAUUU | 1305 | usUfsaguGfuUfUfgcuaCfcUfccaaususu | 2401 | antis | 23 |
| UAAAGUGCUGUAUCCUUUAGU | 1306 | usasaaguGfcUfGfUfauccuuuaguL96 | 2402 | sense | 21 |
| ACUAAAGGAUACAGCACUUUAGC | 1307 | asCfsuaaAfgGfAfuacaGfcAfcuuuasgsc | 2403 | antis | 23 |
| AAAGUGCUGUAUCCUUUAGUA | 1308 | asasagugCfuGfUfAfuccuuuaguaL96 | 2404 | sense | 21 |
| UACUAAAGGAUACAGCACUUUAG | 1309 | usAfscuaAfaGfGfauacAfgCfacuuusasg | 2405 | antis | 23 |
| AGGCUAAAGUGCUGUAUCCUU | 1310 | asgsgcuaAfaGfUfGfcuguauccuuL96 | 2406 | sense | 21 |
| AAGGAUACAGCACUUUAGCCUGC | 1311 | asAfsggaUfaCfAfgcacUfuUfagccusgsc | 2407 | antis | 23 |
| CAGGCUAAAGUGCUGUAUCCU | 1312 | csasggcuAfaAfGfUfgcuguauccuL96 | 2408 | sense | 21 |
| AGGAUACAGCACUUUAGCCUGCC | 1313 | asGfsgauAfcAfGfcacuUfuAfgccugscsc | 2409 | antis | 23 |
| AAGACAUUGGUGAGGAAAAAU | 1314 | asasgacaUfuGfGfUfgaggaaaaauL96 | 2410 | sense | 21 |
| AUUUUUCCUCACCAAUGUCUUGU | 1315 | asUfsuuuUfcCfUfcaccAfaUfgucuusgsu | 2411 | antis | 23 |
| AGACAUUGGUGAGGAAAAAUC | 1316 | asgsacauUfgGfUfGfaggaaaaaucL96 | 2412 | sense | 21 |
| GAUUUUUCCUCACCAAUGUCUUG | 1317 | gsAfsuuuUfuCfCfucacCfaAfugucususg | 2413 | antis | 23 |
| CGACAAGACAUUGGUGAGGAA | 1318 | csgsacaaGfaCfAfUfuggugaggaaL96 | 2414 | sense | 21 |
| UUCCUCACCAAUGUCUUGUCGAU | 1319 | usUfsccuCfaCfCfaaugUfcUfugucgsasu | 2415 | antis | 23 |
| UCGACAAGACAUUGGUGAGGA | 1320 | uscsgacaAfgAfCfAfuuggugaggaL96 | 2416 | sense | 21 |
| UCCUCACCAAUGUCUUGUCGAUG | 1321 | usCfscucAfcCfAfauguCfuUfgucgasusg | 2417 | antis | 23 |
| AAGAUGUCCUCGAGAUACUAA | 1322 | asasgaugUfcCfUfCfgagauacuaaL96 | 2418 | sense | 21 |
| UUAGUAUCUCGAGGACAUCUUGA | 1323 | usUfsaguAfuCfUfcgagGfaCfaucuusgsa | 2419 | antis | 23 |
| AGAUGUCCUCGAGAUACUAAA | 1324 | asgsauguCfcUfCfGfagauacuaaaL96 | 2420 | sense | 21 |
| UUUAGUAUCUCGAGGACAUCUUG | 1325 | usUfsuagUfaUfCfucgaGfgAfcaucususg | 2421 | antis | 23 |
| GUUCAAGAUGUCCUCGAGAUA | 1326 | gsusucaaGfaUfGfUfccucgagauaL96 | 2422 | sense | 21 |
| UAUCUCGAGGACAUCUUGAACAC | 1327 | usAfsucuCfgAfGfgacaUfcUfugaacsasc | 2423 | antis | 23 |
| UGUUCAAGAUGUCCUCGAGAU | 1328 | usgsuucaAfgAfUfGfuccucgagauL96 | 2424 | sense | 21 |
| AUCUCGAGGACAUCUUGAACACC | 1329 | asUfscucGfaGfGfacauCfuUfgaacascsc | 2425 | antis | 23 |
| GAGAAAGGUGUUCAAGAUGUC | 1330 | gsasgaaaGfgUfGfUfucaagaugucL96 | 2426 | sense | 21 |
| GACAUCUUGAACACCUUUCUCCC | 1331 | gsAfscauCfuUfGfaacaCfcUfuucucscsc | 2427 | antis | 23 |
| AGAAAGGUGUUCAAGAUGUCC | 1332 | asgsaaagGfuGfUfUfcaagauguccL96 | 2428 | sense | 21 |
| GGACAUCUUGAACACCUUUCUCC | 1333 | gsGfsacaUfcUfUfgaacAfcCfuuucuscsc | 2429 | antis | 23 |
| GGGGGAGAAAGGUGUUCAAGA | 1334 | gsgsgggaGfaAfAfGfguguucaagaL96 | 2430 | sense | 21 |
| UCUUGAACACCUUUCUCCCCCUG | 1335 | usCfsuugAfaCfAfccuuUfcUfcccccsusg | 2431 | antis | 23 |
| AGGGGGAGAAAGGUGUUCAAG | 1336 | asgsggggAfgAfAfAfgguguucaagL96 | 2432 | sense | 21 |
| CUUGAACACCUUUCUCCCCCUGG | 1337 | csUfsugaAfcAfCfcuuuCfuCfccccusgsg | 2433 | antis | 23 |
| GCUGGGAAGAUAUCAAAUGGC | 1338 | gscsugggAfaGfAfUfaucaaauggcL96 | 2434 | sense | 21 |
| GCCAUUUGAUAUCUUCCCAGCUG | 1339 | gsCfscauUfuGfAfuaucUfuCfccagesusg | 2435 | antis | 23 |
| CUGGGAAGAUAUCAAAUGGCU | 1340 | csusgggaAfgAfUfAfucaaauggcuL96 | 2436 | sense | 21 |
| AGCCAUUUGAUAUCUUCCCAGCU | 1341 | asGfsccaUfuUfGfauauCfuUfcccagscsu | 2437 | antis | 23 |
| AUCAGCUGGGAAGAUAUCAAA | 1342 | asuscagcUfgGfGfAfagauaucaaaL96 | 2438 | sense | 21 |
| UUUGAUAUCUUCCCAGCUGAUAG | 1343 | usUfsugaUfaUfCfuuccCfaGfcugausasg | 2439 | antis | 23 |
| UAUCAGCUGGGAAGAUAUCAA | 1344 | usasucagCfuGfGfGfaagauaucaaL96 | 2440 | sense | 21 |
| UUGAUAUCUUCCCAGCUGAUAGA | 1345 | usUfsgauAfuCfUfucccAfgCfugauasgsa | 2441 | antis | 23 |
| UCUGUCGACUUCUGUUUUAGG | 1346 | uscsugucGfaCfUfUfcuguuuuaggL96 | 2442 | sense | 21 |
| CCUAAAACAGAAGUCGACAGAUC | 1347 | csCfsuaaAfaCfAfgaagUfcGfacagasusc | 2443 | antis | 23 |
| CUGUCGACUUCUGUUUUAGGA | 1348 | csusgucgAfcUfUfCfuguuuuaggaL96 | 2444 | sense | 21 |
| UCCUAAAACAGAAGUCGACAGAU | 1349 | usCfscuaAfaAfCfagaaGfuCfgacagsasu | 2445 | antis | 23 |
| CAGAUCUGUCGACUUCUGUUU | 1350 | csasgaucUfgUfCfGfacuucuguuuL96 | 2446 | sense | 21 |
| AAACAGAAGUCGACAGAUCUGUU | 1351 | asAfsacaGfaAfGfucgaCfaGfaucugsusu | 2447 | antis | 23 |
| ACAGAUCUGUCGACUUCUGUU | 1352 | ascsagauCfuGfUfCfgacuucuguuL96 | 2448 | sense | 21 |
| AACAGAAGUCGACAGAUCUGUUU | 1353 | asAfscagAfaGfUfcgacAfgAfucugususu | 2449 | antis | 23 |
| UACUUCUUUGAAUGUAGAUUU | 1354 | usascuucUfuUfGfAfauguagauuuL96 | 2450 | sense | 21 |
| AAAUCUACAUUCAAAGAAGUAUC | 1355 | asAfsaucUfaCfAfuucaAfaGfaaguasusc | 2451 | antis | 23 |
| ACUUCUUUGAAUGUAGAUUUC | 1356 | ascsuucuUfuGfAfAfuguagauuucL96 | 2452 | sense | 21 |
| GAAAUCUACAUUCAAAGAAGUAU | 1357 | gsAfsaauCfuAfCfauucAfaAfgaagusasu | 2453 | antis | 23 |
| GUGAUACUUCUUUGAAUGUAG | 1358 | gsusgauaCfuUfCfUfuugaauguagL96 | 2454 | sense | 21 |
| CUACAUUCAAAGAAGUAUCACCA | 1359 | csUfsacaUfuCfAfaagaAfgUfaucacscsa | 2455 | antis | 23 |
| GGUGAUACUUCUUUGAAUGUA | 1360 | gsgsugauAfcUfUfCfuuugaauguaL96 | 2456 | sense | 21 |
| UACAUUCAAAGAAGUAUCACCAA | 1361 | usAfscauUfcAfAfagaaGfuAfucaccsasa | 2457 | antis | 23 |
| UGGGAAGAUAUCAAAUGGCUG | 1362 | usgsggaaGfaUfAfUfcaaauggcugL96 | 2458 | sense | 21 |
| CAGCCAUUUGAUAUCUUCCCAGC | 1363 | csAfsgccAfuUfUfgauaUfcUfucccasgsc | 2459 | antis | 23 |
| GGGAAGAUAUCAAAUGGCUGA | 1364 | gsgsgaagAfuAfUfCfaaauggcugaL96 | 2460 | sense | 21 |
| UCAGCCAUUUGAUAUCUUCCCAG | 1365 | usCfsagcCfaUfUfugauAfuCfuucccsasg | 2461 | antis | 23 |
| CAGCUGGGAAGAUAUCAAAUG | 1366 | csasgcugGfgAfAfGfauaucaaaugL96 | 2462 | sense | 21 |
| CAUUUGAUAUCUUCCCAGCUGAU | 1367 | csAfsuuuGfaUfAfucuuCfcCfagcugsasu | 2463 | antis | 23 |
| UCAGCUGGGAAGAUAUCAAAU | 1368 | uscsagcuGfgGfAfAfgauaucaaauL96 | 2464 | sense | 21 |
| AUUUGAUAUCUUCCCAGCUGAUA | 1369 | asUfsuugAfuAfUfcuucCfcAfgcugasusa | 2465 | antis | 23 |
| UCCAAAGUCUAUAUAUGACUA | 1370 | uscscaaaGfuCfUfAfuauaugacuaL96 | 2466 | sense | 21 |
| UAGUCAUAUAUAGACUUUGGAAG | 1371 | usAfsgucAfuAfUfauagAfcUfuuggasasg | 2467 | antis | 23 |
| CCAAAGUCUAUAUAUGACUAU | 1372 | cscsaaagUfcUfAfUfauaugacuauL96 | 2468 | sense | 21 |
| AUAGUCAUAUAUAGACUUUGGAA | 1373 | asUfsaguCfaUfAfuauaGfaCfuuuggsasa | 2469 | antis | 23 |
| UACUUCCAAAGUCUAUAUAUG | 1374 | usascuucCfaAfAfGfucuauauaugL96 | 2470 | sense | 21 |
| CAUAUAUAGACUUUGGAAGUACU | 1375 | csAfsuauAfuAfGfacuuUfgGfaaguascsu | 2471 | antis | 23 |
| GUACUUCCAAAGUCUAUAUAU | 1376 | gsusacuuCfcAfAfAfgucuauauauL96 | 2472 | sense | 21 |
| AUAUAUAGACUUUGGAAGUACUG | 1377 | asUfsauaUfaGfAfcuuuGfgAfaguacsusg | 2473 | antis | 23 |
| UUAUGAACAACAUGCUAAAUC | 1378 | ususaugaAfcAfAfCfaugcuaaaucL96 | 2474 | sense | 21 |
| GAUUUAGCAUGUUGUUCAUAAUC | 1379 | gsAfsuuuAfgCfAfuguuGfuUfcauaasusc | 2475 | antis | 23 |
| UAUGAACAACAUGCUAAAUCA | 1380 | usasugaaCfaAfCfAfugcuaaaucaL96 | 2476 | sense | 21 |
| UGAUUUAGCAUGUUGUUCAUAAU | 1381 | usGfsauuUfaGfCfauguUfgUfucauasasu | 2477 | antis | 23 |
| AUGAUUAUGAACAACAUGCUA | 1382 | asusgauuAfuGfAfAfcaacaugcuaL96 | 2478 | sense | 21 |
| UAGCAUGUUGUUCAUAAUCAUUG | 1383 | usAfsgcaUfgUfUfguucAfuAfaucaususg | 2479 | antis | 23 |
| AAUGAUUAUGAACAACAUGCU | 1384 | asasugauUfaUfGfAfacaacaugcuL96 | 2480 | sense | 21 |
| AGCAUGUUGUUCAUAAUCAUUGA | 1385 | asGfscauGfuUfGfuucaUfaAfucauusgsa | 2481 | antis | 23 |
| AAUUCCCCACUUCAAUACAAA | 1386 | asasuuccCfcAfCfUfucaauacaaaL96 | 2482 | sense | 21 |
| UUUGUAUUGAAGUGGGGAAUUAC | 1387 | usUfsuguAfuUfGfaaguGfgGfgaauusasc | 2483 | antis | 23 |
| AUUCCCCACUUCAAUACAAAG | 1388 | asusucccCfaCfUfUfcaauacaaagL96 | 2484 | sense | 21 |
| CUUUGUAUUGAAGUGGGGAAUUA | 1389 | csUfsuugUfaUfUfgaagUfgGfggaaususa | 2485 | antis | 23 |
| CUGUAAUUCCCCACUUCAAUA | 1390 | csusguaaUfuCfCfCfcacuucaauaL96 | 2486 | sense | 21 |
| UAUUGAAGUGGGGAAUUACAGAC | 1391 | usAfsuugAfaGfUfggggAfaUfuacagsasc | 2487 | antis | 23 |
| UCUGUAAUUCCCCACUUCAAU | 1392 | uscsuguaAfuUfCfCfccacuucaauL96 | 2488 | sense | 21 |
| AUUGAAGUGGGGAAUUACAGACU | 1393 | asUfsugaAfgUfGfgggaAfuUfacagascsu | 2489 | antis | 23 |
| UGAUGUGCGUAACAGAUUCAA | 1394 | usgsauguGfcGfUfAfacagauucaaL96 | 2490 | sense | 21 |
| UUGAAUCUGUUACGCACAUCAUC | 1395 | usUfsgaaUfcUfGfuuacGfcAfcaucasusc | 2491 | antis | 23 |
| GAUGUGCGUAACAGAUUCAAA | 1396 | gsasugugCfgUfAfAfcagauucaaaL96 | 2492 | sense | 21 |
| UUUGAAUCUGUUACGCACAUCAU | 1397 | usUfsugaAfuCfUfguuaCfgCfacaucsasu | 2493 | antis | 23 |
| UGGAUGAUGUGCGUAACAGAU | 1398 | usgsgaugAfuGfUfGfcguaacagauL96 | 2494 | sense | 21 |
| AUCUGUUACGCACAUCAUCCAGA | 1399 | asUfscugUfuAfCfgcacAfuCfauccasgsa | 2495 | antis | 23 |
| CUGGAUGAUGUGCGUAACAGA | 1400 | csusggauGfaUfGfUfgcguaacagaL96 | 2496 | sense | 21 |
| UCUGUUACGCACAUCAUCCAGAC | 1401 | usCfsuguUfaCfGfcacaUfcAfuccagsasc | 2497 | antis | 23 |
| GAAUGGGUGGCGGUAAUUGGU | 1402 | gsasauggGfuGfGfCfgguaauugguL96 | 2498 | sense | 21 |
| ACCAAUUACCGCCACCCAUUCCA | 1403 | asCfscaaUfuAfCfcgccAfcCfcauucscsa | 2499 | antis | 23 |
| AAUGGGUGGCGGUAAUUGGUG | 1404 | asasugggUfgGfCfGfguaauuggugL96 | 2500 | sense | 21 |
| CACCAAUUACCGCCACCCAUUCC | 1405 | csAfsccaAfuUfAfccgcCfaCfccauuscsc | 2501 | antis | 23 |
| AUUGGAAUGGGUGGCGGUAAU | 1406 | asusuggaAfuGfGfGfuggcgguaauL96 | 2502 | sense | 21 |
| AUUACCGCCACCCAUUCCAAUUC | 1407 | asUfsuacCfgCfCfacccAfuUfccaaususc | 2503 | antis | 23 |
| AAUUGGAAUGGGUGGCGGUAA | 1408 | asasuuggAfaUfGfGfguggcgguaaL96 | 2504 | sense | 21 |
| UUACCGCCACCCAUUCCAAUUCU | 1409 | usUfsaccGfcCfAfcccaUfuCfcaauuscsu | 2505 | antis | 23 |
| UCCGGAAUGUUGCUGAAACAG | 1410 | uscscggaAfuGfUfUfgcugaaacagL96 | 2506 | sense | 21 |
| CUGUUUCAGCAACAUUCCGGAGC | 1411 | csUfsguuUfcAfGfcaacAfuUfccggasgsc | 2507 | antis | 23 |
| CCGGAAUGUUGCUGAAACAGA | 1412 | cscsggaaUfgUfUfGfcugaaacagaL96 | 2508 | sense | 21 |
| UCUGUUUCAGCAACAUUCCGGAG | 1413 | usCfsuguUfuCfAfgcaaCfaUfuccggsasg | 2509 | antis | 23 |
| AUGCUCCGGAAUGUUGCUGAA | 1414 | asusgcucCfgGfAfAfuguugcugaaL96 | 2510 | sense | 21 |
| UUCAGCAACAUUCCGGAGCAUCC | 1415 | usUfscagCfaAfCfauucCfgGfagcauscsc | 2511 | antis | 23 |
| GAUGCUCCGGAAUGUUGCUGA | 1416 | gsasugcuCfcGfGfAfauguugcugaL96 | 2512 | sense | 21 |
| UCAGCAACAUUCCGGAGCAUCCU | 1417 | usCfsagcAfaCfAfuuccGfgAfgcaucscsu | 2513 | antis | 23 |
| UGUCCUCGAGAUACUAAAGGA | 1418 | usgsuccuCfgAfGfAfuacuaaaggaL96 | 2514 | sense | 21 |
| UCCUUUAGUAUCUCGAGGACAUC | 1419 | usCfscuuUfaGfUfaucuCfgAfggacasusc | 2515 | antis | 23 |
| GUCCUCGAGAUACUAAAGGAA | 1420 | gsusccucGfaGfAfUfacuaaaggaaL96 | 2516 | sense | 21 |
| UUCCUUUAGUAUCUCGAGGACAU | 1421 | usUfsccuUfuAfGfuaucUfcGfaggacsasu | 2517 | antis | 23 |
| AAGAUGUCCUCGAGAUACUAA | 1422 | asasgaugUfcCfUfCfgagauacuaaL96 | 2518 | sense | 21 |
| UUAGUAUCUCGAGGACAUCUUGA | 1423 | usUfsaguAfuCfUfcgagGfaCfaucuusgsa | 2519 | antis | 23 |
| CAAGAUGUCCUCGAGAUACUA | 1424 | csasagauGfuCfCfUfcgagauacuaL96 | 2520 | sense | 21 |
| UAGUAUCUCGAGGACAUCUUGAA | 1425 | usAfsguaUfcUfCfgaggAfcAfucuugsasa | 2521 | antis | 23 |
| ACAACAUGCUAAAUCAGUACU | 1426 | ascsaacaUfgCfUfAfaaucaguacuL96 | 2522 | sense | 21 |
| AGUACUGAUUUAGCAUGUUGUUC | 1427 | asGfsuacUfgAfUfuuagCfaUfguugususc | 2523 | antis | 23 |
| CAACAUGCUAAAUCAGUACUU | 1428 | csasacauGfcUfAfAfaucaguacuuL96 | 2524 | sense | 21 |
| AAGUACUGAUUUAGCAUGUUGUU | 1429 | asAfsguaCfuGfAfuuuaGfcAfuguugsusu | 2525 | antis | 23 |
| AUGAACAACAUGCUAAAUCAG | 1430 | asusgaacAfaCfAfUfgcuaaaucagL96 | 2526 | sense | 21 |
| CUGAUUUAGCAUGUUGUUCAUAA | 1431 | csUfsgauUfuAfGfcaugUfuGfuucausasa | 2527 | antis | 23 |
| UAUGAACAACAUGCUAAAUCA | 1432 | usasugaaCfaAfCfAfugcuaaaucaL96 | 2528 | sense | 21 |
| UGAUUUAGCAUGUUGUUCAUAAU | 1433 | usGfsauuUfaGfCfauguUfgUfucauasasu | 2529 | antis | 23 |
| GCCAAGGCUGUGUUUGUGGGG | 1434 | gscscaagGfcUfGfUfguuuguggggL96 | 2530 | sense | 21 |
| CCCCACAAACACAGCCUUGGCGC | 1435 | csCfsccaCfaAfAfcacaGfcCfuuggesgsc | 2531 | antis | 23 |
| CCAAGGCUGUGUUUGUGGGGA | 1436 | cscsaaggCfuGfUfGfuuuguggggaL96 | 2532 | sense | 21 |
| UCCCCACAAACACAGCCUUGGCG | 1437 | usCfscccAfcAfAfacacAfgCfcuuggscsg | 2533 | antis | 23 |
| UGGCGCCAAGGCUGUGUUUGU | 1438 | usgsgcgcCfaAfGfGfcuguguuuguL96 | 2534 | sense | 21 |
| ACAAACACAGCCUUGGCGCCAAG | 1439 | asCfsaaaCfaCfAfgccuUfgGfcgccasasg | 2535 | antis | 23 |
| UUGGCGCCAAGGCUGUGUUUG | 1440 | ususggcgCfcAfAfGfgcuguguuugL96 | 2536 | sense | 21 |
| CAAACACAGCCUUGGCGCCAAGA | 1441 | csAfsaacAfcAfGfccuuGfgCfgccaasgsa | 2537 | antis | 23 |
| UGAAAGCUCUGGCUCUUGGCG | 1442 | usgsaaagCfuCfUfGfgcucuuggcgL96 | 2538 | sense | 21 |
| CGCCAAGAGCCAGAGCUUUCAGA | 1443 | csGfsccaAfgAfGfccagAfgCfuuucasgsa | 2539 | antis | 23 |
| GAAAGCUCUGGCUCUUGGCGC | 1444 | gsasaagcUfcUfGfGfcucuuggcgcL96 | 2540 | sense | 21 |
| GCGCCAAGAGCCAGAGCUUUCAG | 1445 | gsCfsgccAfaGfAfgccaGfaGfcuuucsasg | 2541 | antis | 23 |
| GUUCUGAAAGCUCUGGCUCUU | 1446 | gsusucugAfaAfGfCfucuggcucuuL96 | 2542 | sense | 21 |
| AAGAGCCAGAGCUUUCAGAACAU | 1447 | asAfsgagCfcAfGfagcuUfuCfagaacsasu | 2543 | antis | 23 |
| UGUUCUGAAAGCUCUGGCUCU | 1448 | usgsuucuGfaAfAfGfcucuggcucuL96 | 2544 | sense | 21 |
| AGAGCCAGAGCUUUCAGAACAUC | 1449 | asGfsagcCfaGfAfgcuuUfcAfgaacasusc | 2545 | antis | 23 |
| CAGCCACUAUUGAUGUUCUGC | 1450 | csasgccaCfuAfUfUfgauguucugcL96 | 2546 | sense | 21 |
| GCAGAACAUCAAUAGUGGCUGGC | 1451 | gsCfsagaAfcAfUfcaauAfgUfggcugsgsc | 2547 | antis | 23 |
| AGCCACUAUUGAUGUUCUGCC | 1452 | asgsccacUfaUfUfGfauguucugccL96 | 2548 | sense | 21 |
| GGCAGAACAUCAAUAGUGGCUGG | 1453 | gsGfscagAfaCfAfucaaUfaGfuggcusgsg | 2549 | antis | 23 |
| GUGCCAGCCACUAUUGAUGUU | 1454 | gsusgccaGfcCfAfCfuauugauguuL96 | 2550 | sense | 21 |
| AACAUCAAUAGUGGCUGGCACCC | 1455 | asAfscauCfaAfUfagugGfcUfggcacscsc | 2551 | antis | 23 |
| GGUGCCAGCCACUAUUGAUGU | 1456 | gsgsugccAfgCfCfAfcuauugauguL96 | 2552 | sense | 21 |
| ACAUCAAUAGUGGCUGGCACCCC | 1457 | asCfsaucAfaUfAfguggCfuGfgcaccscsc | 2553 | antis | 23 |
| ACAAGGACCGAGAAGUCACCA | 1458 | ascsaaggAfcCfGfAfgaagucaccaL96 | 2554 | sense | 21 |
| UGGUGACUUCUCGGUCCUUGUAG | 1459 | usGfsgugAfcUfUfcucgGfuCfcuugusasg | 2555 | antis | 23 |
| CAAGGACCGAGAAGUCACCAA | 1460 | csasaggaCfcGfAfGfaagucaccaaL96 | 2556 | sense | 21 |
| UUGGUGACUUCUCGGUCCUUGUA | 1461 | usUfsgguGfaCfUfucucGfgUfccuugsusa | 2557 | antis | 23 |
| AUCUACAAGGACCGAGAAGUC | 1462 | asuscuacAfaGfGfAfccgagaagucL96 | 2558 | sense | 21 |
| GACUUCUCGGUCCUUGUAGAUAU | 1463 | gsAfscuuCfuCfGfguccUfuGfuagausasu | 2559 | antis | 23 |
| UAUCUACAAGGACCGAGAAGU | 1464 | usasucuaCfaAfGfGfaccgagaaguL96 | 2560 | sense | 21 |
| ACUUCUCGGUCCUUGUAGAUAUA | 1465 | asCfsuucUfcGfGfuccuUfgUfagauasusa | 2561 | antis | 23 |
| CAGAAUGUGAAAGUCAUCGAC | 1466 | csasgaauGfuGfAfAfagucaucgacL96 | 2562 | sense | 21 |
| GUCGAUGACUUUCACAUUCUGGC | 1467 | gsUfscgaUfgAfCfuuucAfcAfuucugsgsc | 2563 | antis | 23 |
| AGAAUGUGAAAGUCAUCGACA | 1468 | asgsaaugUfgAfAfAfgucaucgacaL96 | 2564 | sense | 21 |
| UGUCGAUGACUUUCACAUUCUGG | 1469 | usGfsucgAfuGfAfcuuuCfaCfauucusgsg | 2565 | antis | 23 |
| GUGCCAGAAUGUGAAAGUCAU | 1470 | gsusgccaGfaAfUfGfugaaagucauL96 | 2566 | sense | 21 |
| AUGACUUUCACAUUCUGGCACCC | 1471 | asUfsgacUfuUfCfacauUfcUfggcacscsc | 2567 | antis | 23 |
| GGUGCCAGAAUGUGAAAGUCA | 1472 | gsgsugccAfgAfAfUfgugaaagucaL96 | 2568 | sense | 21 |
| UGACUUUCACAUUCUGGCACCCA | 1473 | usGfsacuUfuCfAfcauuCfuGfgcaccscsa | 2569 | antis | 23 |
| AGAUGUCCUCGAGAUACUAAA | 1474 | asgsauguCfcUfCfGfagauacuaaaL96 | 2570 | sense | 21 |
| UUUAGUAUCUCGAGGACAUCUUG | 1475 | usUfsuagUfaUfCfucgaGfgAfcaucususg | 2571 | antis | 23 |
| GAUGUCCUCGAGAUACUAAAG | 1476 | gsasugucCfuCfGfAfgauacuaaagL96 | 2572 | sense | 21 |
| CUUUAGUAUCUCGAGGACAUCUU | 1477 | csUfsuuaGfuAfUfcucgAfgGfacaucsusu | 2573 | antis | 23 |
| UUCAAGAUGUCCUCGAGAUAC | 1478 | ususcaagAfuGfUfCfcucgagauacL96 | 2574 | sense | 21 |
| GUAUCUCGAGGACAUCUUGAACA | 1479 | gsUfsaucUfcGfAfggacAfuCfuugaascsa | 2575 | antis | 23 |
| GUUCAAGAUGUCCUCGAGAUA | 1480 | gsusucaaGfaUfGfUfccucgagauaL96 | 2576 | sense | 21 |
| UAUCUCGAGGACAUCUUGAACAC | 1481 | usAfsucuCfgAfGfgacaUfcUfugaacsasc | 2577 | antis | 23 |
| GUGGACUUGCUGCAUAUGUGG | 1482 | gsusggacUfuGfCfUfgcauauguggL96 | 2578 | sense | 21 |
| CCACAUAUGCAGCAAGUCCACUG | 1483 | csCfsacaUfaUfGfcagcAfaGfuccacsusg | 2579 | antis | 23 |
| UGGACUUGCUGCAUAUGUGGC | 1484 | usgsgacuUfgCfUfGfcauauguggcL96 | 2580 | sense | 21 |
| GCCACAUAUGCAGCAAGUCCACU | 1485 | gsCfscacAfuAfUfgcagCfaAfguccascsu | 2581 | antis | 23 |
| GACAGUGGACUUGCUGCAUAU | 1486 | gsascaguGfgAfCfUfugcugcauauL96 | 2582 | sense | 21 |
| AUAUGCAGCAAGUCCACUGUCGU | 1487 | asUfsaugCfaGfCfaaguCfcAfcugucsgsu | 2583 | antis | 23 |
| CGACAGUGGACUUGCUGCAUA | 1488 | csgsacagUfgGfAfCfuugcugcauaL96 | 2584 | sense | 21 |
| UAUGCAGCAAGUCCACUGUCGUC | 1489 | usAfsugcAfgCfAfagucCfaCfugucgsusc | 2585 | antis | 23 |
| AACCAGUACUUUAUCAUUUUC | 1490 | asasccagUfaCfUfUfuaucauuuucL96 | 2586 | sense | 21 |
| GAAAAUGAUAAAGUACUGGUUUC | 1491 | gsAfsaaaUfgAfUfaaagUfaCfugguususc | 2587 | antis | 23 |
| ACCAGUACUUUAUCAUUUUCU | 1492 | ascscaguAfcUfUfUfaucauuuucuL96 | 2588 | sense | 21 |
| AGAAAAUGAUAAAGUACUGGUUU | 1493 | asGfsaaaAfuGfAfuaaaGfuAfcuggususu | 2589 | antis | 23 |
| UUGAAACCAGUACUUUAUCAU | 1494 | ususgaaaCfcAfGfUfacuuuaucauL96 | 2590 | sense | 21 |
| AUGAUAAAGUACUGGUUUCAAAA | 1495 | asUfsgauAfaAfGfuacuGfgUfuucaasasa | 2591 | antis | 23 |
| UUUGAAACCAGUACUUUAUCA | 1496 | ususugaaAfcCfAfGfuacuuuaucaL96 | 2592 | sense | 21 |
| UGAUAAAGUACUGGUUUCAAAAU | 1497 | usGfsauaAfaGfUfacugGfuUfucaaasasu | 2593 | antis | 23 |
| CGAGAAGUCACCAAGAAGCUA | 1498 | csgsagaaGfuCfAfCfcaagaagcuaL96 | 2594 | sense | 21 |
| UAGCUUCUUGGUGACUUCUCGGU | 1499 | usAfsgcuUfcUfUfggugAfcUfucucgsgsu | 2595 | antis | 23 |
| GAGAAGUCACCAAGAAGCUAG | 1500 | gsasgaagUfcAfCfCfaagaagcuagL96 | 2596 | sense | 21 |
| CUAGCUUCUUGGUGACUUCUCGG | 1501 | csUfsagcUfuCfUfugguGfaCfuucucsgsg | 2597 | antis | 23 |
| GGACCGAGAAGUCACCAAGAA | 1502 | gsgsaccgAfgAfAfGfucaccaagaaL96 | 2598 | sense | 21 |
| UUCUUGGUGACUUCUCGGUCCUU | 1503 | usUfscuuGfgUfGfacuuCfuCfgguccsusu | 2599 | antis | 23 |
| AGGACCGAGAAGUCACCAAGA | 1504 | asgsgaccGfaGfAfAfgucaccaagaL96 | 2600 | sense | 21 |
| UCUUGGUGACUUCUCGGUCCUUG | 1505 | usCfsuugGfuGfAfcuucUfcGfguccususg | 2601 | antis | 23 |
| UCAAAGUGUUGGUAAUGCCUG | 1506 | uscsaaagUfgUfUfGfguaaugccugL96 | 2602 | sense | 21 |
| CAGGCAUUACCAACACUUUGAAC | 1507 | csAfsggcAfuUfAfccaaCfaCfuuugasasc | 2603 | antis | 23 |
| CAAAGUGUUGGUAAUGCCUGA | 1508 | csasaaguGfuUfGfGfuaaugccugaL96 | 2604 | sense | 21 |
| UCAGGCAUUACCAACACUUUGAA | 1509 | usCfsaggCfaUfUfaccaAfcAfcuuugsasa | 2605 | antis | 23 |
| AGGUUCAAAGUGUUGGUAAUG | 1510 | asgsguucAfaAfGfUfguugguaaugL96 | 2606 | sense | 21 |
| CAUUACCAACACUUUGAACCUGA | 1511 | csAfsuuaCfcAfAfcacuUfuGfaaccusgsa | 2607 | antis | 23 |
| CAGGUUCAAAGUGUUGGUAAU | 1512 | csasgguuCfaAfAfGfuguugguaauL96 | 2608 | sense | 21 |
| AUUACCAACACUUUGAACCUGAG | 1513 | asUfsuacCfaAfCfacuuUfgAfaccugsasg | 2609 | antis | 23 |
| UAUUACUUGACAAAGAGACAC | 1514 | usasuuacUfuGfAfCfaaagagacacL96 | 2610 | sense | 21 |
| GUGUCUCUUUGUCAAGUAAUACA | 1515 | gsUfsgucUfcUfUfugucAfaGfuaauascsa | 2611 | antis | 23 |
| AUUACUUGACAAAGAGACACU | 1516 | asusuacuUfgAfCfAfaagagacacuL96 | 2612 | sense | 21 |
| AGUGUCUCUUUGUCAAGUAAUAC | 1517 | asGfsuguCfuCfUfuuguCfaAfguaausasc | 2613 | antis | 23 |
| CAUGUAUUACUUGACAAAGAG | 1518 | csasuguaUfuAfCfUfugacaaagagL96 | 2614 | sense | 21 |
| CUCUUUGUCAAGUAAUACAUGCU | 1519 | csUfscuuUfgUfCfaaguAfaUfacaugscsu | 2615 | antis | 23 |
| GCAUGUAUUACUUGACAAAGA | 1520 | gscsauguAfuUfAfCfuugacaaagaL96 | 2616 | sense | 21 |
| UCUUUGUCAAGUAAUACAUGCUG | 1521 | usCfsuuuGfuCfAfaguaAfuAfcaugcsusg | 2617 | antis | 23 |
| AAAGUCAUCGACAAGACAUUG | 1522 | asasagucAfuCfGfAfcaagacauugL96 | 2618 | sense | 21 |
| CAAUGUCUUGUCGAUGACUUUCA | 1523 | csAfsaugUfcUfUfgucgAfuGfacuuuscsa | 2619 | antis | 23 |
| AAGUCAUCGACAAGACAUUGG | 1524 | asasgucaUfcGfAfCfaagacauuggL96 | 2620 | sense | 21 |
| CCAAUGUCUUGUCGAUGACUUUC | 1525 | csCfsaauGfuCfUfugucGfaUfgacuususc | 2621 | antis | 23 |
| UGUGAAAGUCAUCGACAAGAC | 1526 | usgsugaaAfgUfCfAfucgacaagacL96 | 2622 | sense | 21 |
| GUCUUGUCGAUGACUUUCACAUU | 1527 | gsUfscuuGfuCfGfaugaCfuUfucacasusu | 2623 | antis | 23 |
| AUGUGAAAGUCAUCGACAAGA | 1528 | asusgugaAfaGfUfCfaucgacaagaL96 | 2624 | sense | 21 |
| UCUUGUCGAUGACUUUCACAUUC | 1529 | usCfsuugUfcGfAfugacUfuUfcacaususc | 2625 | antis | 23 |
| AUAUGUGGCUAAAGCAAUAGA | 1530 | asusauguGfgCfUfAfaagcaauagaL96 | 2626 | sense | 21 |
| UCUAUUGCUUUAGCCACAUAUGC | 1531 | usCfsuauUfgCfUfuuagCfcAfcauausgsc | 2627 | antis | 23 |
| UAUGUGGCUAAAGCAAUAGAC | 1532 | usasugugGfcUfAfAfagcaauagacL96 | 2628 | sense | 21 |
| GUCUAUUGCUUUAGCCACAUAUG | 1533 | gsUfscuaUfuGfCfuuuaGfcCfacauasusg | 2629 | antis | 23 |
| CUGCAUAUGUGGCUAAAGCAA | 1534 | csusgcauAfuGfUfGfgcuaaagcaaL96 | 2630 | sense | 21 |
| UUGCUUUAGCCACAUAUGCAGCA | 1535 | usUfsgcuUfuAfGfccacAfuAfugcagscsa | 2631 | antis | 23 |
| GCUGCAUAUGUGGCUAAAGCA | 1536 | gscsugcaUfaUfGfUfggcuaaagcaL96 | 2632 | sense | 21 |
| UGCUUUAGCCACAUAUGCAGCAA | 1537 | usGfscuuUfaGfCfcacaUfaUfgcagcsasa | 2633 | antis | 23 |
| AGACGACAGUGGACUUGCUGC | 1538 | asgsacgaCfaGfUfGfgacuugcugcL96 | 2634 | sense | 21 |
| GCAGCAAGUCCACUGUCGUCUCC | 1539 | gsCfsagcAfaGfUfccacUfgUfcgucuscsc | 2635 | antis | 23 |
| GACGACAGUGGACUUGCUGCA | 1540 | gsascgacAfgUfGfGfacuugcugcaL96 | 2636 | sense | 21 |
| UGCAGCAAGUCCACUGUCGUCUC | 1541 | usGfscagCfaAfGfuccaCfuGfucgucsusc | 2637 | antis | 23 |
| UUGGAGACGACAGUGGACUUG | 1542 | ususggagAfcGfAfCfaguggacuugL96 | 2638 | sense | 21 |
| CAAGUCCACUGUCGUCUCCAAAA | 1543 | csAfsaguCfcAfCfugucGfuCfuccaasasa | 2639 | antis | 23 |
| UUUGGAGACGACAGUGGACUU | 1544 | ususuggaGfaCfGfAfcaguggacuuL96 | 2640 | sense | 21 |
| AAGUCCACUGUCGUCUCCAAAAU | 1545 | asAfsgucCfaCfUfgucgUfcUfccaaasasu | 2641 | antis | 23 |
| GGCCACCUCCUCAAUUGAAGA | 1546 | gsgsccacCfuCfCfUfcaauugaagaL96 | 2642 | sense | 21 |
| UCUUCAAUUGAGGAGGUGGCCCA | 1547 | usCfsuucAfaUfUfgaggAfgGfuggccscsa | 2643 | antis | 23 |
| GCCACCUCCUCAAUUGAAGAA | 1548 | gscscaccUfcCfUfCfaauugaagaaL96 | 2644 | sense | 21 |
| UUCUUCAAUUGAGGAGGUGGCCC | 1549 | usUfscuuCfaAfUfugagGfaGfguggcscsc | 2645 | antis | 23 |
| CCUGGGCCACCUCCUCAAUUG | 1550 | cscsugggCfcAfCfCfuccucaauugL96 | 2646 | sense | 21 |
| CAAUUGAGGAGGUGGCCCAGGAA | 1551 | csAfsauuGfaGfGfagguGfgCfccaggsasa | 2647 | antis | 23 |
| UCCUGGGCCACCUCCUCAAUU | 1552 | uscscuggGfcCfAfCfcuccucaauuL96 | 2648 | sense | 21 |
| AAUUGAGGAGGUGGCCCAGGAAC | 1553 | asAfsuugAfgGfAfggugGfcCfcaggasasc | 2649 | antis | 23 |
| UGUAUGUUACUUCUUAGAGAG | 1554 | usgsuaugUfuAfCfUfucuuagagagL96 | 2650 | sense | 21 |
| CUCUCUAAGAAGUAACAUACAUC | 1555 | csUfscucUfaAfGfaaguAfaCfauacasusc | 2651 | antis | 23 |
| GUAUGUUACUUCUUAGAGAGA | 1556 | gsusauguUfaCfUfUfcuuagagagaL96 | 2652 | sense | 21 |
| UCUCUCUAAGAAGUAACAUACAU | 1557 | usCfsucuCfuAfAfgaagUfaAfcauacsasu | 2653 | antis | 23 |
| AGGAUGUAUGUUACUUCUUAG | 1558 | asgsgaugUfaUfGfUfuacuucuuagL96 | 2654 | sense | 21 |
| CUAAGAAGUAACAUACAUCCUAA | 1559 | csUfsaagAfaGfUfaacaUfaCfauccusasa | 2655 | antis | 23 |
| UAGGAUGUAUGUUACUUCUUA | 1560 | usasggauGfuAfUfGfuuacuucuuaL96 | 2656 | sense | 21 |
| UAAGAAGUAACAUACAUCCUAAA | 1561 | usAfsagaAfgUfAfacauAfcAfuccuasasa | 2657 | antis | 23 |
| AAAUGUUUUAGGAUGUAUGUU | 1562 | asasauguUfuUfAfGfgauguauguuL96 | 2658 | sense | 21 |
| AACAUACAUCCUAAAACAUUUGG | 1563 | asAfscauAfcAfUfccuaAfaAfcauuusgsg | 2659 | antis | 23 |
| AAUGUUUUAGGAUGUAUGUUA | 1564 | asasuguuUfuAfGfGfauguauguuaL96 | 2660 | sense | 21 |
| UAACAUACAUCCUAAAACAUUUG | 1565 | usAfsacaUfaCfAfuccuAfaAfacauususg | 2661 | antis | 23 |
| AUCCAAAUGUUUUAGGAUGUA | 1566 | asusccaaAfuGfUfUfuuaggauguaL96 | 2662 | sense | 21 |
| UACAUCCUAAAACAUUUGGAUAU | 1567 | usAfscauCfcUfAfaaacAfuUfuggausasu | 2663 | antis | 23 |
| UAUCCAAAUGUUUUAGGAUGU | 1568 | usasuccaAfaUfGfUfuuuaggauguL96 | 2664 | sense | 21 |
| ACAUCCUAAAACAUUUGGAUAUA | 1569 | asCfsaucCfuAfAfaacaUfuUfggauasusa | 2665 | antis | 23 |
| AUGGGUGGCGGUAAUUGGUGA | 1570 | asusggguGfgCfGfGfuaauuggugaL96 | 2666 | sense | 21 |
| UCACCAAUUACCGCCACCCAUUC | 1571 | usCfsaccAfaUfUfaccgCfcAfcccaususc | 2667 | antis | 23 |
| UGGGUGGCGGUAAUUGGUGAU | 1572 | usgsggugGfcGfGfUfaauuggugauL96 | 2668 | sense | 21 |
| AUCACCAAUUACCGCCACCCAUU | 1573 | asUfscacCfaAfUfuaccGfcCfacccasusu | 2669 | antis | 23 |
| UGGAAUGGGUGGCGGUAAUUG | 1574 | usgsgaauGfgGfUfGfgcgguaauugL96 | 2670 | sense | 21 |
| CAAUUACCGCCACCCAUUCCAAU | 1575 | csAfsauuAfcCfGfccacCfcAfuuccasasu | 2671 | antis | 23 |
| UUGGAAUGGGUGGCGGUAAUU | 1576 | ususggaaUfgGfGfUfggcgguaauuL96 | 2672 | sense | 21 |
| AAUUACCGCCACCCAUUCCAAUU | 1577 | asAfsuuaCfcGfCfcaccCfaUfuccaasusu | 2673 | antis | 23 |
| UUCAAAGUGUUGGUAAUGCCU | 1578 | ususcaaaGfuGfUfUfgguaaugccuL96 | 2674 | sense | 21 |
| AGGCAUUACCAACACUUUGAACC | 1579 | asGfsgcaUfuAfCfcaacAfcUfuugaascsc | 2675 | antis | 23 |
| UCAAAGUGUUGGUAAUGCCUG | 1580 | uscsaaagUfgUfUfGfguaaugccugL96 | 2676 | sense | 21 |
| CAGGCAUUACCAACACUUUGAAC | 1581 | csAfsggcAfuUfAfccaaCfaCfuuugasasc | 2677 | antis | 23 |
| CAGGUUCAAAGUGUUGGUAAU | 1582 | csasgguuCfaAfAfGfuguugguaauL96 | 2678 | sense | 21 |
| AUUACCAACACUUUGAACCUGAG | 1583 | asUfsuacCfaAfCfacuuUfgAfaccugsasg | 2679 | antis | 23 |
| UCAGGUUCAAAGUGUUGGUAA | 1584 | uscsagguUfcAfAfAfguguugguaaL96 | 2680 | sense | 21 |
| UUACCAACACUUUGAACCUGAGC | 1585 | usUfsaccAfaCfAfcuuuGfaAfccugasgsc | 2681 | antis | 23 |
| CCACCUCCUCAAUUGAAGAAG | 1586 | cscsaccuCfcUfCfAfauugaagaagL96 | 2682 | sense | 21 |
| CUUCUUCAAUUGAGGAGGUGGCC | 1587 | csUfsucuUfcAfAfuugaGfgAfgguggscsc | 2683 | antis | 23 |
| CACCUCCUCAAUUGAAGAAGU | 1588 | csasccucCfuCfAfAfuugaagaaguL96 | 2684 | sense | 21 |
| ACUUCUUCAAUUGAGGAGGUGGC | 1589 | asCfsuucUfuCfAfauugAfgGfaggugsgsc | 2685 | antis | 23 |
| UGGGCCACCUCCUCAAUUGAA | 1590 | usgsggccAfcCfUfCfcucaauugaaL96 | 2686 | sense | 21 |
| UUCAAUUGAGGAGGUGGCCCAGG | 1591 | usUfscaaUfuGfAfggagGfuGfgcccasgsg | 2687 | antis | 23 |
| CUGGGCCACCUCCUCAAUUGA | 1592 | csusgggcCfaCfCfUfccucaauugaL96 | 2688 | sense | 21 |
| UCAAUUGAGGAGGUGGCCCAGGA | 1593 | usCfsaauUfgAfGfgaggUfgGfcccagsgsa | 2689 | antis | 23 |
| GAGUGGGUGCCAGAAUGUGAA | 1594 | gsasguggGfuGfCfCfagaaugugaaL96 | 2690 | sense | 21 |
| UUCACAUUCUGGCACCCACUCAG | 1595 | usUfscacAfuUfCfuggcAfcCfcacucsasg | 2691 | antis | 23 |
| AGUGGGUGCCAGAAUGUGAAA | 1596 | asgsugggUfgCfCfAfgaaugugaaaL96 | 2692 | sense | 21 |
| UUUCACAUUCUGGCACCCACUCA | 1597 | usUfsucaCfaUfUfcuggCfaCfccacuscsa | 2693 | antis | 23 |
| CUCUGAGUGGGUGCCAGAAUG | 1598 | csuscugaGfuGfGfGfugccagaaugL96 | 2694 | sense | 21 |
| CAUUCUGGCACCCACUCAGAGCC | 1599 | csAfsuucUfgGfCfacccAfcUfcagagscsc | 2695 | antis | 23 |
| GCUCUGAGUGGGUGCCAGAAU | 1600 | gscsucugAfgUfGfGfgugccagaauL96 | 2696 | sense | 21 |
| AUUCUGGCACCCACUCAGAGCCA | 1601 | asUfsucuGfgCfAfcccaCfuCfagagcscsa | 2697 | antis | 23 |
| GCACUGAUGUUCUGAAAGCUC | 1602 | gscsacugAfuGfUfUfcugaaagcucL96 | 2698 | sense | 21 |
| GAGCUUUCAGAACAUCAGUGCCU | 1603 | gsAfsgcuUfuCfAfgaacAfuCfagugcscsu | 2699 | antis | 23 |
| CACUGAUGUUCUGAAAGCUCU | 1604 | csascugaUfgUfUfCfugaaagcucuL96 | 2700 | sense | 21 |
| AGAGCUUUCAGAACAUCAGUGCC | 1605 | asGfsagcUfuUfCfagaaCfaUfcagugscsc | 2701 | antis | 23 |
| AAAGGCACUGAUGUUCUGAAA | 1606 | asasaggcAfcUfGfAfuguucugaaaL96 | 2702 | sense | 21 |
| UUUCAGAACAUCAGUGCCUUUCC | 1607 | usUfsucaGfaAfCfaucaGfuGfccuuuscsc | 2703 | antis | 23 |
| GAAAGGCACUGAUGUUCUGAA | 1608 | gsasaaggCfaCfUfGfauguucugaaL96 | 2704 | sense | 21 |
| UUCAGAACAUCAGUGCCUUUCCG | 1609 | usUfscagAfaCfAfucagUfgCfcuuucscsg | 2705 | antis | 23 |
| GGGAAGGUGGAAGUCUUCCUG | 1610 | gsgsgaagGfuGfGfAfagucuuccugL96 | 2706 | sense | 21 |
| CAGGAAGACUUCCACCUUCCCUU | 1611 | csAfsggaAfgAfCfuuccAfcCfuucccsusu | 2707 | antis | 23 |
| GGAAGGUGGAAGUCUUCCUGG | 1612 | gsgsaaggUfgGfAfAfgucuuccuggL96 | 2708 | sense | 21 |
| CCAGGAAGACUUCCACCUUCCCU | 1613 | csCfsaggAfaGfAfcuucCfaCfcuuccscsu | 2709 | antis | 23 |
| GGAAGGGAAGGUGGAAGUCUU | 1614 | gsgsaaggGfaAfGfGfuggaagucuuL96 | 2710 | sense | 21 |
| AAGACUUCCACCUUCCCUUCCAC | 1615 | asAfsgacUfuCfCfaccuUfcCfcuuccsasc | 2711 | antis | 23 |
| UGGAAGGGAAGGUGGAAGUCU | 1616 | usgsgaagGfgAfAfGfguggaagucuL96 | 2712 | sense | 21 |
| AGACUUCCACCUUCCCUUCCACA | 1617 | asGfsacuUfcCfAfccuuCfcCfuuccascsa | 2713 | antis | 23 |
| UGCUAAAUCAGUACUUCCAAA | 1618 | usgscuaaAfuCfAfGfuacuuccaaaL96 | 2714 | sense | 21 |
| UUUGGAAGUACUGAUUUAGCAUG | 1619 | usUfsuggAfaGfUfacugAfuUfuagcasusg | 2715 | antis | 23 |
| GCUAAAUCAGUACUUCCAAAG | 1620 | gscsuaaaUfcAfGfUfacuuccaaagL96 | 2716 | sense | 21 |
| CUUUGGAAGUACUGAUUUAGCAU | 1621 | csUfsuugGfaAfGfuacuGfaUfuuagcsasu | 2717 | antis | 23 |
| AACAUGCUAAAUCAGUACUUC | 1622 | asascaugCfuAfAfAfucaguacuucL96 | 2718 | sense | 21 |
| GAAGUACUGAUUUAGCAUGUUGU | 1623 | gsAfsaguAfcUfGfauuuAfgCfauguusgsu | 2719 | antis | 23 |
| CAACAUGCUAAAUCAGUACUU | 1624 | csasacauGfcUfAfAfaucaguacuuL96 | 2720 | sense | 21 |
| AAGUACUGAUUUAGCAUGUUGUU | 1625 | asAfsguaCfuGfAfuuuaGfcAfuguugsusu | 2721 | antis | 23 |
| CCACAACUCAGGAUGAAAAAU | 1626 | cscsacaaCfuCfAfGfgaugaaaaauL96 | 2722 | sense | 21 |
| AUUUUUCAUCCUGAGUUGUGGCG | 1627 | asUfsuuuUfcAfUfccugAfgUfuguggscsg | 2723 | antis | 23 |
| CACAACUCAGGAUGAAAAAUU | 1628 | csascaacUfcAfGfGfaugaaaaauuL96 | 2724 | sense | 21 |
| AAUUUUUCAUCCUGAGUUGUGGC | 1629 | asAfsuuuUfuCfAfuccuGfaGfuugugsgsc | 2725 | antis | 23 |
| GCCGCCACAACUCAGGAUGAA | 1630 | gscscgccAfcAfAfCfucaggaugaaL96 | 2726 | sense | 21 |
| UUCAUCCUGAGUUGUGGCGGCAG | 1631 | usUfscauCfcUfGfaguuGfuGfgcggcsasg | 2727 | antis | 23 |
| UGCCGCCACAACUCAGGAUGA | 1632 | usgsccgcCfaCfAfAfcucaggaugaL96 | 2728 | sense | 21 |
| UCAUCCUGAGUUGUGGCGGCAGU | 1633 | usCfsaucCfuGfAfguugUfgGfcggcasgsu | 2729 | antis | 23 |
| GCAACCGUCUGGAUGAUGUGC | 1634 | gscsaaccGfuCfUfGfgaugaugugcL96 | 2730 | sense | 21 |
| GCACAUCAUCCAGACGGUUGCCC | 1635 | gsCfsacaUfcAfUfccagAfcGfguugescsc | 2731 | antis | 23 |
| CAACCGUCUGGAUGAUGUGCG | 1636 | csasaccgUfcUfGfGfaugaugugcgL96 | 2732 | sense | 21 |
| CGCACAUCAUCCAGACGGUUGCC | 1637 | csGfscacAfuCfAfuccaGfaCfgguugscsc | 2733 | antis | 23 |
| CUGGGCAACCGUCUGGAUGAU | 1638 | csusgggcAfaCfCfGfucuggaugauL96 | 2734 | sense | 21 |
| AUCAUCCAGACGGUUGCCCAGGU | 1639 | asUfscauCfcAfGfacggUfuGfcccagsgsu | 2735 | antis | 23 |
| CCUGGGCAACCGUCUGGAUGA | 1640 | cscsugggCfaAfCfCfgucuggaugaL96 | 2736 | sense | 21 |
| UCAUCCAGACGGUUGCCCAGGUA | 1641 | usCfsaucCfaGfAfcgguUfgCfccaggsusa | 2737 | antis | 23 |
| GCAAAUGAUGAAGAAACUUUG | 1642 | gscsaaauGfaUfGfAfagaaacuuugL96 | 2738 | sense | 21 |
| CAAAGUUUCUUCAUCAUUUGCCC | 1643 | csAfsaagUfuUfCfuucaUfcAfuuugcscsc | 2739 | antis | 23 |
| CAAAUGAUGAAGAAACUUUGG | 1644 | csasaaugAfuGfAfAfgaaacuuuggL96 | 2740 | sense | 21 |
| CCAAAGUUUCUUCAUCAUUUGCC | 1645 | csCfsaaaGfuUfUfcuucAfuCfauuugscsc | 2741 | antis | 23 |
| UGGGGCAAAUGAUGAAGAAAC | 1646 | usgsgggcAfaAfUfGfaugaagaaacL96 | 2742 | sense | 21 |
| GUUUCUUCAUCAUUUGCCCCAGA | 1647 | gsUfsuucUfuCfAfucauUfuGfccccasgsa | 2743 | antis | 23 |
| CUGGGGCAAAUGAUGAAGAAA | 1648 | csusggggCfaAfAfUfgaugaagaaaL96 | 2744 | sense | 21 |
| UUUCUUCAUCAUUUGCCCCAGAC | 1649 | usUfsucuUfcAfUfcauuUfgCfcccagsasc | 2745 | antis | 23 |
| CCAAGGCUGUGUUUGUGGGGA | 1650 | cscsaaggCfuGfUfGfuuuguggggaL96 | 2746 | sense | 21 |
| UCCCCACAAACACAGCCUUGGCG | 1651 | usCfscccAfcAfAfacacAfgCfcuuggscsg | 2747 | antis | 23 |
| CAAGGCUGUGUUUGUGGGGAG | 1652 | csasaggcUfgUfGfUfuuguggggagL96 | 2748 | sense | 21 |
| CUCCCCACAAACACAGCCUUGGC | 1653 | csUfscccCfaCfAfaacaCfaGfccuugsgsc | 2749 | antis | 23 |
| GGCGCCAAGGCUGUGUUUGUG | 1654 | gsgscgccAfaGfGfCfuguguuugugL96 | 2750 | sense | 21 |
| CACAAACACAGCCUUGGCGCCAA | 1655 | csAfscaaAfcAfCfagccUfuGfgcgccsasa | 2751 | antis | 23 |
| UGGCGCCAAGGCUGUGUUUGU | 1656 | usgsgcgcCfaAfGfGfcuguguuuguL96 | 2752 | sense | 21 |
| ACAAACACAGCCUUGGCGCCAAG | 1657 | asCfsaaaCfaCfAfgccuUfgGfcgccasasg | 2753 | antis | 23 |
| ACUGCCGCCACAACUCAGGAU | 1658 | ascsugccGfcCfAfCfaacucaggauL96 | 2754 | sense | 21 |
| AUCCUGAGUUGUGGCGGCAGUUU | 1659 | asUfsccuGfaGfUfugugGfcGfgcagususu | 2755 | antis | 23 |
| CUGCCGCCACAACUCAGGAUG | 1660 | csusgccgCfcAfCfAfacucaggaugL96 | 2756 | sense | 21 |
| CAUCCUGAGUUGUGGCGGCAGUU | 1661 | csAfsuccUfgAfGfuuguGfgCfggcagsusu | 2757 | antis | 23 |
| UCAAACUGCCGCCACAACUCA | 1662 | uscsaaacUfgCfCfGfccacaacucaL96 | 2758 | sense | 21 |
| UGAGUUGUGGCGGCAGUUUGAAU | 1663 | usGfsaguUfgUfGfgcggCfaGfuuugasasu | 2759 | antis | 23 |
| UUCAAACUGCCGCCACAACUC | 1664 | ususcaaaCfuGfCfCfgccacaacucL96 | 2760 | sense | 21 |
| GAGUUGUGGCGGCAGUUUGAAUC | 1665 | gsAfsguuGfuGfGfcggcAfgUfuugaasusc | 2761 | antis | 23 |
| GGGAAGAUAUCAAAUGGCUGA | 1666 | gsgsgaagAfuAfUfCfaaauggcugaL96 | 2762 | sense | 21 |
| UCAGCCAUUUGAUAUCUUCCCAG | 1667 | usCfsagcCfaUfUfugauAfuCfuucccsasg | 2763 | antis | 23 |
| GGAAGAUAUCAAAUGGCUGAG | 1668 | gsgsaagaUfaUfCfAfaauggcugagL96 | 2764 | sense | 21 |
| CUCAGCCAUUUGAUAUCUUCCCA | 1669 | csUfscagCfcAfUfuugaUfaUfcuuccscsa | 2765 | antis | 23 |
| AGCUGGGAAGAUAUCAAAUGG | 1670 | asgscuggGfaAfGfAfuaucaaauggL96 | 2766 | sense | 21 |
| CCAUUUGAUAUCUUCCCAGCUGA | 1671 | csCfsauuUfgAfUfaucuUfcCfcagcusgsa | 2767 | antis | 23 |
| CAGCUGGGAAGAUAUCAAAUG | 1672 | csasgcugGfgAfAfGfauaucaaaugL96 | 2768 | sense | 21 |
| CAUUUGAUAUCUUCCCAGCUGAU | 1673 | csAfsuuuGfaUfAfucuuCfcCfagcugsasu | 2769 | antis | 23 |
| AAUCAGUACUUCCAAAGUCUA | 1674 | asasucagUfaCfUfUfccaaagucuaL96 | 2770 | sense | 21 |
| UAGACUUUGGAAGUACUGAUUUA | 1675 | usAfsgacUfuUfGfgaagUfaCfugauususa | 2771 | antis | 23 |
| AUCAGUACUUCCAAAGUCUAU | 1676 | asuscaguAfcUfUfCfcaaagucuauL96 | 2772 | sense | 21 |
| AUAGACUUUGGAAGUACUGAUUU | 1677 | asUfsagaCfuUfUfggaaGfuAfcugaususu | 2773 | antis | 23 |
| GCUAAAUCAGUACUUCCAAAG | 1678 | gscsuaaaUfcAfGfUfacuuccaaagL96 | 2774 | sense | 21 |
| CUUUGGAAGUACUGAUUUAGCAU | 1679 | csUfsuugGfaAfGfuacuGfaUfuuagcsasu | 2775 | antis | 23 |
| UGCUAAAUCAGUACUUCCAAA | 1680 | usgscuaaAfuCfAfGfuacuuccaaaL96 | 2776 | sense | 21 |
| UUUGGAAGUACUGAUUUAGCAUG | 1681 | usUfsuggAfaGfUfacugAfuUfuagcasusg | 2777 | antis | 23 |
| UCAGCAUGCCAAUAUGUGUGG | 1682 | uscsagcaUfgCfCfAfauauguguggL96 | 2778 | sense | 21 |
| CCACACAUAUUGGCAUGCUGACC | 1683 | csCfsacaCfaUfAfuuggCfaUfgcugascsc | 2779 | antis | 23 |
| CAGCAUGCCAAUAUGUGUGGG | 1684 | csasgcauGfcCfAfAfuaugugugggL96 | 2780 | sense | 21 |
| CCCACACAUAUUGGCAUGCUGAC | 1685 | csCfscacAfcAfUfauugGfcAfugcugsasc | 2781 | antis | 23 |
| AGGGUCAGCAUGCCAAUAUGU | 1686 | asgsggucAfgCfAfUfgccaauauguL96 | 2782 | sense | 21 |
| ACAUAUUGGCAUGCUGACCCUCU | 1687 | asCfsauaUfuGfGfcaugCfuGfacccuscsu | 2783 | antis | 23 |
| GAGGGUCAGCAUGCCAAUAUG | 1688 | gsasggguCfaGfCfAfugccaauaugL96 | 2784 | sense | 21 |
| CAUAUUGGCAUGCUGACCCUCUG | 1689 | csAfsuauUfgGfCfaugcUfgAfcccucsusg | 2785 | antis | 23 |
| GCAUAUGUGGCUAAAGCAAUA | 1690 | gscsauauGfuGfGfCfuaaagcaauaL96 | 2786 | sense | 21 |
| UAUUGCUUUAGCCACAUAUGCAG | 1691 | usAfsuugCfuUfUfagccAfcAfuaugcsasg | 2787 | antis | 23 |
| CAUAUGUGGCUAAAGCAAUAG | 1692 | csasuaugUfgGfCfUfaaagcaauagL96 | 2788 | sense | 21 |
| CUAUUGCUUUAGCCACAUAUGCA | 1693 | csUfsauuGfcUfUfuagcCfaCfauaugscsa | 2789 | antis | 23 |
| UGCUGCAUAUGUGGCUAAAGC | 1694 | usgscugcAfuAfUfGfuggcuaaagcL96 | 2790 | sense | 21 |
| GCUUUAGCCACAUAUGCAGCAAG | 1695 | gsCfsuuuAfgCfCfacauAfuGfcagcasasg | 2791 | antis | 23 |
| UUGCUGCAUAUGUGGCUAAAG | 1696 | ususgcugCfaUfAfUfguggcuaaagL96 | 2792 | sense | 21 |
| CUUUAGCCACAUAUGCAGCAAGU | 1697 | csUfsuuaGfcCfAfcauaUfgCfagcaasgsu | 2793 | antis | 23 |
| AAAUGAUGAAGAAACUUUGGC | 1698 | asasaugaUfgAfAfGfaaacuuuggcL96 | 2794 | sense | 21 |
| GCCAAAGUUUCUUCAUCAUUUGC | 1699 | gsCfscaaAfgUfUfucuuCfaUfcauuusgsc | 2795 | antis | 23 |
| AAUGAUGAAGAAACUUUGGCU | 1700 | asasugauGfaAfGfAfaacuuuggcuL96 | 2796 | sense | 21 |
| AGCCAAAGUUUCUUCAUCAUUUG | 1701 | asGfsccaAfaGfUfuucuUfcAfucauususg | 2797 | antis | 23 |
| GGGCAAAUGAUGAAGAAACUU | 1702 | gsgsgcaaAfuGfAfUfgaagaaacuuL96 | 2798 | sense | 21 |
| AAGUUUCUUCAUCAUUUGCCCCA | 1703 | asAfsguuUfcUfUfcaucAfuUfugcccscsa | 2799 | antis | 23 |
| GGGGCAAAUGAUGAAGAAACU | 1704 | gsgsggcaAfaUfGfAfugaagaaacuL96 | 2800 | sense | 21 |
| AGUUUCUUCAUCAUUUGCCCCAG | 1705 | asGfsuuuCfuUfCfaucaUfuUfgccccsasg | 2801 | antis | 23 |
| GAGAUACUAAAGGAAGAAUUC | 1706 | gsasgauaCfuAfAfAfggaagaauucL96 | 2802 | sense | 21 |
| GAAUUCUUCCUUUAGUAUCUCGA | 1707 | gsAfsauuCfuUfCfcuuuAfgUfaucucsgsa | 2803 | antis | 23 |
| AGAUACUAAAGGAAGAAUUCC | 1708 | asgsauacUfaAfAfGfgaagaauuccL96 | 2804 | sense | 21 |
| GGAAUUCUUCCUUUAGUAUCUCG | 1709 | gsGfsaauUfcUfUfccuuUfaGfuaucuscsg | 2805 | antis | 23 |
| CCUCGAGAUACUAAAGGAAGA | 1710 | cscsucgaGfaUfAfCfuaaaggaagaL96 | 2806 | sense | 21 |
| UCUUCCUUUAGUAUCUCGAGGAC | 1711 | usCfsuucCfuUfUfaguaUfcUfcgaggsasc | 2807 | antis | 23 |
| UCCUCGAGAUACUAAAGGAAG | 1712 | uscscucgAfgAfUfAfcuaaaggaagL96 | 2808 | sense | 21 |
| CUUCCUUUAGUAUCUCGAGGACA | 1713 | csUfsuccUfuUfAfguauCfuCfgaggascsa | 2809 | antis | 23 |
| ACAACUCAGGAUGAAAAAUUU | 1714 | ascsaacuCfaGfGfAfugaaaaauuuL96 | 2810 | sense | 21 |
| AAAUUUUUCAUCCUGAGUUGUGG | 1715 | asAfsauuUfuUfCfauccUfgAfguugusgsg | 2811 | antis | 23 |
| CAACUCAGGAUGAAAAAUUUU | 1716 | csasacucAfgGfAfUfgaaaaauuuuL96 | 2812 | sense | 21 |
| AAAAUUUUUCAUCCUGAGUUGUG | 1717 | asAfsaauUfuUfUfcaucCfuGfaguugsusg | 2813 | antis | 23 |
| CGCCACAACUCAGGAUGAAAA | 1718 | csgsccacAfaCfUfCfaggaugaaaaL96 | 2814 | sense | 21 |
| UUUUCAUCCUGAGUUGUGGCGGC | 1719 | usUfsuucAfuCfCfugagUfuGfuggcgsgsc | 2815 | antis | 23 |
| CCGCCACAACUCAGGAUGAAA | 1720 | cscsgccaCfaAfCfUfcaggaugaaaL96 | 2816 | sense | 21 |
| UUUCAUCCUGAGUUGUGGCGGCA | 1721 | usUfsucaUfcCfUfgaguUfgUfggcggscsa | 2817 | antis | 23 |
| AGGGAAGGUGGAAGUCUUCCU | 1722 | asgsggaaGfgUfGfGfaagucuuccuL96 | 2818 | sense | 21 |
| AGGAAGACUUCCACCUUCCCUUC | 1723 | asGfsgaaGfaCfUfuccaCfcUfucccususc | 2819 | antis | 23 |
| GGGAAGGUGGAAGUCUUCCUG | 1724 | gsgsgaagGfuGfGfAfagucuuccugL96 | 2820 | sense | 21 |
| CAGGAAGACUUCCACCUUCCCUU | 1725 | csAfsggaAfgAfCfuuccAfcCfuucccsusu | 2821 | antis | 23 |
| UGGAAGGGAAGGUGGAAGUCU | 1726 | usgsgaagGfgAfAfGfguggaagucuL96 | 2822 | sense | 21 |
| AGACUUCCACCUUCCCUUCCACA | 1727 | asGfsacuUfcCfAfccuuCfcCfuuccascsa | 2823 | antis | 23 |
| GUGGAAGGGAAGGUGGAAGUC | 1728 | gsusggaaGfgGfAfAfgguggaagucL96 | 2824 | sense | 21 |
| GACUUCCACCUUCCCUUCCACAG | 1729 | gsAfscuuCfcAfCfcuucCfcUfuccacsasg | 2825 | antis | 23 |
| GGCGAGCUUGCCACUGUGAGA | 1730 | gsgscgagCfuUfGfCfcacugugagaL96 | 2826 | sense | 21 |
| UCUCACAGUGGCAAGCUCGCCGU | 1731 | usCfsucaCfaGfUfggcaAfgCfucgccsgsu | 2827 | antis | 23 |
| GCGAGCUUGCCACUGUGAGAG | 1732 | gscsgagcUfuGfCfCfacugugagagL96 | 2828 | sense | 21 |
| CUCUCACAGUGGCAAGCUCGCCG | 1733 | csUfscucAfcAfGfuggcAfaGfcucgcscsg | 2829 | antis | 23 |
| GGACGGCGAGCUUGCCACUGU | 1734 | gsgsacggCfgAfGfCfuugccacuguL96 | 2830 | sense | 21 |
| ACAGUGGCAAGCUCGCCGUCCAC | 1735 | asCfsaguGfgCfAfagcuCfgCfcguccsasc | 2831 | antis | 23 |
| UGGACGGCGAGCUUGCCACUG | 1736 | usgsgacgGfcGfAfGfcuugccacugL96 | 2832 | sense | 21 |
| CAGUGGCAAGCUCGCCGUCCACA | 1737 | csAfsgugGfcAfAfgcucGfcCfguccascsa | 2833 | antis | 23 |
| AUGUGCGUAACAGAUUCAAAC | 1738 | asusgugcGfuAfAfCfagauucaaacL96 | 2834 | sense | 21 |
| GUUUGAAUCUGUUACGCACAUCA | 1739 | gsUfsuugAfaUfCfuguuAfcGfcacauscsa | 2835 | antis | 23 |
| UGUGCGUAACAGAUUCAAACU | 1740 | usgsugcgUfaAfCfAfgauucaaacuL96 | 2836 | sense | 21 |
| AGUUUGAAUCUGUUACGCACAUC | 1741 | asGfsuuuGfaAfUfcuguUfaCfgcacasusc | 2837 | antis | 23 |
| GAUGAUGUGCGUAACAGAUUC | 1742 | gsasugauGfuGfCfGfuaacagauucL96 | 2838 | sense | 21 |
| GAAUCUGUUACGCACAUCAUCCA | 1743 | gsAfsaucUfgUfUfacgcAfcAfucaucscsa | 2839 | antis | 23 |
| GGAUGAUGUGCGUAACAGAUU | 1744 | gsgsaugaUfgUfGfCfguaacagauuL96 | 2840 | sense | 21 |
| AAUCUGUUACGCACAUCAUCCAG | 1745 | asAfsucuGfuUfAfcgcaCfaUfcauccsasg | 2841 | antis | 23 |
| GGGUCAGCAUGCCAAUAUGUG | 1746 | gsgsgucaGfcAfUfGfccaauaugugL96 | 2842 | sense | 21 |
| CACAUAUUGGCAUGCUGACCCUC | 1747 | csAfscauAfuUfGfgcauGfcUfgaccesusc | 2843 | antis | 23 |
| GGUCAGCAUGCCAAUAUGUGU | 1748 | gsgsucagCfaUfGfCfcaauauguguL96 | 2844 | sense | 21 |
| ACACAUAUUGGCAUGCUGACCCU | 1749 | asCfsacaUfaUfUfggcaUfgCfugacescsu | 2845 | antis | 23 |
| CAGAGGGUCAGCAUGCCAAUA | 1750 | csasgaggGfuCfAfGfcaugccaauaL96 | 2846 | sense | 21 |
| UAUUGGCAUGCUGACCCUCUGUC | 1751 | usAfsuugGfcAfUfgcugAfcCfcucugsusc | 2847 | antis | 23 |
| ACAGAGGGUCAGCAUGCCAAU | 1752 | ascsagagGfgUfCfAfgcaugccaauL96 | 2848 | sense | 21 |
| AUUGGCAUGCUGACCCUCUGUCC | 1753 | asUfsuggCfaUfGfcugaCfcCfucuguscsc | 2849 | antis | 23 |
| GCUUGAAUGGGAUCUUGGUGU | 1754 | gscsuugaAfuGfGfGfaucuugguguL96 | 2850 | sense | 21 |
| ACACCAAGAUCCCAUUCAAGCCA | 1755 | asCfsaccAfaGfAfucccAfuUfcaagcscsa | 2851 | antis | 23 |
| CUUGAAUGGGAUCUUGGUGUC | 1756 | csusugaaUfgGfGfAfucuuggugucL96 | 2852 | sense | 21 |
| GACACCAAGAUCCCAUUCAAGCC | 1757 | gsAfscacCfaAfGfauccCfaUfucaagscsc | 2853 | antis | 23 |
| CAUGGCUUGAAUGGGAUCUUG | 1758 | csasuggcUfuGfAfAfugggaucuugL96 | 2854 | sense | 21 |
| CAAGAUCCCAUUCAAGCCAUGUU | 1759 | csAfsagaUfcCfCfauucAfaGfccaugsusu | 2855 | antis | 23 |
| ACAUGGCUUGAAUGGGAUCUU | 1760 | ascsauggCfuUfGfAfaugggaucuuL96 | 2856 | sense | 21 |
| AAGAUCCCAUUCAAGCCAUGUUU | 1761 | asAfsgauCfcCfAfuucaAfgCfcaugususu | 2857 | antis | 23 |
| UCAAAUGGCUGAGAAGACUGA | 1762 | uscsaaauGfgCfUfGfagaagacugaL96 | 2858 | sense | 21 |
| UCAGUCUUCUCAGCCAUUUGAUA | 1763 | usCfsaguCfuUfCfucagCfcAfuuugasusa | 2859 | antis | 23 |
| CAAAUGGCUGAGAAGACUGAC | 1764 | csasaaugGfcUfGfAfgaagacugacL96 | 2860 | sense | 21 |
| GUCAGUCUUCUCAGCCAUUUGAU | 1765 | gsUfscagUfcUfUfcucaGfcCfauuugsasu | 2861 | antis | 23 |
| GAUAUCAAAUGGCUGAGAAGA | 1766 | gsasuaucAfaAfUfGfgcugagaagaL96 | 2862 | sense | 21 |
| UCUUCUCAGCCAUUUGAUAUCUU | 1767 | usCfsuucUfcAfGfccauUfuGfauaucsusu | 2863 | antis | 23 |
| AGAUAUCAAAUGGCUGAGAAG | 1768 | asgsauauCfaAfAfUfggcugagaagL96 | 2864 | sense | 21 |
| CUUCUCAGCCAUUUGAUAUCUUC | 1769 | csUfsucuCfaGfCfcauuUfgAfuaucususc | 2865 | antis | 23 |
| GAAAGUCAUCGACAAGACAUU | 1770 | gsasaaguCfaUfCfGfacaagacauuL96 | 2866 | sense | 21 |
| AAUGUCUUGUCGAUGACUUUCAC | 1771 | asAfsuguCfuUfGfucgaUfgAfcuuucsasc | 2867 | antis | 23 |
| AAAGUCAUCGACAAGACAUUG | 1772 | asasagucAfuCfGfAfcaagacauugL96 | 2868 | sense | 21 |
| CAAUGUCUUGUCGAUGACUUUCA | 1773 | csAfsaugUfcUfUfgucgAfuGfacuuuscsa | 2869 | antis | 23 |
| AUGUGAAAGUCAUCGACAAGA | 1774 | asusgugaAfaGfUfCfaucgacaagaL96 | 2870 | sense | 21 |
| UCUUGUCGAUGACUUUCACAUUC | 1775 | usCfsuugUfcGfAfugacUfuUfcacaususc | 2871 | antis | 23 |
| AAUGUGAAAGUCAUCGACAAG | 1776 | asasugugAfaAfGfUfcaucgacaagL96 | 2872 | sense | 21 |
| CUUGUCGAUGACUUUCACAUUCU | 1777 | csUfsuguCfgAfUfgacuUfuCfacauuscsu | 2873 | antis | 23 |
| GGCUAAUUUGUAUCAAUGAUU | 1778 | gsgscuaaUfuUfGfUfaucaaugauuL96 | 2874 | sense | 21 |
| AAUCAUUGAUACAAAUUAGCCGG | 1779 | asAfsucaUfuGfAfuacaAfaUfuagccsgsg | 2875 | antis | 23 |
| GCUAAUUUGUAUCAAUGAUUA | 1780 | gscsuaauUfuGfUfAfucaaugauuaL96 | 2876 | sense | 21 |
| UAAUCAUUGAUACAAAUUAGCCG | 1781 | usAfsaucAfuUfGfauacAfaAfuuagcscsg | 2877 | antis | 23 |
| CCCCGGCUAAUUUGUAUCAAU | 1782 | cscsccggCfuAfAfUfuuguaucaauL96 | 2878 | sense | 21 |
| AUUGAUACAAAUUAGCCGGGGGA | 1783 | asUfsugaUfaCfAfaauuAfgCfcggggsgsa | 2879 | antis | 23 |
| CCCCCGGCUAAUUUGUAUCAA | 1784 | cscscccgGfcUfAfAfuuuguaucaaL96 | 2880 | sense | 21 |
| UUGAUACAAAUUAGCCGGGGGAG | 1785 | usUfsgauAfcAfAfauuaGfcCfgggggsasg | 2881 | antis | 23 |
| UGUCGACUUCUGUUUUAGGAC | 1786 | usgsucgaCfuUfCfUfguuuuaggacL96 | 2882 | sense | 21 |
| GUCCUAAAACAGAAGUCGACAGA | 1787 | gsUfsccuAfaAfAfcagaAfgUfcgacasgsa | 2883 | antis | 23 |
| GUCGACUUCUGUUUUAGGACA | 1788 | gsuscgacUfuCfUfGfuuuuaggacaL96 | 2884 | sense | 21 |
| UGUCCUAAAACAGAAGUCGACAG | 1789 | usGfsuccUfaAfAfacagAfaGfucgacsasg | 2885 | antis | 23 |
| GAUCUGUCGACUUCUGUUUUA | 1790 | gsasucugUfcGfAfCfuucuguuuuaL96 | 2886 | sense | 21 |
| UAAAACAGAAGUCGACAGAUCUG | 1791 | usAfsaaaCfaGfAfagucGfaCfagaucsusg | 2887 | antis | 23 |
| AGAUCUGUCGACUUCUGUUUU | 1792 | asgsaucuGfuCfGfAfcuucuguuuuL96 | 2888 | sense | 21 |
| AAAACAGAAGUCGACAGAUCUGU | 1793 | asAfsaacAfgAfAfgucgAfcAfgaucusgsu | 2889 | antis | 23 |
| CCGAGAAGUCACCAAGAAGCU | 1794 | cscsgagaAfgUfCfAfccaagaagcuL96 | 2890 | sense | 21 |
| AGCUUCUUGGUGACUUCUCGGUC | 1795 | asGfscuuCfuUfGfgugaCfuUfcucggsusc | 2891 | antis | 23 |
| CGAGAAGUCACCAAGAAGCUA | 1796 | csgsagaaGfuCfAfCfcaagaagcuaL96 | 2892 | sense | 21 |
| UAGCUUCUUGGUGACUUCUCGGU | 1797 | usAfsgcuUfcUfUfggugAfcUfucucgsgsu | 2893 | antis | 23 |
| AGGACCGAGAAGUCACCAAGA | 1798 | asgsgaccGfaGfAfAfgucaccaagaL96 | 2894 | sense | 21 |
| UCUUGGUGACUUCUCGGUCCUUG | 1799 | usCfsuugGfuGfAfcuucUfcGfguccususg | 2895 | antis | 23 |
| AAGGACCGAGAAGUCACCAAG | 1800 | asasggacCfgAfGfAfagucaccaagL96 | 2896 | sense | 21 |
| CUUGGUGACUUCUCGGUCCUUGU | 1801 | csUfsuggUfgAfCfuucuCfgGfuccuusgsu | 2897 | antis | 23 |
| AAACAUGGCUUGAAUGGGAUC | 1802 | asasacauGfgCfUfUfgaaugggaucL96 | 2898 | sense | 21 |
| GAUCCCAUUCAAGCCAUGUUUAA | 1803 | gsAfsuccCfaUfUfcaagCfcAfuguuusasa | 2899 | antis | 23 |
| AACAUGGCUUGAAUGGGAUCU | 1804 | asascaugGfcUfUfGfaaugggaucuL96 | 2900 | sense | 21 |
| AGAUCCCAUUCAAGCCAUGUUUA | 1805 | asGfsaucCfcAfUfucaaGfcCfauguususa | 2901 | antis | 23 |
| UGUUAAACAUGGCUUGAAUGG | 1806 | usgsuuaaAfcAfUfGfgcuugaauggL96 | 2902 | sense | 21 |
| CCAUUCAAGCCAUGUUUAACAGC | 1807 | csCfsauuCfaAfGfccauGfuUfuaacasgsc | 2903 | antis | 23 |
| CUGUUAAACAUGGCUUGAAUG | 1808 | csusguuaAfaCfAfUfggcuugaaugL96 | 2904 | sense | 21 |
| CAUUCAAGCCAUGUUUAACAGCC | 1809 | csAfsuucAfaGfCfcaugUfuUfaacagscsc | 2905 | antis | 23 |
| GACUUGCUGCAUAUGUGGCUA | 1810 | gsascuugCfuGfCfAfuauguggcuaL96 | 2906 | sense | 21 |
| UAGCCACAUAUGCAGCAAGUCCA | 1811 | usAfsgccAfcAfUfaugcAfgCfaagucscsa | 2907 | antis | 23 |
| ACUUGCUGCAUAUGUGGCUAA | 1812 | ascsuugcUfgCfAfUfauguggcuaaL96 | 2908 | sense | 21 |
| UUAGCCACAUAUGCAGCAAGUCC | 1813 | usUfsagcCfaCfAfuaugCfaGfcaaguscsc | 2909 | antis | 23 |
| AGUGGACUUGCUGCAUAUGUG | 1814 | asgsuggaCfuUfGfCfugcauaugugL96 | 2910 | sense | 21 |
| CACAUAUGCAGCAAGUCCACUGU | 1815 | csAfscauAfuGfCfagcaAfgUfccacusgsu | 2911 | antis | 23 |
| CAGUGGACUUGCUGCAUAUGU | 1816 | csasguggAfcUfUfGfcugcauauguL96 | 2912 | sense | 21 |
| ACAUAUGCAGCAAGUCCACUGUC | 1817 | asCfsauaUfgCfAfgcaaGfuCfcacugsusc | 2913 | antis | 23 |
| UAAAUCAGUACUUCCAAAGUC | 1818 | usasaaucAfgUfAfCfuuccaaagucL96 | 2914 | sense | 21 |
| GACUUUGGAAGUACUGAUUUAGC | 1819 | gsAfscuuUfgGfAfaguaCfuGfauuuasgsc | 2915 | antis | 23 |
| AAAUCAGUACUUCCAAAGUCU | 1820 | asasaucaGfuAfCfUfuccaaagucuL96 | 2916 | sense | 21 |
| AGACUUUGGAAGUACUGAUUUAG | 1821 | asGfsacuUfuGfGfaaguAfcUfgauuusasg | 2917 | antis | 23 |
| AUGCUAAAUCAGUACUUCCAA | 1822 | asusgcuaAfaUfCfAfguacuuccaaL96 | 2918 | sense | 21 |
| UUGGAAGUACUGAUUUAGCAUGU | 1823 | usUfsggaAfgUfAfcugaUfuUfagcausgsu | 2919 | antis | 23 |
| CAUGCUAAAUCAGUACUUCCA | 1824 | csasugcuAfaAfUfCfaguacuuccaL96 | 2920 | sense | 21 |
| UGGAAGUACUGAUUUAGCAUGUU | 1825 | usGfsgaaGfuAfCfugauUfuAfgcaugsusu | 2921 | antis | 23 |
| UCCUCAAUUGAAGAAGUGGCG | 1826 | uscscucaAfuUfGfAfagaaguggcgL96 | 2922 | sense | 21 |
| CGCCACUUCUUCAAUUGAGGAGG | 1827 | csGfsccaCfuUfCfuucaAfuUfgaggasgsg | 2923 | antis | 23 |
| CCUCAAUUGAAGAAGUGGCGG | 1828 | cscsucaaUfuGfAfAfgaaguggcggL96 | 2924 | sense | 21 |
| CCGCCACUUCUUCAAUUGAGGAG | 1829 | csCfsgccAfcUfUfcuucAfaUfugaggsasg | 2925 | antis | 23 |
| CACCUCCUCAAUUGAAGAAGU | 1830 | csasccucCfuCfAfAfuugaagaaguL96 | 2926 | sense | 21 |
| ACUUCUUCAAUUGAGGAGGUGGC | 1831 | asCfsuucUfuCfAfauugAfgGfaggugsgsc | 2927 | antis | 23 |
| CCACCUCCUCAAUUGAAGAAG | 1832 | cscsaccuCfcUfCfAfauugaagaagL96 | 2928 | sense | 21 |
| CUUCUUCAAUUGAGGAGGUGGCC | 1833 | csUfsucuUfcAfAfuugaGfgAfgguggscsc | 2929 | antis | 23 |
| CAAGAUGUCCUCGAGAUACUA | 1834 | csasagauGfuCfCfUfcgagauacuaL96 | 2930 | sense | 21 |
| UAGUAUCUCGAGGACAUCUUGAA | 1835 | usAfsguaUfcUfCfgaggAfcAfucuugsasa | 2931 | antis | 23 |
| AAGAUGUCCUCGAGAUACUAA | 1836 | asasgaugUfcCfUfCfgagauacuaaL96 | 2932 | sense | 21 |
| UUAGUAUCUCGAGGACAUCUUGA | 1837 | usUfsaguAfuCfUfcgagGfaCfaucuusgsa | 2933 | antis | 23 |
| UGUUCAAGAUGUCCUCGAGAU | 1838 | usgsuucaAfgAfUfGfuccucgagauL96 | 2934 | sense | 21 |
| AUCUCGAGGACAUCUUGAACACC | 1839 | asUfscucGfaGfGfacauCfuUfgaacascsc | 2935 | antis | 23 |
| GUGUUCAAGAUGUCCUCGAGA | 1840 | gsusguucAfaGfAfUfguccucgagaL96 | 2936 | sense | 21 |
| UCUCGAGGACAUCUUGAACACCU | 1841 | usCfsucgAfgGfAfcaucUfuGfaacacscsu | 2937 | antis | 23 |
| ACAUGCUAAAUCAGUACUUCC | 1842 | ascsaugcUfaAfAfUfcaguacuuccL96 | 2938 | sense | 21 |
| GGAAGUACUGAUUUAGCAUGUUG | 1843 | gsGfsaagUfaCfUfgauuUfaGfcaugususg | 2939 | antis | 23 |
| CAUGCUAAAUCAGUACUUCCA | 1844 | csasugcuAfaAfUfCfaguacuuccaL96 | 2940 | sense | 21 |
| UGGAAGUACUGAUUUAGCAUGUU | 1845 | usGfsgaaGfuAfCfugauUfuAfgcaugsusu | 2941 | antis | 23 |
| AACAACAUGCUAAAUCAGUAC | 1846 | asascaacAfuGfCfUfaaaucaguacL96 | 2942 | sense | 21 |
| GUACUGAUUUAGCAUGUUGUUCA | 1847 | gsUfsacuGfaUfUfuagcAfuGfuuguuscsa | 2943 | antis | 23 |
| GAACAACAUGCUAAAUCAGUA | 1848 | gsasacaaCfaUfGfCfuaaaucaguaL96 | 2944 | sense | 21 |
| UACUGAUUUAGCAUGUUGUUCAU | 1849 | usAfscugAfuUfUfagcaUfgUfuguucsasu | 2945 | antis | 23 |
| GAAAGGCACUGAUGUUCUGAA | 1850 | gsasaaggCfaCfUfGfauguucugaaL96 | 2946 | sense | 21 |
| UUCAGAACAUCAGUGCCUUUCCG | 1851 | usUfscagAfaCfAfucagUfgCfcuuucscsg | 2947 | antis | 23 |
| AAAGGCACUGAUGUUCUGAAA | 1852 | asasaggcAfcUfGfAfuguucugaaaL96 | 2948 | sense | 21 |
| UUUCAGAACAUCAGUGCCUUUCC | 1853 | usUfsucaGfaAfCfaucaGfuGfccuuuscsc | 2949 | antis | 23 |
| UGCGGAAAGGCACUGAUGUUC | 1854 | usgscggaAfaGfGfCfacugauguucL96 | 2950 | sense | 21 |
| GAACAUCAGUGCCUUUCCGCACA | 1855 | gsAfsacaUfcAfGfugccUfuUfccgcascsa | 2951 | antis | 23 |
| GUGCGGAAAGGCACUGAUGUU | 1856 | gsusgcggAfaAfGfGfcacugauguuL96 | 2952 | sense | 21 |
| AACAUCAGUGCCUUUCCGCACAC | 1857 | asAfscauCfaGfUfgccuUfuCfcgcacsasc | 2953 | antis | 23 |
| GUCAGCAUGCCAAUAUGUGUG | 1858 | gsuscagcAfuGfCfCfaauaugugugL96 | 2954 | sense | 21 |
| CACACAUAUUGGCAUGCUGACCC | 1859 | csAfscacAfuAfUfuggcAfuGfcugacscsc | 2955 | antis | 23 |
| UCAGCAUGCCAAUAUGUGUGG | 1860 | uscsagcaUfgCfCfAfauauguguggL96 | 2956 | sense | 21 |
| CCACACAUAUUGGCAUGCUGACC | 1861 | csCfsacaCfaUfAfuuggCfaUfgcugascsc | 2957 | antis | 23 |
| GAGGGUCAGCAUGCCAAUAUG | 1862 | gsasggguCfaGfCfAfugccaauaugL96 | 2958 | sense | 21 |
| CAUAUUGGCAUGCUGACCCUCUG | 1863 | csAfsuauUfgGfCfaugcUfgAfcccucsusg | 2959 | antis | 23 |
| AGAGGGUCAGCAUGCCAAUAU | 1864 | asgsagggUfcAfGfCfaugccaauauL96 | 2960 | sense | 21 |
| AUAUUGGCAUGCUGACCCUCUGU | 1865 | asUfsauuGfgCfAfugcuGfaCfccucusgsu | 2961 | antis | 23 |
| GAUGCUCCGGAAUGUUGCUGA | 1866 | gsasugcuCfcGfGfAfauguugcugaL96 | 2962 | sense | 21 |
| UCAGCAACAUUCCGGAGCAUCCU | 1867 | usCfsagcAfaCfAfuuccGfgAfgcaucscsu | 2963 | antis | 23 |
| AUGCUCCGGAAUGUUGCUGAA | 1868 | asusgcucCfgGfAfAfuguugcugaaL96 | 2964 | sense | 21 |
| UUCAGCAACAUUCCGGAGCAUCC | 1869 | usUfscagCfaAfCfauucCfgGfagcauscsc | 2965 | antis | 23 |
| CAAGGAUGCUCCGGAAUGUUG | 1870 | csasaggaUfgCfUfCfcggaauguugL96 | 2966 | sense | 21 |
| CAACAUUCCGGAGCAUCCUUGGA | 1871 | csAfsacaUfuCfCfggagCfaUfccuugsgsa | 2967 | antis | 23 |
| CCAAGGAUGCUCCGGAAUGUU | 1872 | cscsaaggAfuGfCfUfccggaauguuL96 | 2968 | sense | 21 |
| AACAUUCCGGAGCAUCCUUGGAU | 1873 | asAfscauUfcCfGfgagcAfuCfcuuggsasu | 2969 | antis | 23 |
| GCGUAACAGAUUCAAACUGCC | 1874 | gscsguaaCfaGfAfUfucaaacugccL96 | 2970 | sense | 21 |
| GGCAGUUUGAAUCUGUUACGCAC | 1875 | gsGfscagUfuUfGfaaucUfgUfuacgcsasc | 2971 | antis | 23 |
| CGUAACAGAUUCAAACUGCCG | 1876 | csgsuaacAfgAfUfUfcaaacugccgL96 | 2972 | sense | 21 |
| CGGCAGUUUGAAUCUGUUACGCA | 1877 | csGfsgcaGfuUfUfgaauCfuGfuuacgscsa | 2973 | antis | 23 |
| AUGUGCGUAACAGAUUCAAAC | 1878 | asusgugcGfuAfAfCfagauucaaacL96 | 2974 | sense | 21 |
| GUUUGAAUCUGUUACGCACAUCA | 1879 | gsUfsuugAfaUfCfuguuAfcGfcacauscsa | 2975 | antis | 23 |
| GAUGUGCGUAACAGAUUCAAA | 1880 | gsasugugCfgUfAfAfcagauucaaaL96 | 2976 | sense | 21 |
| UUUGAAUCUGUUACGCACAUCAU | 1881 | usUfsugaAfuCfUfguuaCfgCfacaucsasu | 2977 | antis | 23 |
| AGAGAAGAUGGGCUACAAGGC | 1882 | asgsagaaGfaUfGfGfgcuacaaggcL96 | 2978 | sense | 21 |
| GCCUUGUAGCCCAUCUUCUCUGC | 1883 | gsCfscuuGfuAfGfcccaUfcUfucucusgsc | 2979 | antis | 23 |
| GAGAAGAUGGGCUACAAGGCC | 1884 | gsasgaagAfuGfGfGfcuacaaggccL96 | 2980 | sense | 21 |
| GGCCUUGUAGCCCAUCUUCUCUG | 1885 | gsGfsccuUfgUfAfgcccAfuCfuucucsusg | 2981 | antis | 23 |
| AGGCAGAGAAGAUGGGCUACA | 1886 | asgsgcagAfgAfAfGfaugggcuacaL96 | 2982 | sense | 21 |
| UGUAGCCCAUCUUCUCUGCCUGC | 1887 | usGfsuagCfcCfAfucuuCfuCfugccusgsc | 2983 | antis | 23 |
| CAGGCAGAGAAGAUGGGCUAC | 1888 | csasggcaGfaGfAfAfgaugggcuacL96 | 2984 | sense | 21 |
| GUAGCCCAUCUUCUCUGCCUGCC | 1889 | gsUfsagcCfcAfUfcuucUfcUfgccugscsc | 2985 | antis | 23 |

### Example 17: Phase III Clinical Trial of AD-65585

[0599] A Phase III, randomized, double-blind, placebo-controlled study is conducted to evaluate the efficacy, safety, pharmacokinetics and pharmacodynamics of subcutaneously administered AD-65585 in infants and young children (n=18) with confirmed primary hyperoxaluria type 1 (PH1).

[0600] The unmodified nucleotide sequence to the sense strand of AD-65585 is 5′-GACUUUCAUCCUGGAAAUAUA-3′ (SEQ ID NO:589) and the unmodified nucleotide sequence of the antisense strand of AD-65585 is 5′-UAUAUUUCCAGGAUGAAAGUCCA-3′ (SEQ ID NO:706). The modified nucleotide sequence to the sense strand of AD-65585 is 5′-gsascuuuCfaUfCfCfuggaaauauaL96-3′ (SEQ ID NO:213) and the modified nucleotide sequence of the antisense strand of AD-65585 is 5′-usAfsuauUfuCfCfaggaUfgAfaagucscsa-3′ (SEQ ID NO:330) Subjects are treated using different regimens based on their body weight and/or ages at the time of initiation of treatment. The Table below provides the treatment regimens.

| Body Weight at | Approximate Age | | | |
|---|---|---|---|---|
| Time of | At Time of | | | |
| Initiation of | Initiation of | | | Maintenance |
| Treatment | Treatment | | Loading Dose | Dose |
| <10 kg | 0-1 | year | 6 mg/kg ×3 qM | 3 mg/kg qM |
| ≥10 to <20 kg | 1-6 | year | 6 mg/kg ×3 qM | 6 mg/kg q3M |
| ≥20 kg | >6 | years | 3 mg/kg ×3 qM | 3 mg/kg q3M |

qM = every month
q3M = every three months

[0601] The primary outcome measure is the percentage change in urinary oxalate excretion from baseline to month 6. The secondary outcome measures include (1) percentage change in urinary oxalate excretion from baseline to end of study (month 60) (time frame: up to 60 months); (2) absolute change in urinary oxalate excretion from baseline (time frame: up to 60 months); (3) percentage of time that spot urinary oxalate:creatinine ratio≤near-normalization threshold (≤1.5×uln) (time frame: up to 60 months); (4) percentage of participants with urinary oxalate excretion≤the upper limit of normal (uln) and ≤1.5×uln (time frame: up to 60 months); (5) percentage change in plasma oxalate from baseline to end of study (month 60) (time frame: up to 60 months); (6) absolute change in plasma oxalate from baseline to end of study (month 60) (time frame: up to 60 months); (7) maximum observed plasma concentration (cmax) of AD-65585 (time frame: up to 24 months); (8) time to maximum observed plasma concentration (tmax) of AD-65585 (time frame: up to 24 months]; (9) elimination half-life (t1/2beta) of AD-65585 (time frame: up to 24 months); (10) area under the concentration-time curve (auc) of AD-65585 (time frame: up to 24 months); (11) apparent clearance (cl/f) of AD-65585 (time frame: up to 24 months); (12) apparent volume of distribution (v/f) of AD-65585 (time frame: up to 24 months); (13) change in estimated glomerular filtration rate (egfr) from baseline (time frame: up to 60 months) and (14) frequency of adverse events (aes) (time frame: up to 60 months).

[0602] The inclusion criteria for entry into this study include confirmation of primary hyperoxaluria type 1 (PH1); meets urinary oxalate excretion requirements; and if taking Vitamin B6 (pyridoxine), must have been on stable regimen for at least 90 days.

[0603] The exclusion criteria for entry into this study include abnormal serum creatinine levels at screening for infants who are less than 1 year old; does not have relatively preserved kidney function; clinical evidence of systemic oxalosis; and history of kidney or liver transplant.

The application's sequence listing, which the Patent Office published only in electronic form, follows.

SEQUENCE LISTING (2992 sequences)

SEQ ID NO: 1 - DNA, 1746 bp, Homo sapiens
  source 1..1746: mol_type = genomic DNA
ctgggatagcaataacctgtgaaaatgctcccccggctaatttgtatcaatgattatgaacaacatgctaaatcagtacttccaaagtctatatatgactattacaggtctggggcaaatgatgaagaaactttggctgataatattgcagcattttccagatggaagctgtatccaaggatgctccggaatgttgctgaaacagatctgtcgacttctgttttaggacagagggtcagcatgccaatatgtgtgggggctacggccatgcagcgcatggctcatgtggacggcgagcttgccactgtgagagcctgtcagtccctgggaacgggcatgatgttgagttcctgggccacctcctcaattgaagaagtggcggaagctggtcctgaggcacttcgttggctgcaactgtatatctacaaggaccgagaagtcaccaagaagctagtgcggcaggcagagaagatgggctacaaggccatatttgtgacagtggacacaccttacctgggcaaccgtctggatgatgtgcgtaacagattcaaactgccgccacaactcaggatgaaaaattttgaaaccagtactttatcattttctcctgaggaaaattttggagacgacagtggacttgctgcatatgtggctaaagcaatagacccatctatcagctgggaagatatcaaatggctgagaagactgacatcattgccaattgttgcaaagggcattttgagaggtgatgatgccagggaggctgttaaacatggcttgaatgggatcttggtgtcgaatcatggggctcgacaactcgatggggtgccagccactattgatgttctgccagaaattgtggaggctgtggaagggaaggtggaagtcttcctggacgggggtgtgcggaaaggcactgatgttctgaaagctctggctcttggcgccaaggctgtgtttgtggggagaccaatcgtttggggcttagctttccagggggagaaaggtgttcaagatgtcctcgagatactaaaggaagaattccggttggccatggctctgagtgggtgccagaatgtgaaagtcatcgacaagacattggtgaggaaaaatcctttggccgtttccaagatctgacagtgcacaatattttcccatctgtattattttttttcagcatgtattacttgacaaagagacactgtgcagagggtgaccacagtctgtaattccccacttcaatacaaagggtgtcgttcttttccaacaaaatagcaatcccttttatttcattgcttttgacttttcaatgggtgtcctaggaaccttttagaaagaaatggactttcatcctggaaatatattaactgttaaaaagaaaacattgaaaatgtgtttagacaacgtcatcccctggcaggctaaagtgctgtatcctttagtaaaattggaggtagcaaacactaaggtgaaaagataatgatctcattgtttattaacctgtattctgtttacatgtctttaaaacagtggttcttaaattgtaagctcaggttcaaagtgttggtaatgcctgattcacaactttgagaaggtagcactggagagaattggaatgggtggcggtaattggtgatacttctttgaatgtagatttccaatcacatctttagtgtctgaatatatccaaatgttttaggatgtatgttacttcttagagagaaataaagcatttttgggaagaat

SEQ ID NO: 2 - DNA, 2029 bp, Mus musculus
  source 1..2029: mol_type = genomic DNA
ggttgccctaccctgccacaatgttgcctcgactggtctgcatcagtgattatgaacagcatgtccgatcagtgcttcagaagtcagtgtatgactattacaggtctggggcaaatgatcaggagacgttagctgataacatccaagcattttctagatggaagctctatccacggatgcttcgcaacgttgctgatatcgatctgtcaacttctgttttaggacagagagtcagcatgccaatatgtgttggggctactgccatgcagtgcatggctcacgtggacggggagctggccactgtgcgagcctgtcagaccatgggaactggcatgatgctgagttcttgggctacctcctcaatagaagaagtggcagaagctggcccagaggcacttcgctggatgcaactgtacatctacaaagaccgtgagatcagcagacagatagtgaagcgagctgagaagcagggttacaaggccatatttgtgactgtggacaccccttacctgggcaaccgcattgatgacgtgcggaacaggttcaagctgccaccacaactcaggatgaaaaactttgaaaccaatgatttggcattttctcctaagggaaattttggagacaacagtggacttgctgaatatgtggcacaagctatagacccatctctcagctgggatgatattacatggctcagacgattgacatcactgcctattgttgtaaagggcattttgagaggtgatgatgccaaggaagctgttaaacatggtgtggatgggatcttggtgtcgaatcatggggcgcgacaactggatggggtgccagctactattgatgtcctgccagagattgttgaggctgtggaagggaaggtagaagtcttcctggatgggggagtaaggaaaggtactgatgttctcaaagctctggccctaggagccaaggccgtttttgtgggaagacccatcatctggggcttggctttccagggggagaaaggtttcaagatgtcctcgagatattgaaggaagaattccgactggccatggctctgagtgggtgccagaatgtggaaagtcatcgacaagacattggtgaggaaaaatcctttggctgtttccaagatctgacagtgcacaatattttcccatctgtattattttttttccagcgtggattacttgacaaagagacactgtgcagagggtgaccacagactgtaactccccacttctatacaaagggtgtcgttcttttccaacaaaatagccaccccttttccttcattgcttttgacttttcaatgggtgtcctaggaaccttctagaaagaaatggacttgcatcctggaaatatattaactgttaaaaagaaaacattgaaaatgtgtttgggcaacgtcatcccctggcaggctaaagtgctggggaacaaaagatatcctctggtgagattgcaggtagcatgctgaagtgaaagatactgacctcactgttcattaacctgtcttctgtttagatttccttaagacagtggctcttacagtttgcacttggctttgaaatgctggaaatgcccagagaaacatgaggtttggatttgccatgttgagaaaatagcaccaggtagaattgaaatggatggtggtaatttgtgattttttttctagaaacttttcattttttaacaccctatttttttgaaggtagatttttagctatatatcacacgtctgaatatgtctggatgttttgtggcactcattgcatttgaaagggatgtgtctagtccagttgggaccacatggagctatttttacttttgaactttgtctcctcattctcattttaaaataagtgttgacttcctaattcctcttgaatcttttttgattttctcacttttcctcatttatagtcacattcagtgtaaagtacatattttgtggggtccgtgatgaataaagatttgaaattcttgttcagaaggaaggcaaaaaaaaaaaaaagtctttccttttatcaca

SEQ ID NO: 3 - DNA, 1746 bp, Homo sapiens
  source 1..1746: mol_type = genomic DNA
attcttcccaaaaatgctttatttctctctaagaagtaacatacatcctaaaacatttggatatattcagacactaaagatgtgattggaaatctacattcaaagaagtatcaccaattaccgccacccattccaattctctccagtgctaccttctcaaagttgtgaatcaggcattaccaacactttgaacctgagcttacaatttaagaaccactgttttaaagacatgtaaacagaatacaggttaataaacaatgagatcattatcttttcaccttagtgtttgctacctccaattttactaaaggatacagcactttagcctgccaggggatgacgttgtctaaacacattttcaatgttttctttttaacagttaatatatttccaggatgaaagtccatttctttctaaaaggttcctaggacacccattgaaaagtcaaaagcaatgaaataaaagggattgctattttgttggaaaagaacgacaccctttgtattgaagtggggaattacagactgtggtcaccctctgcacagtgtctctttgtcaagtaatacatgctgaaaaaaaataatacagatgggaaaatattgtgcactgtcagatcttggaaacggccaaaggatttttcctcaccaatgtcttgtcgatgactttcacattctggcacccactcagagccatggccaaccggaattcttcctttagtatctcgaggacatcttgaacacctttctccccctggaaagctaagccccaaacgattggtctccccacaaacacagccttggcgccaagagccagagctttcagaacatcagtgcctttccgcacacccccgtccaggaagacttccaccttcccttccacagcctccacaatttctggcagaacatcaatagtggctggcaccccatcgagttgtcgagccccatgattcgacaccaagatcccattcaagccatgtttaacagcctccctggcatcatcacctctcaaaatgccctttgcaacaattggcaatgatgtcagtcttctcagccatttgatatcttcccagctgatagatgggtctattgctttagccacatatgcagcaagtccactgtcgtctccaaaattttcctcaggagaaaatgataaagtactggtttcaaaatttttcatcctgagttgtggcggcagtttgaatctgttacgcacatcatccagacggttgcccaggtaaggtgtgtccactgtcacaaatatggccttgtagcccatcttctctgcctgccgcactagcttcttggtgacttctcggtccttgtagatatacagttgcagccaacgaagtgcctcaggaccagcttccgccacttcttcaattgaggaggtggcccaggaactcaacatcatgcccgttcccagggactgacaggctctcacagtggcaagctcgccgtccacatgagccatgcgctgcatggccgtagcccccacacatattggcatgctgaccctctgtcctaaaacagaagtcgacagatctgtttcagcaacattccggagcatccttggatacagcttccatctggaaaatgctgcaatattatcagccaaagtttcttcatcatttgccccagacctgtaatagtcatatatagactttggaagtactgatttagcatgttgttcataatcattgatacaaattagccgggggagcattttcacaggttattgctatcccag

SEQ ID NO: 4 - DNA, 2029 bp, Mus musculus
  source 1..2029: mol_type = genomic DNA
tgtgataaaaggaaagacttttttttttttttgccttccttctgaacaagaatttcaaatctttattcatcacggaccccacaaaatatgtactttacactgaatgtgactataaatgaggaaaagtgagaaaatcaaaaaagattcaagaggaattaggaagtcaacacttattttaaaatgagaatgaggagacaaagttcaaaagtaaaaatagctccatgtggtcccaactggactagacacatccctttcaaatgcaatgagtgccacaaaacatccagacatattcagacgtgtgatatatagctaaaaatctaccttcaaaaaaatagggtgttaaaaaatgaaaagtttctagaaaaaaaatcacaaattaccaccatccatttcaattctacctggtgctattttctcaacatggcaaatccaaacctcatgtttctctgggcatttccagcatttcaaagccaagtgcaaactgtaagagccactgtcttaaggaaatctaaacagaagacaggttaatgaacagtgaggtcagtatctttcacttcagcatgctacctgcaatctcaccagaggatatcttttgttccccagcactttagcctgccaggggatgacgttgcccaaacacattttcaatgttttctttttaacagttaatatatttccaggatgcaagtccatttctttctagaaggttcctaggacacccattgaaaagtcaaaagcaatgaaggaaaaggggtggctattttgttggaaaagaacgacaccctttgtatagaagtggggagttacagtctgtggtcaccctctgcacagtgtctctttgtcaagtaatccacgctggaaaaaaaataatacagatgggaaaatattgtgcactgtcagatcttggaaacagccaaaggatttttcctcaccaatgtcttgtcgatgactttcacattctggcacccactcagagccatggccagtcggaattcttccttcaatatctcgaggacatcttgaacacctttctccccctggaaagccaagccccagatgatgggtcttcccacaaaaacggccttggctcctagggccagagctttgagaacatcagtacctttccttactcccccatccaggaagacttctaccttcccttccacagcctcaacaatctctggcaggacatcaatagtagctggcaccccatccagttgtcgcgccccatgattcgacaccaagatcccatccacaccatgtttaacagcttccttggcatcatcacctctcaaaatgccctttacaacaataggcagtgatgtcaatcgtctgagccatgtaatatcatcccagctgagagatgggtctatagcttgtgccacatattcagcaagtccactgttgtctccaaaatttcccttaggagaaaatgccaaatcattggtttcaaagtttttcatcctgagttgtggtggcagcttgaacctgttccgcacgtcatcaatgcggttgcccaggtaaggggtgtccacagtcacaaatatggccttgtaaccctgcttctcagctcgcttcactatctgtctgctgatctcacggtctttgtagatgtacagttgcatccagcgaagtgcctctgggccagcttctgccacttcttctattgaggaggtagcccaagaactcagcatcatgccagttcccatggtctgacaggctcgcacagtggccagctccccgtccacgtgagccatgcactgcatggcagtagccccaacacatattggcatgctgactctctgtcctaaaacagaagttgacagatcgatatcagcaacgttgcgaagcatccgtggatagagcttccatctagaaaatgcttggatgttatcagctaacgtctcctgatcatttgccccagacctgtaatagtcatacactgacttctgaagcactgatcggacatgctgttcataatcactgatgcagaccagtcgaggcaacattgtggcagggtagggcaacc

SEQ ID NO: 5 - DNA, 1801 bp, Macaca fascicularis
  source 1..1801: mol_type = genomic DNA
gtgaggatgtagaaagcaatacattaaaaaaaacccaaaaaactccatctgggataacaataacctgtgaaaatgctcccccggctaatttgtatcaatgattatgaacaacatgctaaatcagtacttccaaagtctatatatgactattataggtctggagcaaatgatgaagaaactttggccgataatgttgcagcattttccagatggaagctgtatccaaggatgctccggaatgttgctgaaacagatctgtcgacttctgttttaggacagagggtcagcatgccaatatgcgtgggggccacggccatgcagcgcatggctcatgtggatggcgagcttgccactgtgcgagcctgtcagtccctgggaacgggcatgatgttgagttcctgggccacctcctcaattgaagaagtggcagaagctggtcctgaggcacttcgttggttgtaactgtatatctataaggaccgagaagtcaccaagaagctggtgcagcaggcagagaagacgggctacaaggccatatttgtgacagtggacacaccttacctgggcaaccgtcttgatgatgtacgtaacagattcaagctgccaccacaactcaggatgaaaaattttgaaaccagtactttatcattttctcctgaggaaaattttggagatgacagtggacttgctgcatatgtggctaaagcgatagacccatctatcagctgggaagatatcaaatggctgagaagactgacgtcattgccaattgttgcaaagggcattttgagaggtgatgatgccagggaggctgttaaacatggcttgaatgggatcttggtgtcgaatcatggggctcgacaactcgatggggtgccagccactattgatgttctgccagaaattgtggaggccgtggaagggaaggtggaagtcttcctggacgggggtgtgcggaaaggcactgatgttctgaaagctctggctcttggcgccaaggctgtgtttgtggggagaccaatcatttggggcttagctttccagggggagaaaggtgttcaagatgtccttgagatactaaaggaagaattccggttggccatggctttgagtgggtgccagaatgtgaaagtcatcgacaagacattggtgaggaaaaatcctttggccgtttccaagatctgacagtgcacaatattttcccatctgtattatttttttttcagcatgtattacttgacaaagagacactgtgcagagggtgaccacagtctgtaattccccacttcaatacaaaggatgtcgttcttttccaacaaaatagcaatcccttttagttcattgcttttgacttttcaatgggtgtcctaggaaccttttagaaagaaatggactttcatcctggaaatatattaactgttaaaaagaaaacattgaaaatgtgtttagacaacgtcatcctctggcaggctaaagtactgtatcctttagtaaaattggaggtagcaaacactaaggtgaaaagataatgatctcattgtttattaacctgtattctgtttagatgtctttaaaacagtggttcttaaattgtaagctcaggttcaaagcattggaaatgcctgattgacaacattgagaaggtagccctggatagaattggaatggatggcagtaactggtgatacttctttgaatgcagctttccaatcacatctttagtgtctgaatatatccaaatgttttaggatatatgttacttcttaatcagagagaaataaagcattttttgggaaggata

SEQ ID NO: 6 - DNA, 1936 bp, Rattus norvegicus
  source 1..1936: mol_type = genomic DNA
atactgccttgctggctttggaaattctagagtttctgaggcatagtagacttggtgacctccaagttctaaccgagcagaaagagtctcatggcttctgtgactactatagtggaagctctatccacggatgctgcgcaacgttgctgatatcgacctgtcgacttctgttttaggacagagagtgagcatgccaatatgcgttggggctacggctatgcagtgcatggctcatgtggatggggagctggccactgttcgagcctgtcagaccatgggaactggcatgatgttgagttcctgggccacttcctcaatagaagaggtggcagaggctggcccggaggcacttcgctggatgcaactctacatctacaaagatcgtgaggtcagcagtcagctagtgaagagggctgagcagatgggttacaaggccatatttgtgactgtggacaccccttacctgggaaatcgcttcgatgatgtgcggaacaggttcaagctaccaccacagctcaggatgaaaaactttgaaaccaacgatttggcattttctcctaaggggaattttggagacaacagtggccttgctgaatatgtggcacaagccatagacccatctctcagctgggatgatattaaatggctcagacggttgacctcactgcccattgttgtaaagggaattttgagaggtgatgatgcccaggaagctgttaaacatggtgtggatgggatcttagtgtcgaatcatggggcacgacaactggatggggtgccagctactattgatgccctgccagagatcgttgaggctgtggaagggaaggtagaagtcttcctggatgggggagtcaggaaaggcaccgatgttctcaaagctctggccctgggagccagagctgtttttgtggggagacccatcatctggggcttggctttccagggggagaaaggtgttcaagatgtcctcgagatactgaaggaagagttccggctggccatggctctgagtgggtgccagaatgtgaaagtcatcgacaagacattggtgaggaaaaatcctttggctgtttccaagatctgacagtgcacaatattttcccatctgtattatttttttccagcatggattacttgacaaagagacactgtgcagagggtgaccacagactgtaactccccacttcaacacaaagggtgtcgttcttttccaacaaaatagccaccccttctccttcattgcttttgacttttcaatgggtgtcctaggaaccttctagaaagaaatggacttgcatcctggaaatatattaactgttaaaaagaaaacattgaaaatgtgtttgggcaacgtcatcccctggcaggctaaagtgagggggaacaaaagatatcctctggtgagattggaggtagcatgccgaagtaaaagacactgacctcactgtttattaacctgtcttctgtttagatttccttaagacagtggctcttacagtgtgcgctgggctttgaaatgccggaaatgcccagagaaacatggggtttggatttgccgtgttgagaaaatagcacccgatagaattgaaacggatggtggtaatttgtgatttttctagagacttttcattttttaacaccctatttctttgaaggtggatttctagctatatatcgcatgtctgaatatgtctggctgttttgtggcactcactgtgtttgaaaggaatgtgtctagtccacttgggaccatgcaaagttattttatttttgaactctgtctcttcattcccattttaaagtaagtgttgacttcctaattccccttgaatcatttttattttctcacttctcatttatagtcacattcagtgtcaagtatatattttgtggggtccatggtgaataaagctttaaaattcttgtccagaaa

SEQ ID NO: 7 - DNA, 1801 bp, Macaca fascicularis
  source 1..1801: mol_type = genomic DNA
tatccttcccaaaaaatgctttatttctctctgattaagaagtaacatatatcctaaaacatttggatatattcagacactaaagatgtgattggaaagctgcattcaaagaagtatcaccagttactgccatccattccaattctatccagggctaccttctcaatgttgtcaatcaggcatttccaatgctttgaacctgagcttacaatttaagaaccactgttttaaagacatctaaacagaatacaggttaataaacaatgagatcattatcttttcaccttagtgtttgctacctccaattttactaaaggatacagtactttagcctgccagaggatgacgttgtctaaacacattttcaatgttttctttttaacagttaatatatttccaggatgaaagtccatttctttctaaaaggttcctaggacacccattgaaaagtcaaaagcaatgaactaaaagggattgctattttgttggaaaagaacgacatcctttgtattgaagtggggaattacagactgtggtcaccctctgcacagtgtctctttgtcaagtaatacatgctgaaaaaaaaataatacagatgggaaaatattgtgcactgtcagatcttggaaacggccaaaggatttttcctcaccaatgtcttgtcgatgactttcacattctggcacccactcaaagccatggccaaccggaattcttcctttagtatctcaaggacatcttgaacacctttctccccctggaaagctaagccccaaatgattggtctccccacaaacacagccttggcgccaagagccagagctttcagaacatcagtgcctttccgcacacccccgtccaggaagacttccaccttcccttccacggcctccacaatttctggcagaacatcaatagtggctggcaccccatcgagttgtcgagccccatgattcgacaccaagatcccattcaagccatgtttaacagcctccctggcatcatcacctctcaaaatgccctttgcaacaattggcaatgacgtcagtcttctcagccatttgatatcttcccagctgatagatgggtctatcgctttagccacatatgcagcaagtccactgtcatctccaaaattttcctcaggagaaaatgataaagtactggtttcaaaatttttcatcctgagttgtggtggcagcttgaatctgttacgtacatcatcaagacggttgcccaggtaaggtgtgtccactgtcacaaatatggccttgtagcccgtcttctctgcctgctgcaccagcttcttggtgacttctcggtccttatagatatacagttacaaccaacgaagtgcctcaggaccagcttctgccacttcttcaattgaggaggtggcccaggaactcaacatcatgcccgttcccagggactgacaggctcgcacagtggcaagctcgccatccacatgagccatgcgctgcatggccgtggcccccacgcatattggcatgctgaccctctgtcctaaaacagaagtcgacagatctgtttcagcaacattccggagcatccttggatacagcttccatctggaaaatgctgcaacattatcggccaaagtttcttcatcatttgctccagacctataatagtcatatatagactttggaagtactgatttagcatgttgttcataatcattgatacaaattagccgggggagcattttcacaggttattgttatcccagatggagttttttgggttttttttaatgtattgctttctacatcctcac

SEQ ID NO: 8 - DNA, 1936 bp, Rattus norvegicus
  source 1..1936: mol_type = genomic DNA
tttctggacaagaattttaaagctttattcaccatggaccccacaaaatatatacttgacactgaatgtgactataaatgagaagtgagaaaataaaaatgattcaaggggaattaggaagtcaacacttactttaaaatgggaatgaagagacagagttcaaaaataaaataactttgcatggtcccaagtggactagacacattcctttcaaacacagtgagtgccacaaaacagccagacatattcagacatgcgatatatagctagaaatccaccttcaaagaaatagggtgttaaaaaatgaaaagtctctagaaaaatcacaaattaccaccatccgtttcaattctatcgggtgctattttctcaacacggcaaatccaaaccccatgtttctctgggcatttccggcatttcaaagcccagcgcacactgtaagagccactgtcttaaggaaatctaaacagaagacaggttaataaacagtgaggtcagtgtcttttacttcggcatgctacctccaatctcaccagaggatatcttttgttccccctcactttagcctgccaggggatgacgttgcccaaacacattttcaatgttttctttttaacagttaatatatttccaggatgcaagtccatttctttctagaaggttcctaggacacccattgaaaagtcaaaagcaatgaaggagaaggggtggctattttgttggaaaagaacgacaccctttgtgttgaagtggggagttacagtctgtggtcaccctctgcacagtgtctctttgtcaagtaatccatgctggaaaaaaataatacagatgggaaaatattgtgcactgtcagatcttggaaacagccaaaggatttttcctcaccaatgtcttgtcgatgactttcacattctggcacccactcagagccatggccagccggaactcttccttcagtatctcgaggacatcttgaacacctttctccccctggaaagccaagccccagatgatgggtctccccacaaaaacagctctggctcccagggccagagctttgagaacatcggtgcctttcctgactcccccatccaggaagacttctaccttcccttccacagcctcaacgatctctggcagggcatcaatagtagctggcaccccatccagttgtcgtgccccatgattcgacactaagatcccatccacaccatgtttaacagcttcctgggcatcatcacctctcaaaattccctttacaacaatgggcagtgaggtcaaccgtctgagccatttaatatcatcccagctgagagatgggtctatggcttgtgccacatattcagcaaggccactgttgtctccaaaattccccttaggagaaaatgccaaatcgttggtttcaaagtttttcatcctgagctgtggtggtagcttgaacctgttccgcacatcatcgaagcgatttcccaggtaaggggtgtccacagtcacaaatatggccttgtaacccatctgctcagccctcttcactagctgactgctgacctcacgatctttgtagatgtagagttgcatccagcgaagtgcctccgggccagcctctgccacctcttctattgaggaagtggcccaggaactcaacatcatgccagttcccatggtctgacaggctcgaacagtggccagctccccatccacatgagccatgcactgcatagccgtagccccaacgcatattggcatgctcactctctgtcctaaaacagaagtcgacaggtcgatatcagcaacgttgcgcagcatccgtggatagagcttccactatagtagtcacagaagccatgagactctttctgctcggttagaacttggaggtcaccaagtctactatgcctcagaaactctagaatttccaaagccagcaaggcagtat

SEQ ID NO: 9 - protein, 16 aa, unidentified
  REGION 1..16: note = source = /note="Description of Unknown: RFGF peptide sequence"
AAVALLPAVLLALLAP

SEQ ID NO: 10 - protein, 11 aa, unidentified
  REGION 1..11: note = source = /note="Description of Unknown: RFGF analogue peptide sequence"
AALLPVLLAAP

SEQ ID NO: 11 - protein, 13 aa, Human immunodeficiency virus
GRKKRRQRRRPPQ

SEQ ID NO: 12 - protein, 16 aa, Drosophila sp.
RQIKIWFQNRRMKWKK

SEQ ID NO: 13 - RNA, 19 nt, synthetic construct
  source 1..19: mol_type = other RNA
  modified_base 4: mod_base = OTHER; note = 5'-methyluridine-3'-phosphate
  modified_base 7: mod_base = OTHER; note = 5'-methyluridine-3'-phosphate
  modified_base 12: mod_base = OTHER; note = 5'-methyluridine-3'-phosphate
  modified_base 17: mod_base = OTHER; note = 5'-methyluridine-3'-phosphate
gcatcctgggctacactga

SEQ ID NO: 14 - RNA, 20 nt, synthetic construct
  source 1..20: mol_type = other RNA
  modified_base 1: mod_base = OTHER; note = 5'-methyluridine-3'-phosphate
  modified_base 5: mod_base = OTHER; note = 5'-methyluridine-3'-phosphate
  modified_base 7: mod_base = OTHER; note = 5'-methyluridine-3'-phosphate
  modified_base 11: mod_base = OTHER; note = 5'-methyluridine-3'-phosphate
  modified_base 13: mod_base = OTHER; note = 5'-methyluridine-3'-phosphate
  modified_base 14: mod_base = OTHER; note = 5'-methyluridine-3'-phosphate
  modified_base 19: mod_base = OTHER; note = 5'-methyluridine-3'-phosphate
tgggtgtcgctgttgaagtc

SEQ ID NO: 15 - RNA, 16 nt, synthetic construct
  source 1..16: mol_type = other RNA
  modified_base 6: mod_base = OTHER; note = 5'-methyluridine-3'-phosphate
  modified_base 9: mod_base = OTHER; note = 5'-methyluridine-3'-phosphate
  modified_base 11: mod_base = OTHER; note = 5'-methyluridine-3'-phosphate
  modified_base 14: mod_base = OTHER; note = 5'-methyluridine-3'-phosphate
ccaggtggtctcctcc

SEQ ID NO: 16 - DNA, 21 bp, synthetic construct
  source 1..21: mol_type = other DNA
  modified_base 1: mod_base = OTHER; note = 2'-O-methylcytidine-3'-phosphate
  modified_base 2: mod_base = OTHER; note = 2'-O-methyluridine-3'-phosphate
  modified_base 3: mod_base = OTHER; note = 2'-O-methyluridine-3'-phosphate
  modified_base 4: mod_base = OTHER; note = adenosine-3'-phosphate
  modified_base 5: mod_base = OTHER; note = 2'-O-methylcytidine-3'-phosphate
  modified_base 6: mod_base = OTHER; note = guanosine-3'-phosphate
  modified_base 7: mod_base = OTHER; note = 2'-O-methylcytidine-3'-phosphate
  modified_base 8: mod_base = OTHER; note = 2'-O-methyluridine-3'-phosphate
  modified_base 9: mod_base = OTHER; note = guanosine-3'-phosphate
  modified_base 10: mod_base = OTHER; note = adenosine-3'-phosphate
  modified_base 11: mod_base = OTHER; note = guanosine-3'-phosphate
  modified_base 12: mod_base = OTHER; note = 2'-O-methyluridine-3'-phosphate
  modified_base 13: mod_base = OTHER; note = adenosine-3'-phosphate
  modified_base 14: mod_base = OTHER; note = 2'-O-methylcytidine-3'-phosphate
  modified_base 15: mod_base = OTHER; note = 2'-O-methyluridine-3'-phosphate
  modified_base 16: mod_base = OTHER; note = 2'-O-methyluridine-3'-phosphate
  modified_base 17: mod_base = OTHER; note = 2'-O-methylcytidine-3'-phosphate
  modified_base 18: mod_base = OTHER; note = guanosine-3'-phosphate
  modified_base 19: mod_base = OTHER; note = adenosine-3'-phosphate
  modified_base 20: mod_base = OTHER; note = 2'-deoxythymidine-3'-phosphorothioate
  misc_feature 1..19: note = RNA
  misc_feature 20..21: note = DNA
cttacgctgagtacttcgatt

SEQ ID NO: 17 - DNA, 21 bp, synthetic construct
  source 1..21: mol_type = other DNA
  modified_base 1: mod_base = OTHER; note = uridine-3'-phosphate
  modified_base 2: mod_base = OTHER; note = cytidine-3'-phosphate
  modified_base 3: mod_base = OTHER; note = guanosine-3'-phosphate
  modified_base 4: mod_base = OTHER; note = adenosine-3'-phosphate
  modified_base 5: mod_base = OTHER; note = adenosine-3'-phosphate
  modified_base 6: mod_base = OTHER; note = guanosine-3'-phosphate
  modified_base 7: mod_base = OTHER; note = 2'-O-methyluridine-3'-phosphate
  modified_base 8: mod_base = OTHER; note = adenosine-3'-phosphate
  modified_base 9: mod_base = OTHER; note = cytidine-3'-phosphate
  modified_base 10: mod_base = OTHER; note = uridine-3'-phosphate
  modified_base 11: mod_base = OTHER; note = 2'-O-methylcytidine-3'-phosphate
  modified_base 12: mod_base = OTHER; note = adenosine-3'-phosphate
  modified_base 13: mod_base = OTHER; note = guanosine-3'-phosphate
  modified_base 14: mod_base = OTHER; note = cytidine-3'-phosphate
  modified_base 15: mod_base = OTHER; note = guanosine-3'-phosphate
  modified_base 16: mod_base = OTHER; note = 2'-O-methyluridine-3'-phosphate
  modified_base 17: mod_base = OTHER; note = adenosine-3'-phosphate
  modified_base 18: mod_base = OTHER; note = adenosine-3'-phosphate
  modified_base 19: mod_base = OTHER; note = guanosine-3'-phosphate
  modified_base 20: mod_base = OTHER; note = 2'-deoxythymidine-3'-phosphorothioate
  misc_feature 1..19: note = RNA
  misc_feature 20..21: note = DNA
tcgaagtactcagcgtaagtt

SEQ ID NO: 18 - RNA, 21 nt, synthetic construct
  source 1..21: mol_type = other RNA
  modified_base 1: mod_base = OTHER; note = 2'-deoxy-2'-fluoroguanosine-3'-phosphorothioate
  modified_base 2: mod_base = OTHER; note = 2'-O-methyladenosine-3'-phosphorothioate
  modified_base 3: mod_base = OTHER; note = 2'-deoxy-2'-fluoroadenosine-3'-phosphate
  modified_base 4: mod_base = OTHER; note = 2'-O-methyluridine-3'-phosphate
  modified_base 5: mod_base = OTHER; note = 2'-deoxy-2'-fluoroguanosine-3'-phosphate
  modified_base 6: mod_base = OTHER; note = 2'-O-methyluridine-3'-phosphate
  modified_base 7: mod_base = OTHER; note = 2'-deoxy-2'-fluoroguanosine-3'-phosphate
  modified_base 8: mod_base = OTHER; note = 2'-O-methyladenosine-3'-phosphate
  modified_base 9: mod_base = OTHER; note = 2'-deoxy-2'-fluoroadenosine-3'-phosphate
  modified_base 10: mod_base = OTHER; note = 2'-deoxy-2'-fluoroadenosine-3'-phosphate
  modified_base 11: mod_base = OTHER; note = 2'-deoxy-2'-fluoroguanosine-3'-phosphate
  modified_base 12: mod_base = OTHER; note = 2'-O-methyluridine-3'-phosphate
  modified_base 13: mod_base = OTHER; note = 2'-deoxy-2'-fluorocytidine-3'-phosphate
  modified_base 14: mod_base = OTHER; note = 2'-O-methyladenosine-3'-phosphate
  modified_base 15: mod_base = OTHER; note = 2'-deoxy-2'-fluorouridine-3'-phosphate
  modified_base 16: mod_base = OTHER; note = 2'-O-methylcytidine-3'-phosphate
  modified_base 17: mod_base = OTHER; note = 2'-deoxy-2'-fluoroguanosine-3'-phosphate
  modified_base 18: mod_base = OTHER; note = 2'-O-methyladenosine-3'-phosphate
  modified_base 19: mod_base = OTHER; note = 2'-deoxy-2'-fluorocytidine-3'-phosphate
  modified_base 20: mod_base = OTHER; note = 2'-O-methyladenosine-3'-phosphate
  modified_base 21: mod_base = OTHER; note = 2'-deoxy-2'-fluoroadenosine-3'-phosphate ((2S,4R)-1-[29-[[2-(acetylamino)-2-deoxy-beta-D-galactopyra nosyl]oxy]-14,14-bis[[3-[[3-[[5-[[2-(acetylamino)-2-deoxy-b eta-D-galactopyranosyl]oxy]-1-oxopentyl]amino]propyl]amino] -3-oxopropoxy]methyl]-1,12,19,25-tetraoxo-16-oxa-13,20,24-t riazanonacos-1-yl]-4-hydroxy-2-pyrrolidinyl)methyl ester
gaatgtgaaagtcatcgacaa

SEQ ID NO: 19 - RNA, 21 nt, synthetic construct
  source 1..21: mol_type = other RNA
  modified_base 1: mod_base = OTHER; note = 2'-deoxy-2'-fluorouridine-3'-phosphorothioate
  modified_base 2: mod_base = OTHER; note = 2'-O-methyluridine-3'-phosphorothioate
  modified_base 3: mod_base = OTHER; note = 2'-deoxy-2'-fluorouridine-3'-phosphate
  modified_base 4: mod_base = OTHER; note = 2'-O-methyluridine-3'-phosphate
  modified_base 5: mod_base = OTHER; note = 2'-deoxy-2'-fluorocytidine-3'-phosphate
  modified_base 6: mod_base = OTHER; note = 2'-O-methyladenosine-3'-phosphate
  modified_base 7: mod_base = OTHER; note = 2'-deoxy-2'-fluoroadenosine-3'-phosphate
  modified_base 8: mod_base = OTHER; note = 2'-O-methyluridine-3'-phosphate
  modified_base 9: mod_base = OTHER; note = 2'-deoxy-2'-fluoroguanosine-3'-phosphate
  modified_base 10: mod_base = OTHER; note = 2'-deoxy-2'-fluoroguanosine-3'-phosphate
  modified_base 11: mod_base = OTHER; note = 2'-deoxy-2'-fluoroguanosine-3'-phosphate
  modified_base 12: mod_base = OTHER; note = 2'-O-methyluridine-3'-phosphate
  modified_base 13: mod_base = OTHER; note = 2'-deoxy-2'-fluoroguanosine-3'-phosphate
  modified_base 14: mod_base = OTHER; note = 2'-O-methyluridine-3'-phosphate
  modified_base 15: mod_base = OTHER; note = 2'-deoxy-2'-fluorocytidine-3'-phosphate
  modified_base 16: mod_base = OTHER; note = 2'-O-methylcytidine-3'-phosphate
  modified_base 17: mod_base = OTHER; note = 2'-deoxy-2'-fluorouridine-3'-phosphate
  modified_base 18: mod_base = OTHER; note = 2'-O-methyladenosine-3'-phosphate
  modified_base 19: mod_base = OTHER; note = 2'-deoxy-2'-fluoroguanosine-3'-phosphate
  modified_base 20: mod_base = OTHER; note = 2'-O-methylguanosine-3'-phosphate
  modified_base 21: mod_base = OTHER; note = 2'-deoxy-2'-fluoroadenosine-3'-phosphate ((2S,4R)-1-[29-[[2-(acetylamino)-2-deoxy-beta-D-galactopyra nosyl]oxy]-14,14-bis[[3-[[3-[[5-[[2-(acetylamino)-2-deoxy-b eta-D-galactopyranosyl]oxy]-1-oxopentyl]amino]propyl]amino] -3-oxopropoxy]methyl]-1,12,19,25-tetraoxo-16-oxa-13,20,24-t riazanonacos-1-yl]-4-hydroxy-2-pyrrolidinyl)methyl ester
ttttcaatgggtgtcctagga

SEQ ID NO: 20 - RNA, 21 nt, synthetic construct
  source 1..21: mol_type = other RNA
  modified_base 1: mod_base = OTHER; note = 2'-deoxy-2'-fluoroguanosine-3'-phosphorothioate
  modified_base 2: mod_base = OTHER; note = 2'-O-methyladenosine-3'-phosphorothioate
  modified_base 3: mod_base = OTHER; note = 2'-deoxy-2'-fluoroadenosine-3'-phosphate
  modified_base 4: mod_base = OTHER; note = 2'-O-methyladenosine-3'-phosphate
  modified_base 5: mod_base = OTHER; note = 2'-deoxy-2'-fluoroguanosine-3'-phosphate
  modified_base 6: mod_base = OTHER; note = 2'-O-methyluridine-3'-phosphate
  modified_base 7: mod_base = OTHER; note = 2'-deoxy-2'-fluorocytidine-3'-phosphate
  modified_base 8: mod_base = OTHER; note = 2'-O-methyladenosine-3'-phosphate
  modified_base 9: mod_base = OTHER; note = 2'-deoxy-2'-fluorouridine-3'-phosphate
  modified_base 10: mod_base = OTHER; note = 2'-deoxy-2'-fluorocytidine-3'-phosphate
  modified_base 11: mod_base = OTHER; note = 2'-deoxy-2'-fluoroguanosine-3'-phosphate
  modified_base 12: mod_base = OTHER; note = 2'-O-methyladenosine-3'-phosphate
  modified_base 13: mod_base = OTHER; note = 2'-deoxy-2'-fluorocytidine-3'-phosphate
  modified_base 14: mod_base = OTHER; note = 2'-O-methyladenosine-3'-phosphate
  modified_base 15: mod_base = OTHER; note = 2'-deoxy-2'-fluoroadenosine-3'-phosphate
  modified_base 16: mod_base = OTHER; note = 2'-O-methylguanosine-3'-phosphate
  modified_base 17: mod_base = OTHER; note = 2'-deoxy-2'-fluoroadenosine-3'-phosphate
  modified_base 18: mod_base = OTHER; note = 2'-O-methylcytidine-3'-phosphate
  modified_base 19: mod_base = OTHER; note = 2'-deoxy-2'-fluoroadenosine-3'-phosphate
  modified_base 20: mod_base = OTHER; note = 2'-O-methyluridine-3'-phosphate
  modified_base 21: mod_base = OTHER; note = 2'-deoxy-2'-fluorouridine-3'-phosphate ((2S,4R)-1-[29-[[2-(acetylamino)-2-deoxy-beta-D-galactopyra nosyl]oxy]-14,14-bis[[3-[[3-[[5-[[2-(acetylamino)-2-deoxy-b eta-D-galactopyranosyl]oxy]-1-oxopentyl]amino]propyl]amino] -3-oxopropoxy]methyl]-1,12,19,25-tetraoxo-16-oxa-13,20,24-t riazanonacos-1-yl]-4-hydroxy-2-pyrrolidinyl)methyl ester
gaaagtcatcgacaagacatt

SEQ ID NO: 21 - RNA, 21 nt, synthetic construct
  source 1..21: mol_type = other RNA
  modified_base 1: mod_base = OTHER; note = 2'-deoxy-2'-fluorouridine-3'-phosphorothioate
  modified_base 2: mod_base = OTHER; note = 2'-O-methylcytidine-3'-phosphorothioate
  modified_base 3: mod_base = OTHER; note = 2'-deoxy-2'-fluoroadenosine-3'-phosphate
  modified_base 4: mod_base = OTHER; note = 2'-O-methyluridine-3'-phosphate
  modified_base 5: mod_base = OTHER; note = 2'-deoxy-2'-fluorocytidine-3'-phosphate
  modified_base 6: mod_base = OTHER; note = 2'-O-methylguanosine-3'-phosphate
  modified_base 7: mod_base = OTHER; note = 2'-deoxy-2'-fluoroadenosine-3'-phosphate
  modified_base 8: mod_base = OTHER; note = 2'-O-methylcytidine-3'-phosphate
  modified_base 9: mod_base = OTHER; note = 2'-deoxy-2'-fluoroadenosine-3'-phosphate
  modified_base 10: mod_base = OTHER; note = 2'-deoxy-2'-fluoroadenosine-3'-phosphate
  modified_base 11: mod_base = OTHER; note = 2'-deoxy-2'-fluoroguanosine-3'-phosphate
  modified_base 12: mod_base = OTHER; note = 2'-O-methyladenosine-3'-phosphate
  modified_base 13: mod_base = OTHER; note = 2'-deoxy-2'-fluorocytidine-3'-phosphate
  modified_base 14: mod_base = OTHER; note = 2'-O-methyladenosine-3'-phosphate
  modified_base 15: mod_base = OTHER; note = 2'-deoxy-2'-fluorouridine-3'-phosphate
  modified_base 16: mod_base = OTHER; note = 2'-O-methyluridine-3'-phosphate
  modified_base 17: mod_base = OTHER; note = 2'-deoxy-2'-fluoroguanosine-3'-phosphate
  modified_base 18: mod_base = OTHER; note = 2'-O-methylguanosine-3'-phosphate
  modified_base 19: mod_base = OTHER; note = 2'-deoxy-2'-fluorouridine-3'-phosphate
  modified_base 20: mod_base = OTHER; note = 2'-O-methylguanosine-3'-phosphate
  modified_base 21: mod_base = OTHER; note = 2'-deoxy-2'-fluoroadenosine-3'-phosphate ((2S,4R)-1-[29-[[2-(acetylamino)-2-deoxy-beta-D-galactopyra nosyl]oxy]-14,14-bis[[3-[[3-[[5-[[2-(acetylamino)-2-deoxy-b eta-D-galactopyranosyl]oxy]-1-oxopentyl]amino]propyl]amino] -3-oxopropoxy]methyl]-1,12,19,25-tetraoxo-16-oxa-13,20,24-t riazanonacos-1-yl]-4-hydroxy-2-pyrrolidinyl)methyl ester
tcatcgacaagacattggtga

SEQ ID NO: 22 - RNA, 21 nt, synthetic construct
  source 1..21: mol_type = other RNA
  modified_base 1: mod_base = OTHER; note = 2'-deoxy-2'-fluorouridine-3'-phosphorothioate
  modified_base 2: mod_base = OTHER; note = 2'-O-methyluridine-3'-phosphorothioate
  modified_base 3: mod_base = OTHER; note = 2'-deoxy-2'-fluorouridine-3'-phosphate
  modified_base 4: mod_base = OTHER; note = 2'-O-methylcytidine-3'-phosphate
  modified_base 5: mod_base = OTHER; note = 2'-deoxy-2'-fluoroadenosine-3'-phosphate
  modified_base 6: mod_base = OTHER; note = 2'-O-methyladenosine-3'-phosphate
  modified_base 7: mod_base = OTHER; note = 2'-deoxy-2'-fluorouridine-3'-phosphate
  modified_base 8: mod_base = OTHER; note = 2'-O-methylguanosine-3'-phosphate
  modified_base 9: mod_base = OTHER; note = 2'-deoxy-2'-fluoroguanosine-3'-phosphate
  modified_base 10: mod_base = OTHER; note = 2'-deoxy-2'-fluoroguanosine-3'-phosphate
  modified_base 11: mod_base = OTHER; note = 2'-deoxy-2'-fluorouridine-3'-phosphate
  modified_base 12: mod_base = OTHER; note = 2'-O-methylguanosine-3'-phosphate
  modified_base 13: mod_base = OTHER; note = 2'-deoxy-2'-fluorouridine-3'-phosphate
  modified_base 14: mod_base = OTHER; note = 2'-O-methylcytidine-3'-phosphate
  modified_base 15: mod_base = OTHER; note = 2'-deoxy-2'-fluorocytidine-3'-phosphate
  modified_base 16: mod_base = OTHER; note = 2'-O-methyluridine-3'-phosphate
  modified_base 17: mod_base = OTHER; note = 2'-deoxy-2'-fluoroadenosine-3'-phosphate
  modified_base 18: mod_base = OTHER; note = 2'-O-methylguanosine-3'-phosphate
  modified_base 19: mod_base = OTHER; note = 2'-deoxy-2'-fluoroguanosine-3'-phosphate
  modified_base 20: mod_base = OTHER; note = 2'-O-methyladenosine-3'-phosphate
  modified_base 21: mod_base = OTHER; note = 2'-deoxy-2'-fluoroadenosine-3'-phosphate ((2S,4R)-1-[29-[[2-(acetylamino)-2-deoxy-beta-D-galactopyra nosyl]oxy]-14,14-bis[[3-[[3-[[5-[[2-(acetylamino)-2-deoxy-b eta-D-galactopyranosyl]oxy]-1-oxopentyl]amino]propyl]amino] -3-oxopropoxy]methyl]-1,12,19,25-tetraoxo-16-oxa-13,20,24-t riazanonacos-1-yl]-4-hydroxy-2-pyrrolidinyl)methyl ester
tttcaatgggtgtcctaggaa

SEQ ID NO: 23 - RNA, 21 nt, synthetic construct
  source 1..21: mol_type = other RNA
  modified_base 1: mod_base = OTHER; note = 2'-deoxy-2'-fluoroadenosine-3'-phosphorothioate
  modified_base 2: mod_base = OTHER; note = 2'-O-methyladenosine-3'-phosphorothioate
  modified_base 3: mod_base = OTHER; note = 2'-deoxy-2'-fluorouridine-3'-phosphate
  modified_base 4: mod_base = OTHER; note = 2'-O-methylguanosine-3'-phosphate
  modified_base 5: mod_base = OTHER; note = 2'-deoxy-2'-fluoroguanosine-3'-phosphate
  modified_base 6: mod_base = OTHER; note = 2'-O-methylguanosine-3'-phosphate
  modified_base 7: mod_base = OTHER; note = 2'-deoxy-2'-fluorouridine-3'-phosphate
  modified_base 8: mod_base = OTHER; note = 2'-O-methylguanosine-3'-phosphate
  modified_base 9: mod_base = OTHER; note = 2'-deoxy-2'-fluorouridine-3'-phosphate
  modified_base 10: mod_base = OTHER; note = 2'-deoxy-2'-fluorocytidine-3'-phosphate
  modified_base 11: mod_base = OTHER; note = 2'-deoxy-2'-fluorocytidine-3'-phosphate
  modified_base 12: mod_base = OTHER; note = 2'-O-methyluridine-3'-phosphate
  modified_base 13: mod_base = OTHER; note = 2'-deoxy-2'-fluoroadenosine-3'-phosphate
  modified_base 14: mod_base = OTHER; note = 2'-O-methylguanosine-3'-phosphate
  modified_base 15: mod_base = OTHER; note = 2'-deoxy-2'-fluoroguanosine-3'-phosphate
  modified_base 16: mod_base = OTHER; note = 2'-O-methyladenosine-3'-phosphate
  modified_base 17: mod_base = OTHER; note = 2'-deoxy-2'-fluoroadenosine-3'-phosphate
  modified_base 18: mod_base = OTHER; note = 2'-O-methylcytidine-3'-phosphate
  modified_base 19: mod_base = OTHER; note = 2'-deoxy-2'-fluorocytidine-3'-phosphate
  modified_base 20: mod_base = OTHER; note = 2'-O-methyluridine-3'-phosphate
  modified_base 21: mod_base = OTHER; note = 2'-deoxy-2'-fluorouridine-3'-phosphate ((2S,4R)-1-[29-[[2-(acetylamino)-2-deoxy-beta-D-galactopyra nosyl]oxy]-14,14-bis[[3-[[3-[[5-[[2-(acetylamino)-2-deoxy-b eta-D-galactopyranosyl]oxy]-1-oxopentyl]amino]propyl]amino] -3-oxopropoxy]methyl]-1,12,19,25-tetraoxo-16-oxa-13,20,24-t riazanonacos-1-yl]-4-hydroxy-2-pyrrolidinyl)methyl ester
aatgggtgtcctaggaacctt

SEQ ID NO: 24 - RNA, 21 nt, synthetic construct
  source 1..21: mol_type = other RNA
  modified_base 1: mod_base = OTHER; note = 2'-deoxy-2'-fluoroguanosine-3'-phosphorothioate
  modified_base 2: mod_base = OTHER; note = 2'-O-methyladenosine-3'-phosphorothioate
  modified_base 3: mod_base = OTHER; note = 2'-deoxy-2'-fluorocytidine-3'-phosphate
  modified_base 4: mod_base = OTHER; note = 2'-O-methyladenosine-3'-phosphate
  modified_base 5: mod_base = OTHER; note = 2'-deoxy-2'-fluoroguanosine-3'-phosphate
  modified_base 6: mod_base = OTHER; note = 2'-O-methyluridine-3'-phosphate
  modified_base 7: mod_base = OTHER; note = 2'-deoxy-2'-fluoroguanosine-3'-phosphate
  modified_base 8: mod_base = OTHER; note = 2'-O-methylcytidine-3'-phosphate
  modified_base 9: mod_base = OTHER; note = 2'-deoxy-2'-fluoroadenosine-3'-phosphate
  modified_base 10: mod_base = OTHER; note = 2'-deoxy-2'-fluorocytidine-3'-phosphate
  modified_base 11: mod_base = OTHER; note = 2'-deoxy-2'-fluoroadenosine-3'-phosphate
  modified_base 12: mod_base = OTHER; note = 2'-O-methyladenosine-3'-phosphate
  modified_base 13: mod_base = OTHER; note = 2'-deoxy-2'-fluorouridine-3'-phosphate
  modified_base 14: mod_base = OTHER; note = 2'-O-methyladenosine-3'-phosphate
  modified_base 15: mod_base = OTHER; note = 2'-deoxy-2'-fluorouridine-3'-phosphate
  modified_base 16: mod_base = OTHER; note = 2'-O-methyluridine-3'-phosphate
  modified_base 17: mod_base = OTHER; note = 2'-deoxy-2'-fluorouridine-3'-phosphate
  modified_base 18: mod_base = OTHER; note = 2'-O-methyluridine-3'-phosphate
  modified_base 19: mod_base = OTHER; note = 2'-deoxy-2'-fluorocytidine-3'-phosphate
  modified_base 20: mod_base = OTHER; note = 2'-O-methylcytidine-3'-phosphate
  modified_base 21: mod_base = OTHER; note = 2'-deoxy-2'-fluoroadenosine-3'-phosphate ((2S,4R)-1-[29-[[2-(acetylamino)-2-deoxy-beta-D-galactopyra nosyl]oxy]-14,14-bis[[3-[[3-[[5-[[2-(acetylamino)-2-deoxy-b eta-D-galactopyranosyl]oxy]-1-oxopentyl]amino]propyl]amino] -3-oxopropoxy]methyl]-1,12,19,25-tetraoxo-16-oxa-13,20,24-t riazanonacos-1-yl]-4-hydroxy-2-pyrrolidinyl)methyl ester
gacagtgcacaatattttcca

SEQ ID NO: 25 - RNA, 21 nt, synthetic construct
  source 1..21: mol_type = other RNA
  modified_base 1: mod_base = OTHER; note = 2'-deoxy-2'-fluoroadenosine-3'-phosphorothioate
  modified_base 2: mod_base = OTHER; note = 2'-O-methylcytidine-3'-phosphorothioate
  modified_base 3: mod_base = OTHER; note = 2'-deoxy-2'-fluorouridine-3'-phosphate
  modified_base 4: mod_base = OTHER; note = 2'-O-methyluridine-3'-phosphate
  modified_base 5: mod_base = OTHER; note = 2'-deoxy-2'-fluorouridine-3'-phosphate
  modified_base 6: mod_base = OTHER; note = 2'-O-methyluridine-3'-phosphate
  modified_base 7: mod_base = OTHER; note = 2'-deoxy-2'-fluorocytidine-3'-phosphate
  modified_base 8: mod_base = OTHER; note = 2'-O-methyladenosine-3'-phosphate
  modified_base 9: mod_base = OTHER; note = 2'-deoxy-2'-fluoroadenosine-3'-phosphate
  modified_base 10: mod_base = OTHER; note = 2'-deoxy-2'-fluorouridine-3'-phosphate
  modified_base 11: mod_base = OTHER; note = 2'-deoxy-2'-fluoroguanosine-3'-phosphate
  modified_base 12: mod_base = OTHER; note = 2'-O-methylguanosine-3'-phosphate
  modified_base 13: mod_base = OTHER; note = 2'-deoxy-2'-fluoroguanosine-3'-phosphate
  modified_base 14: mod_base = OTHER; note = 2'-O-methyluridine-3'-phosphate
  modified_base 15: mod_base = OTHER; note = 2'-deoxy-2'-fluoroguanosine-3'-phosphate
  modified_base 16: mod_base = OTHER; note = 2'-O-methyluridine-3'-phosphate
  modified_base 17: mod_base = OTHER; note = 2'-deoxy-2'-fluorocytidine-3'-phosphate
  modified_base 18: mod_base = OTHER; note = 2'-O-methylcytidine-3'-phosphate
  modified_base 19: mod_base = OTHER; note = 2'-deoxy-2'-fluorouridine-3'-phosphate
  modified_base 20: mod_base = OTHER; note = 2'-O-methyladenosine-3'-phosphate
  modified_base 21: mod_base = OTHER; note = 2'-deoxy-2'-fluoroadenosine-3'-phosphate ((2S,4R)-1-[29-[[2-(acetylamino)-2-deoxy-beta-D-galactopyra nosyl]oxy]-14,14-bis[[3-[[3-[[5-[[2-(acetylamino)-2-deoxy-b eta-D-galactopyranosyl]oxy]-1-oxopentyl]amino]propyl]amino] -3-oxopropoxy]methyl]-1,12,19,25-tetraoxo-16-oxa-13,20,24-t riazanonacos-1-yl]-4-hydroxy-2-pyrrolidinyl)methyl ester
acttttcaatgggtgtcctaa

SEQ ID NO: 26 - RNA, 21 nt, synthetic construct
  source 1..21: mol_type = other RNA
  modified_base 1: mod_base = OTHER; note = 2'-deoxy-2'-fluoroadenosine-3'-phosphorothioate
  modified_base 2: mod_base = OTHER; note = 2'-O-methyladenosine-3'-phosphorothioate
  modified_base 3: mod_base = OTHER; note = 2'-deoxy-2'-fluoroguanosine-3'-phosphate
  modified_base 4: mod_base = OTHER; note = 2'-O-methyluridine-3'-phosphate
  modified_base 5: mod_base = OTHER; note = 2'-deoxy-2'-fluorocytidine-3'-phosphate
  modified_base 6: mod_base = OTHER; note = 2'-O-methyladenosine-3'-phosphate
  modified_base 7: mod_base = OTHER; note = 2'-deoxy-2'-fluorouridine-3'-phosphate
  modified_base 8: mod_base = OTHER; note = 2'-O-methylcytidine-3'-phosphate
  modified_base 9: mod_base = OTHER; note = 2'-deoxy-2'-fluoroguanosine-3'-phosphate
  modified_base 10: mod_base = OTHER; note = 2'-deoxy-2'-fluoroadenosine-3'-phosphate
  modified_base 11: mod_base = OTHER; note = 2'-deoxy-2'-fluorocytidine-3'-phosphate
  modified_base 12: mod_base = OTHER; note = 2'-O-methyladenosine-3'-phosphate
  modified_base 13: mod_base = OTHER; note = 2'-deoxy-2'-fluoroadenosine-3'-phosphate
  modified_base 14: mod_base = OTHER; note = 2'-O-methylguanosine-3'-phosphate
  modified_base 15: mod_base = OTHER; note = 2'-deoxy-2'-fluoroadenosine-3'-phosphate
  modified_base 16: mod_base = OTHER; note = 2'-O-methylcytidine-3'-phosphate
  modified_base 17: mod_base = OTHER; note = 2'-deoxy-2'-fluoroadenosine-3'-phosphate
  modified_base 18: mod_base = OTHER; note = 2'-O-methyluridine-3'-phosphate
  modified_base 19: mod_base = OTHER; note = 2'-deoxy-2'-fluorouridine-3'-phosphate
  modified_base 20: mod_base = OTHER; note = 2'-O-methylguanosine-3'-phosphate
  modified_base 21: mod_base = OTHER; note = 2'-deoxy-2'-fluoroadenosine-3'-phosphate ((2S,4R)-1-[29-[[2-(acetylamino)-2-deoxy-beta-D-galactopyra nosyl]oxy]-14,14-bis[[3-[[3-[[5-[[2-(acetylamino)-2-deoxy-b eta-D-galactopyranosyl]oxy]-1-oxopentyl]amino]propyl]amino] -3-oxopropoxy]methyl]-1,12,19,25-tetraoxo-16-oxa-13,20,24-t riazanonacos-1-yl]-4-hydroxy-2-pyrrolidinyl)methyl ester
aagtcatcgacaagacattga

SEQ ID NO: 27 - RNA, 21 nt, synthetic construct
  source 1..21: mol_type = other RNA
  modified_base 1: mod_base = OTHER; note = 2'-deoxy-2'-fluoroadenosine-3'-phosphorothioate
  modified_base 2: mod_base = OTHER; note = 2'-O-methyluridine-3'-phosphorothioate
  modified_base 3: mod_base = OTHER; note = 2'-deoxy-2'-fluorocytidine-3'-phosphate
  modified_base 4: mod_base = OTHER; note = 2'-O-methylguanosine-3'-phosphate
  modified_base 5: mod_base = OTHER; note = 2'-deoxy-2'-fluoroadenosine-3'-phosphate
  modified_base 6: mod_base = OTHER; note = 2'-O-methylcytidine-3'-phosphate
  modified_base 7: mod_base = OTHER; note = 2'-deoxy-2'-fluoroadenosine-3'-phosphate
  modified_base 8: mod_base = OTHER; note = 2'-O-methyladenosine-3'-phosphate
  modified_base 9: mod_base = OTHER; note = 2'-deoxy-2'-fluoroguanosine-3'-phosphate
  modified_base 10: mod_base = OTHER; note = 2'-deoxy-2'-fluoroadenosine-3'-phosphate
  modified_base 11: mod_base = OTHER; note = 2'-deoxy-2'-fluorocytidine-3'-phosphate
  modified_base 12: mod_base = OTHER; note = 2'-O-methyladenosine-3'-phosphate
  modified_base 13: mod_base = OTHER; note = 2'-deoxy-2'-fluorouridine-3'-phosphate
  modified_base 14: mod_base = OTHER; note = 2'-O-methyluridine-3'-phosphate
  modified_base 15: mod_base = OTHER; note = 2'-deoxy-2'-fluoroguanosine-3'-phosphate
  modified_base 16: mod_base = OTHER; note = 2'-O-methylguanosine-3'-phosphate
  modified_base 17: mod_base = OTHER; note = 2'-deoxy-2'-fluorouridine-3'-phosphate
  modified_base 18: mod_base = OTHER; note = 2'-O-methylguanosine-3'-phosphate
  modified_base 19: mod_base = OTHER; note = 2'-deoxy-2'-fluoroadenosine-3'-phosphate
  modified_base 20: mod_base = OTHER; note = 2'-O-methylguanosine-3'-phosphate
  modified_base 21: mod_base = OTHER; note = 2'-deoxy-2'-fluoroadenosine-3'-phosphate ((2S,4R)-1-[29-[[2-(acetylamino)-2-deoxy-beta-D-galactopyra nosyl]oxy]-14,14-bis[[3-[[3-[[5-[[2-(acetylamino)-2-deoxy-b eta-D-galactopyranosyl]oxy]-1-oxopentyl]amino]propyl]amino] -3-oxopropoxy]methyl]-1,12,19,25-tetraoxo-16-oxa-13,20,24-t riazanonacos-1-yl]-4-hydroxy-2-pyrrolidinyl)methyl ester
atcgacaagacattggtgaga

SEQ ID NO: 28 - RNA, 21 nt, synthetic construct
  source 1..21: mol_type = other RNA
  modified_base 1: mod_base = OTHER; note = 2'-deoxy-2'-fluoroguanosine-3'-phosphorothioate
  modified_base 2: mod_base = OTHER; note = 2'-O-methylguanosine-3'-phosphorothioate
  modified_base 3: mod_base = OTHER; note = 2'-deoxy-2'-fluoroguanosine-3'-phosphate
  modified_base 4: mod_base = OTHER; note = 2'-O-methyladenosine-3'-phosphate
  modified_base 5: mod_base = OTHER; note = 2'-deoxy-2'-fluoroguanosine-3'-phosphate
  modified_base 6: mod_base = OTHER; note = 2'-O-methyladenosine-3'-phosphate
  modified_base 7: mod_base = OTHER; note = 2'-deoxy-2'-fluoroadenosine-3'-phosphate
  modified_base 8: mod_base = OTHER; note = 2'-O-methyladenosine-3'-phosphate
  modified_base 9: mod_base = OTHER; note = 2'-deoxy-2'-fluoroguanosine-3'-phosphate
  modified_base 10: mod_base = OTHER; note = 2'-deoxy-2'-fluoroguanosine-3'-phosphate
  modified_base 11: mod_base = OTHER; note = 2'-deoxy-2'-fluorouridine-3'-phosphate
  modified_base 12: mod_base = OTHER; note = 2'-O-methylguanosine-3'-phosphate
  modified_base 13: mod_base = OTHER; note = 2'-deoxy-2'-fluorouridine-3'-phosphate
  modified_base 14: mod_base = OTHER; note = 2'-O-methyluridine-3'-phosphate
  modified_base 15: mod_base = OTHER; note = 2'-deoxy-2'-fluorocytidine-3'-phosphate
  modified_base 16: mod_base = OTHER; note = 2'-O-methyladenosine-3'-phosphate
  modified_base 17: mod_base = OTHER; note = 2'-deoxy-2'-fluoroadenosine-3'-phosphate
  modified_base 18: mod_base = OTHER; note = 2'-O-methylguanosine-3'-phosphate
  modified_base 19: mod_base = OTHER; note = 2'-deoxy-2'-fluoroadenosine-3'-phosphate
  modified_base 20: mod_base = OTHER; note = 2'-O-methyluridine-3'-phosphate
  modified_base 21: mod_base = OTHER; note = 2'-deoxy-2'-fluoroadenosine-3'-phosphate ((2S,4R)-1-[29-[[2-(acetylamino)-2-deoxy-beta-D-galactopyra nosyl]oxy]-14,14-bis[[3-[[3-[[5-[[2-(acetylamino)-2-deoxy-b eta-D-galactopyranosyl]oxy]-1-oxopentyl]amino]propyl]amino] -3-oxopropoxy]methyl]-1,12,19,25-tetraoxo-16-oxa-13,20,24-t riazanonacos-1-yl]-4-hydroxy-2-pyrrolidinyl)methyl ester
gggagaaaggtgttcaagata

SEQ ID NO: 29 - RNA, 21 nt, synthetic construct
  source 1..21: mol_type = other RNA
  modified_base 1: mod_base = OTHER; note = 2'-deoxy-2'-fluorocytidine-3'-phosphorothioate
  modified_base 2: mod_base = OTHER; note = 2'-O-methyluridine-3'-phosphorothioate
  modified_base 3: mod_base = OTHER; note = 2'-deoxy-2'-fluorouridine-3'-phosphate
  modified_base 4: mod_base = OTHER; note = 2'-O-methyluridine-3'-phosphate
  modified_base 5: mod_base = OTHER; note = 2'-deoxy-2'-fluorouridine-3'-phosphate
  modified_base 6: mod_base = OTHER; note = 2'-O-methylcytidine-3'-phosphate
  modified_base 7: mod_base = OTHER; note = 2'-deoxy-2'-fluoroadenosine-3'-phosphate
  modified_base 8: mod_base = OTHER; note = 2'-O-methyladenosine-3'-phosphate
  modified_base 9: mod_base = OTHER; note = 2'-deoxy-2'-fluorouridine-3'-phosphate
  modified_base 10: mod_base = OTHER; note = 2'-deoxy-2'-fluoroguanosine-3'-phosphate
  modified_base 11: mod_base = OTHER; note = 2'-deoxy-2'-fluoroguanosine-3'-phosphate
  modified_base 12: mod_base = OTHER; note = 2'-O-methylguanosine-3'-phosphate
  modified_base 13: mod_base = OTHER; note = 2'-deoxy-2'-fluorouridine-3'-phosphate
  modified_base 14: mod_base = OTHER; note = 2'-O-methylguanosine-3'-phosphate
  modified_base 15: mod_base = OTHER; note = 2'-deoxy-2'-fluorouridine-3'-phosphate
  modified_base 16: mod_base = OTHER; note = 2'-O-methylcytidine-3'-phosphate
  modified_base 17: mod_base = OTHER; note = 2'-deoxy-2'-fluorocytidine-3'-phosphate
  modified_base 18: mod_base = OTHER; note = 2'-O-methyluridine-3'-phosphate
  modified_base 19: mod_base = OTHER; note = 2'-deoxy-2'-fluoroadenosine-3'-phosphate
  modified_base 20: mod_base = OTHER; note = 2'-O-methylguanosine-3'-phosphate
  modified_base 21: mod_base = OTHER; note = 2'-deoxy-2'-fluoroadenosine-3'-phosphate ((2S,4R)-1-[29-[[2-(acetylamino)-2-deoxy-beta-D-galactopyra nosyl]oxy]-14,14-bis[[3-[[3-[[5-[[2-(acetylamino)-2-deoxy-b eta-D-galactopyranosyl]oxy]-1-oxopentyl]amino]propyl]amino] -3-oxopropoxy]methyl]-1,12,19,25-tetraoxo-16-oxa-13,20,24-t riazanonacos-1-yl]-4-hydroxy-2-pyrrolidinyl)methyl ester
cttttcaatgggtgtcctaga

SEQ ID NO: 30 - RNA, 21 nt, synthetic construct
  source 1..21: mol_type = other RNA
  modified_base 1: mod_base = OTHER; note = 2'-deoxy-2'-fluorouridine-3'-phosphorothioate
  modified_base 2: mod_base = OTHER; note = 2'-O-methylcytidine-3'-phosphorothioate
  modified_base 3: mod_base = OTHER; note = 2'-deoxy-2'-fluoroadenosine-3'-phosphate
  modified_base 4: mod_base = OTHER; note = 2'-O-methyladenosine-3'-phosphate
  modified_base 5: mod_base = OTHER; note = 2'-deoxy-2'-fluorouridine-3'-phosphate
  modified_base 6: mod_base = OTHER; note = 2'-O-methylguanosine-3'-phosphate
  modified_base 7: mod_base = OTHER; note = 2'-deoxy-2'-fluoroguanosine-3'-phosphate
  modified_base 8: mod_base = OTHER; note = 2'-O-methylguanosine-3'-phosphate
  modified_base 9: mod_base = OTHER; note = 2'-deoxy-2'-fluorouridine-3'-phosphate
  modified_base 10: mod_base = OTHER; note = 2'-deoxy-2'-fluoroguanosine-3'-phosphate
  modified_base 11: mod_base = OTHER; note = 2'-deoxy-2'-fluorouridine-3'-phosphate
  modified_base 12: mod_base = OTHER; note = 2'-O-methylcytidine-3'-phosphate
  modified_base 13: mod_base = OTHER; note = 2'-deoxy-2'-fluorocytidine-3'-phosphate
  modified_base 14: mod_base = OTHER; note = 2'-O-methyluridine-3'-phosphate
  modified_base 15: mod_base = OTHER; note = 2'-deoxy-2'-fluoroadenosine-3'-phosphate
  modified_base 16: mod_base = OTHER; note = 2'-O-methylguanosine-3'-phosphate
  modified_base 17: mod_base = OTHER; note = 2'-deoxy-2'-fluoroguanosine-3'-phosphate
  modified_base 18: mod_base = OTHER; note = 2'-O-methyladenosine-3'-phosphate
  modified_base 19: mod_base = OTHER; note = 2'-deoxy-2'-fluoroadenosine-3'-phosphate
  modified_base 20: mod_base = OTHER; note = 2'-O-methylcytidine-3'-phosphate
  modified_base 21: mod_base = OTHER; note = 2'-deoxy-2'-fluoroadenosine-3'-phosphate ((2S,4R)-1-[29-[[2-(acetylamino)-2-deoxy-beta-D-galactopyra nosyl]oxy]-14,14-bis[[3-[[3-[[5-[[2-(acetylamino)-2-deoxy-b eta-D-galactopyranosyl]oxy]-1-oxopentyl]amino]propyl]amino] -3-oxopropoxy]methyl]-1,12,19,25-tetraoxo-16-oxa-13,20,24-t riazanonacos-1-yl]-4-hydroxy-2-pyrrolidinyl)methyl ester
tcaatgggtgtcctaggaaca

SEQ ID NO: 31 - RNA, 21 nt, synthetic construct
  source 1..21: mol_type = other RNA
  modified_base 1: mod_base = OTHER; note = 2'-deoxy-2'-fluorouridine-3'-phosphorothioate
  modified_base 2: mod_base = OTHER; note = 2'-O-methyluridine-3'-phosphorothioate
  modified_base 3: mod_base = OTHER; note = 2'-deoxy-2'-fluoroguanosine-3'-phosphate
  modified_base 4: mod_base = OTHER; note = 2'-O-methyladenosine-3'-phosphate
  modified_base 5: mod_base = OTHER; note = 2'-deoxy-2'-fluorocytidine-3'-phosphate
  modified_base 6: mod_base = OTHER; note = 2'-O-methyluridine-3'-phosphate
  modified_base 7: mod_base = OTHER; note = 2'-deoxy-2'-fluorouridine-3'-phosphate
  modified_base 8: mod_base = OTHER; note = 2'-O-methyluridine-3'-phosphate
  modified_base 9: mod_base = OTHER; note = 2'-deoxy-2'-fluorouridine-3'-phosphate
  modified_base 10: mod_base = OTHER; note = 2'-deoxy-2'-fluorocytidine-3'-phosphate
  modified_base 11: mod_base = OTHER; note = 2'-deoxy-2'-fluoroadenosine-3'-phosphate
  modified_base 12: mod_base = OTHER; note = 2'-O-methyladenosine-3'-phosphate
  modified_base 13: mod_base = OTHER; note = 2'-deoxy-2'-fluorouridine-3'-phosphate
  modified_base 14: mod_base = OTHER; note = 2'-O-methylguanosine-3'-phosphate
  modified_base 15: mod_base = OTHER; note = 2'-deoxy-2'-fluoroguanosine-3'-phosphate
  modified_base 16: mod_base = OTHER; note = 2'-O-methylguanosine-3'-phosphate
  modified_base 17: mod_base = OTHER; note = 2'-deoxy-2'-fluorouridine-3'-phosphate
  modified_base 18: mod_base = OTHER; note = 2'-O-methylguanosine-3'-phosphate
  modified_base 19: mod_base = OTHER; note = 2'-deoxy-2'-fluorouridine-3'-phosphate
  modified_base 20: mod_base = OTHER; note = 2'-O-methylcytidine-3'-phosphate
  modified_base 21: mod_base = OTHER; note = 2'-deoxy-2'-fluoroadenosine-3'-phosphate ((2S,4R)-1-[29-[[2-(acetylamino)-2-deoxy-beta-D-galactopyra nosyl]oxy]-14,14-bis[[3-[[3-[[5-[[2-(acetylamino)-2-deoxy-b eta-D-galactopyranosyl]oxy]-1-oxopentyl]amino]propyl]amino] -3-oxopropoxy]methyl]-1,12,19,25-tetraoxo-16-oxa-13,20,24-t riazanonacos-1-yl]-4-hydroxy-2-pyrrolidinyl)methyl ester
ttgacttttcaatgggtgtca

SEQ ID NO: 32 - RNA, 21 nt, synthetic construct
  source 1..21: mol_type = other RNA
  modified_base 1: mod_base = OTHER; note = 2'-deoxy-2'-fluoroadenosine-3'-phosphorothioate
  modified_base 2: mod_base = OTHER; note = 2'-O-methyladenosine-3'-phosphorothioate
  modified_base 3: mod_base = OTHER; note = 2'-deoxy-2'-fluoroadenosine-3'-phosphate
  modified_base 4: mod_base = OTHER; note = 2'-O-methylguanosine-3'-phosphate
  modified_base 5: mod_base = OTHER; note = 2'-deoxy-2'-fluorouridine-3'-phosphate
  modified_base 6: mod_base = OTHER; note = 2'-O-methylcytidine-3'-phosphate
  modified_base 7: mod_base = OTHER; note = 2'-deoxy-2'-fluoroadenosine-3'-phosphate
  modified_base 8: mod_base = OTHER; note = 2'-O-methyluridine-3'-phosphate
  modified_base 9: mod_base = OTHER; note = 2'-deoxy-2'-fluorocytidine-3'-phosphate
  modified_base 10: mod_base = OTHER; note = 2'-deoxy-2'-fluoroguanosine-3'-phosphate
  modified_base 11: mod_base = OTHER; note = 2'-deoxy-2'-fluoroadenosine-3'-phosphate
  modified_base 12: mod_base = OTHER; note = 2'-O-methylcytidine-3'-phosphate
  modified_base 13: mod_base = OTHER; note = 2'-deoxy-2'-fluoroadenosine-3'-phosphate
  modified_base 14: mod_base = OTHER; note = 2'-O-methyladenosine-3'-phosphate
  modified_base 15: mod_base = OTHER; note = 2'-deoxy-2'-fluoroguanosine-3'-phosphate
  modified_base 16: mod_base = OTHER; note = 2'-O-methyladenosine-3'-phosphate
  modified_base 17: mod_base = OTHER; note = 2'-deoxy-2'-fluorocytidine-3'-phosphate
  modified_base 18: mod_base = OTHER; note = 2'-O-methyladenosine-3'-phosphate
  modified_base 19: mod_base = OTHER; note = 2'-deoxy-2'-fluorouridine-3'-phosphate
  modified_base 20: mod_base = OTHER; note = 2'-O-methyluridine-3'-phosphate
  modified_base 21: mod_base = OTHER; note = 2'-deoxy-2'-fluoroadenosine-3'-phosphate ((2S,4R)-1-[29-[[2-(acetylamino)-2-deoxy-beta-D-galactopyra nosyl]oxy]-14,14-bis[[3-[[3-[[5-[[2-(acetylamino)-2-deoxy-b eta-D-galactopyranosyl]oxy]-1-oxopentyl]amino]propyl]amino] -3-oxopropoxy]methyl]-1,12,19,25-tetraoxo-16-oxa-13,20,24-t riazanonacos-1-yl]-4-hydroxy-2-pyrrolidinyl)methyl ester
aaagtcatcgacaagacatta

SEQ ID NO: 33 - RNA, 21 nt, synthetic construct
  source 1..21: mol_type = other RNA
  modified_base 1: mod_base = OTHER; note = 2'-deoxy-2'-fluorocytidine-3'-phosphorothioate
  modified_base 2: mod_base = OTHER; note = 2'-O-methyladenosine-3'-phosphorothioate
  modified_base 3: mod_base = OTHER; note = 2'-deoxy-2'-fluoroguanosine-3'-phosphate
  modified_base 4: mod_base = OTHER; note = 2'-O-methylguanosine-3'-phosphate
  modified_base 5: mod_base = OTHER; note = 2'-deoxy-2'-fluoroguanosine-3'-phosphate
  modified_base 6: mod_base = OTHER; note = 2'-O-methylguanosine-3'-phosphate
  modified_base 7: mod_base = OTHER; note = 2'-deoxy-2'-fluoroguanosine-3'-phosphate
  modified_base 8: mod_base = OTHER; note = 2'-O-methyladenosine-3'-phosphate
  modified_base 9: mod_base = OTHER; note = 2'-deoxy-2'-fluoroguanosine-3'-phosphate
  modified_base 10: mod_base = OTHER; note = 2'-deoxy-2'-fluoroadenosine-3'-phosphate
  modified_base 11: mod_base = OTHER; note = 2'-deoxy-2'-fluoroadenosine-3'-phosphate
  modified_base 12: mod_base = OTHER; note = 2'-O-methyladenosine-3'-phosphate
  modified_base 13: mod_base = OTHER; note = 2'-deoxy-2'-fluoroguanosine-3'-phosphate
  modified_base 14: mod_base = OTHER; note = 2'-O-methylguanosine-3'-phosphate
  modified_base 15: mod_base = OTHER; note = 2'-deoxy-2'-fluorouridine-3'-phosphate
  modified_base 16: mod_base = OTHER; note = 2'-O-methylguanosine-3'-phosphate
  modified_base 17: mod_base = OTHER; note = 2'-deoxy-2'-fluorouridine-3'-phosphate
  modified_base 18: mod_base = OTHER; note = 2'-O-methyluridine-3'-phosphate
  modified_base 19: mod_base = OTHER; note = 2'-deoxy-2'-fluorocytidine-3'-phosphate
  modified_base 20: mod_base = OTHER; note = 2'-O-methyladenosine-3'-phosphate
  modified_base 21: mod_base = OTHER; note = 2'-deoxy-2'-fluoroadenosine-3'-phosphate ((2S,4R)-1-[29-[[2-(acetylamino)-2-deoxy-beta-D-galactopyra nosyl]oxy]-14,14-bis[[3-[[3-[[5-[[2-(acetylamino)-2-deoxy-b eta-D-galactopyranosyl]oxy]-1-oxopentyl]amino]propyl]amino] -3-oxopropoxy]methyl]-1,12,19,25-tetraoxo-16-oxa-13,20,24-t riazanonacos-1-yl]-4-hydroxy-2-pyrrolidinyl)methyl ester
cagggggagaaaggtgttcaa

SEQ ID NO: 34 - RNA, 21 nt, synthetic construct
  source 1..21: mol_type = other RNA
  modified_base 1: mod_base = OTHER; note = 2'-deoxy-2'-fluorocytidine-3'-phosphorothioate
  modified_base 2: mod_base = OTHER; note = 2'-O-methyladenosine-3'-phosphorothioate
  modified_base 3: mod_base = OTHER; note = 2'-deoxy-2'-fluorouridine-3'-phosphate
  modified_base 4: mod_base = OTHER; note = 2'-O-methyluridine-3'-phosphate
  modified_base 5: mod_base = OTHER; note = 2'-deoxy-2'-fluoroguanosine-3'-phosphate
  modified_base 6: mod_base = OTHER; note = 2'-O-methylguanosine-3'-phosphate
  modified_base 7: mod_base = OTHER; note = 2'-deoxy-2'-fluorouridine-3'-phosphate
  modified_base 8: mod_base = OTHER; note = 2'-O-methylguanosine-3'-phosphate
  modified_base 9: mod_base = OTHER; note = 2'-deoxy-2'-fluoroadenosine-3'-phosphate
  modified_base 10: mod_base = OTHER; note = 2'-deoxy-2'-fluoroguanosine-3'-phosphate
  modified_base 11: mod_base = OTHER; note = 2'-deoxy-2'-fluoroguanosine-3'-phosphate
  modified_base 12: mod_base = OTHER; note = 2'-O-methyladenosine-3'-phosphate
  modified_base 13: mod_base = OTHER; note = 2'-deoxy-2'-fluoroadenosine-3'-phosphate
  modified_base 14: mod_base = OTHER; note = 2'-O-methyladenosine-3'-phosphate
  modified_base 15: mod_base = OTHER; note = 2'-deoxy-2'-fluoroadenosine-3'-phosphate
  modified_base 16: mod_base = OTHER; note = 2'-O-methyladenosine-3'-phosphate
  modified_base 17: mod_base = OTHER; note = 2'-deoxy-2'-fluorouridine-3'-phosphate
  modified_base 18: mod_base = OTHER; note = 2'-O-methylcytidine-3'-phosphate
  modified_base 19: mod_base = OTHER; note = 2'-deoxy-2'-fluorocytidine-3'-phosphate
  modified_base 20: mod_base = OTHER; note = 2'-O-methyluridine-3'-phosphate
  modified_base 21: mod_base = OTHER; note = 2'-deoxy-2'-fluorouridine-3'-phosphate ((2S,4R)-1-[29-[[2-(acetylamino)-2-deoxy-beta-D-galactopyra nosyl]oxy]-14,14-bis[[3-[[3-[[5-[[2-(acetylamino)-2-deoxy-b eta-D-galactopyranosyl]oxy]-1-oxopentyl]amino]propyl]amino] -3-oxopropoxy]methyl]-1,12,19,25-tetraoxo-16-oxa-13,20,24-t riazanonacos-1-yl]-4-hydroxy-2-pyrrolidinyl)methyl ester
cattggtgaggaaaaatcctt

SEQ ID NO: 35 - RNA, 21 nt, synthetic construct
  source 1..21: mol_type = other RNA
  modified_base 1: mod_base = OTHER; note = 2'-deoxy-2'-fluoroadenosine-3'-phosphorothioate
  modified_base 2: mod_base = OTHER; note = 2'-O-methylcytidine-3'-phosphorothioate
  modified_base 3: mod_base = OTHER; note = 2'-deoxy-2'-fluoroadenosine-3'-phosphate
  modified_base 4: mod_base = OTHER; note = 2'-O-methyluridine-3'-phosphate
  modified_base 5: mod_base = OTHER; note = 2'-deoxy-2'-fluorouridine-3'-phosphate
  modified_base 6: mod_base = OTHER; note = 2'-O-methylguanosine-3'-phosphate
  modified_base 7: mod_base = OTHER; note = 2'-deoxy-2'-fluoroguanosine-3'-phosphate
  modified_base 8: mod_base = OTHER; note = 2'-O-methyluridine-3'-phosphate
  modified_base 9: mod_base = OTHER; note = 2'-deoxy-2'-fluoroguanosine-3'-phosphate
  modified_base 10: mod_base = OTHER; note = 2'-deoxy-2'-fluoroadenosine-3'-phosphate
  modified_base 11: mod_base = OTHER; note = 2'-deoxy-2'-fluoroguanosine-3'-phosphate
  modified_base 12: mod_base = OTHER; note = 2'-O-methylguanosine-3'-phosphate
  modified_base 13: mod_base = OTHER; note = 2'-deoxy-2'-fluoroadenosine-3'-phosphate
  modified_base 14: mod_base = OTHER; note = 2'-O-methyladenosine-3'-phosphate
  modified_base 15: mod_base = OTHER; note = 2'-deoxy-2'-fluoroadenosine-3'-phosphate
  modified_base 16: mod_base = OTHER; note = 2'-O-methyladenosine-3'-phosphate
  modified_base 17: mod_base = OTHER; note = 2'-deoxy-2'-fluoroadenosine-3'-phosphate
  modified_base 18: mod_base = OTHER; note = 2'-O-methyluridine-3'-phosphate
  modified_base 19: mod_base = OTHER; note = 2'-deoxy-2'-fluorocytidine-3'-phosphate
  modified_base 20: mod_base = OTHER; note = 2'-O-methylcytidine-3'-phosphate
  modified_base 21: mod_base = OTHER; note = 2'-deoxy-2'-fluorouridine-3'-phosphate ((2S,4R)-1-[29-[[2-(acetylamino)-2-deoxy-beta-D-galactopyra nosyl]oxy]-14,14-bis[[3-[[3-[[5-[[2-(acetylamino)-2-deoxy-b eta-D-galactopyranosyl]oxy]-1-oxopentyl]amino]propyl]amino] -3-oxopropoxy]methyl]-1,12,19,25-tetraoxo-16-oxa-13,20,24-t riazanonacos-1-yl]-4-hydroxy-2-pyrrolidinyl)methyl ester
acattggtgaggaaaaatcct

SEQ ID NO: 36 - RNA, 21 nt, synthetic construct
  source 1..21: mol_type = other RNA
  modified_base 1: mod_base = OTHER; note = 2'-deoxy-2'-fluoroadenosine-3'-phosphorothioate
  modified_base 2: mod_base = OTHER; note = 2'-O-methylguanosine-3'-phosphorothioate
  modified_base 3: mod_base = OTHER; note = 2'-deoxy-2'-fluoroguanosine-3'-phosphate
  modified_base 4: mod_base = OTHER; note = 2'-O-methylguanosine-3'-phosphate
  modified_base 5: mod_base = OTHER; note = 2'-deoxy-2'-fluoroguanosine-3'-phosphate
  modified_base 6: mod_base = OTHER; note = 2'-O-methylguanosine-3'-phosphate
  modified_base 7: mod_base = OTHER; note = 2'-deoxy-2'-fluoroadenosine-3'-phosphate
  modified_base 8: mod_base = OTHER; note = 2'-O-methylguanosine-3'-phosphate
  modified_base 9: mod_base = OTHER; note = 2'-deoxy-2'-fluoroadenosine-3'-phosphate
  modified_base 10: mod_base = OTHER; note = 2'-deoxy-2'-fluoroadenosine-3'-phosphate
  modified_base 11: mod_base = OTHER; note = 2'-deoxy-2'-fluoroadenosine-3'-phosphate
  modified_base 12: mod_base = OTHER; note = 2'-O-methylguanosine-3'-phosphate
  modified_base 13: mod_base = OTHER; note = 2'-deoxy-2'-fluoroguanosine-3'-phosphate
  modified_base 14: mod_base = OTHER; note = 2'-O-methyluridine-3'-phosphate
  modified_base 15: mod_base = OTHER; note = 2'-deoxy-2'-fluoroguanosine-3'-phosphate
  modified_base 16: mod_base = OTHER; note = 2'-O-methyluridine-3'-phosphate
  modified_base 17: mod_base = OTHER; note = 2'-deoxy-2'-fluorouridine-3'-phosphate
  modified_base 18: mod_base = OTHER; note = 2'-O-methylcytidine-3'-phosphate
  modified_base 19: mod_base = OTHER; note = 2'-deoxy-2'-fluoroadenosine-3'-phosphate
  modified_base 20: mod_base = OTHER; note = 2'-O-methyladenosine-3'-phosphate
  modified_base 21: mod_base = OTHER; note = 2'-deoxy-2'-fluoroadenosine-3'-phosphate ((2S,4R)-1-[29-[[2-(acetylamino)-2-deoxy-beta-D-galactopyra nosyl]oxy]-14,14-bis[[3-[[3-[[5-[[2-(acetylamino)-2-deoxy-b eta-D-galactopyranosyl]oxy]-1-oxopentyl]amino]propyl]amino] -3-oxopropoxy]methyl]-1,12,19,25-tetraoxo-16-oxa-13,20,24-t riazanonacos-1-yl]-4-hydroxy-2-pyrrolidinyl)methyl ester
agggggagaaaggtgttcaaa

SEQ ID NO: 37 - RNA, 21 nt, synthetic construct
  source 1..21: mol_type = other RNA
  modified_base 1: mod_base = OTHER; note = 2'-deoxy-2'-fluoroadenosine-3'-phosphorothioate
  modified_base 2: mod_base = OTHER; note = 2'-O-methyluridine-3'-phosphorothioate
  modified_base 3: mod_base = OTHER; note = 2'-deoxy-2'-fluoroguanosine-3'-phosphate
  modified_base 4: mod_base = OTHER; note = 2'-O-methylguanosine-3'-phosphate
  modified_base 5: mod_base = OTHER; note = 2'-deoxy-2'-fluorouridine-3'-phosphate
  modified_base 6: mod_base = OTHER; note = 2'-O-methylguanosine-3'-phosphate
  modified_base 7: mod_base = OTHER; note = 2'-deoxy-2'-fluoroguanosine-3'-phosphate
  modified_base 8: mod_base = OTHER; note = 2'-O-methyluridine-3'-phosphate
  modified_base 9: mod_base = OTHER; note = 2'-deoxy-2'-fluoroadenosine-3'-phosphate
  modified_base 10: mod_base = OTHER; note = 2'-deoxy-2'-fluoroadenosine-3'-phosphate
  modified_base 11: mod_base = OTHER; note = 2'-deoxy-2'-fluorouridine-3'-phosphate
  modified_base 12: mod_base = OTHER; note = 2'-O-methyluridine-3'-phosphate
  modified_base 13: mod_base = OTHER; note = 2'-deoxy-2'-fluorouridine-3'-phosphate
  modified_base 14: mod_base = OTHER; note = 2'-O-methylguanosine-3'-phosphate
  modified_base 15: mod_base = OTHER; note = 2'-deoxy-2'-fluorouridine-3'-phosphate
  modified_base 16: mod_base = OTHER; note = 2'-O-methylguanosine-3'-phosphate
  modified_base 17: mod_base = OTHER; note = 2'-deoxy-2'-fluoroadenosine-3'-phosphate
  modified_base 18: mod_base = OTHER; note = 2'-O-methyluridine-3'-phosphate
  modified_base 19: mod_base = OTHER; note = 2'-deoxy-2'-fluorouridine-3'-phosphate
  modified_base 20: mod_base = OTHER; note = 2'-O-methyluridine-3'-phosphate
  modified_base 21: mod_base = OTHER; note = 2'-deoxy-2'-fluorouridine-3'-phosphate ((2S,4R)-1-[29-[[2-(acetylamino)-2-deoxy-beta-D-galactopyra nosyl]oxy]-14,14-bis[[3-[[3-[[5-[[2-(acetylamino)-2-deoxy-b eta-D-galactopyranosyl]oxy]-1-oxopentyl]amino]propyl]amino] -3-oxopropoxy]methyl]-1,12,19,25-tetraoxo-16-oxa-13,20,24-t riazanonacos-1-yl]-4-hydroxy-2-pyrrolidinyl)methyl ester
atggtggtaatttgtgatttt

SEQ ID NO: 38 - RNA, 21 nt, synthetic construct
  source 1..21: mol_type = other RNA
  modified_base 1: mod_base = OTHER; note = 2'-deoxy-2'-fluoroguanosine-3'-phosphorothioate
  modified_base 2: mod_base = OTHER; note = 2'-O-methyladenosine-3'-phosphorothioate
  modified_base 3: mod_base = OTHER; note = 2'-deoxy-2'-fluorocytidine-3'-phosphate
  modified_base 4: mod_base = OTHER; note = 2'-O-methyluridine-3'-phosphate
  modified_base 5: mod_base = OTHER; note = 2'-deoxy-2'-fluorouridine-3'-phosphate
  modified_base 6: mod_base = OTHER; note = 2'-O-methylguanosine-3'-phosphate
  modified_base 7: mod_base = OTHER; note = 2'-deoxy-2'-fluorocytidine-3'-phosphate
  modified_base 8: mod_base = OTHER; note = 2'-O-methyladenosine-3'-phosphate
  modified_base 9: mod_base = OTHER; note = 2'-deoxy-2'-fluorouridine-3'-phosphate
  modified_base 10: mod_base = OTHER; note = 2'-deoxy-2'-fluorocytidine-3'-phosphate
  modified_base 11: mod_base = OTHER; note = 2'-deoxy-2'-fluorocytidine-3'-phosphate
  modified_base 12: mod_base = OTHER; note = 2'-O-methyluridine-3'-phosphate
  modified_base 13: mod_base = OTHER; note = 2'-deoxy-2'-fluoroguanosine-3'-phosphate
  modified_base 14: mod_base = OTHER; note = 2'-O-methylguanosine-3'-phosphate
  modified_base 15: mod_base = OTHER; note = 2'-deoxy-2'-fluoroadenosine-3'-phosphate
  modified_base 16: mod_base = OTHER; note = 2'-O-methyladenosine-3'-phosphate
  modified_base 17: mod_base = OTHER; note = 2'-deoxy-2'-fluoroadenosine-3'-phosphate
  modified_base 18: mod_base = OTHER; note = 2'-O-methyluridine-3'-phosphate
  modified_base 19: mod_base = OTHER; note = 2'-deoxy-2'-fluoroadenosine-3'-phosphate
  modified_base 20: mod_base = OTHER; note = 2'-O-methyluridine-3'-phosphate
  modified_base 21: mod_base = OTHER; note = 2'-deoxy-2'-fluoroadenosine-3'-phosphate ((2S,4R)-1-[29-[[2-(acetylamino)-2-deoxy-beta-D-galactopyra nosyl]oxy]-14,14-bis[[3-[[3-[[5-[[2-(acetylamino)-2-deoxy-b eta-D-galactopyranosyl]oxy]-1-oxopentyl]amino]propyl]amino] -3-oxopropoxy]methyl]-1,12,19,25-tetraoxo-16-oxa-13,20,24-t riazanonacos-1-yl]-4-hydroxy-2-pyrrolidinyl)methyl ester
gacttgcatcctggaaatata

SEQ ID NO: 39 - RNA, 21 nt, synthetic construct
  source 1..21: mol_type = other RNA
  modified_base 1: mod_base = OTHER; note = 2'-deoxy-2'-fluoroguanosine-3'-phosphorothioate
  modified_base 2: mod_base = OTHER; note = 2'-O-methylguanosine-3'-phosphorothioate
  modified_base 3: mod_base = OTHER; note = 2'-deoxy-2'-fluoroadenosine-3'-phosphate
  modified_base 4: mod_base = OTHER; note = 2'-O-methyladenosine-3'-phosphate
  modified_base 5: mod_base = OTHER; note = 2'-deoxy-2'-fluoroguanosine-3'-phosphate
  modified_base 6: mod_base = OTHER; note = 2'-O-methylguanosine-3'-phosphate
  modified_base 7: mod_base = OTHER; note = 2'-deoxy-2'-fluoroguanosine-3'-phosphate
  modified_base 8: mod_base = OTHER; note = 2'-O-methyladenosine-3'-phosphate
  modified_base 9: mod_base = OTHER; note = 2'-deoxy-2'-fluoroadenosine-3'-phosphate
  modified_base 10: mod_base = OTHER; note = 2'-deoxy-2'-fluoroguanosine-3'-phosphate
  modified_base 11: mod_base = OTHER; note = 2'-deoxy-2'-fluoroguanosine-3'-phosphate
  modified_base 12: mod_base = OTHER; note = 2'-O-methyluridine-3'-phosphate
  modified_base 13: mod_base = OTHER; note = 2'-deoxy-2'-fluoroadenosine-3'-phosphate
  modified_base 14: mod_base = OTHER; note = 2'-O-methylguanosine-3'-phosphate
  modified_base 15: mod_base = OTHER; note = 2'-deoxy-2'-fluoroadenosine-3'-phosphate
  modified_base 16: mod_base = OTHER; note = 2'-O-methyladenosine-3'-phosphate
  modified_base 17: mod_base = OTHER; note = 2'-deoxy-2'-fluoroguanosine-3'-phosphate
  modified_base 18: mod_base = OTHER; note = 2'-O-methyluridine-3'-phosphate
  modified_base 19: mod_base = OTHER; note = 2'-deoxy-2'-fluorocytidine-3'-phosphate
  modified_base 20: mod_base = OTHER; note = 2'-O-methyluridine-3'-phosphate
  modified_base 21: mod_base = OTHER; note = 2'-deoxy-2'-fluorouridine-3'-phosphate ((2S,4R)-1-[29-[[2-(acetylamino)-2-deoxy-beta-D-galactopyra nosyl]oxy]-14,14-bis[[3-[[3-[[5-[[2-(acetylamino)-2-deoxy-b eta-D-galactopyranosyl]oxy]-1-oxopentyl]amino]propyl]amino] -3-oxopropoxy]methyl]-1,12,19,25-tetraoxo-16-oxa-13,20,24-t riazanonacos-1-yl]-4-hydroxy-2-pyrrolidinyl)methyl ester
ggaagggaaggtagaagtctt

SEQ ID NO: 40 - RNA, 21 nt, synthetic construct
  source 1..21: mol_type = other RNA
  modified_base 1: mod_base = OTHER; note = 2'-deoxy-2'-fluorouridine-3'-phosphorothioate
  modified_base 2: mod_base = OTHER; note = 2'-O-methylguanosine-3'-phosphorothioate
  modified_base 3: mod_base = OTHER; note = 2'-deoxy-2'-fluorouridine-3'-phosphate
  modified_base 4: mod_base = OTHER; note = 2'-O-methylcytidine-3'-phosphate
  modified_base 5: mod_base = OTHER; note = 2'-deoxy-2'-fluorouridine-3'-phosphate
  modified_base 6: mod_base = OTHER; note = 2'-O-methyluridine-3'-phosphate
  modified_base 7: mod_base = OTHER; note = 2'-deoxy-2'-fluorocytidine-3'-phosphate
  modified_base 8: mod_base = OTHER; note = 2'-O-methyluridine-3'-phosphate
  modified_base 9: mod_base = OTHER; note = 2'-deoxy-2'-fluoroguanosine-3'-phosphate
  modified_base 10: mod_base = OTHER; note = 2'-deoxy-2'-fluorouridine-3'-phosphate
  modified_base 11: mod_base = OTHER; note = 2'-deoxy-2'-fluorouridine-3'-phosphate
  modified_base 12: mod_base = OTHER; note = 2'-O-methyluridine-3'-phosphate
  modified_base 13: mod_base = OTHER; note = 2'-deoxy-2'-fluoroadenosine-3'-phosphate
  modified_base 14: mod_base = OTHER; note = 2'-O-methylguanosine-3'-phosphate
  modified_base 15: mod_base = OTHER; note = 2'-deoxy-2'-fluoroadenosine-3'-phosphate
  modified_base 16: mod_base = OTHER; note = 2'-O-methyluridine-3'-phosphate
  modified_base 17: mod_base = OTHER; note = 2'-deoxy-2'-fluorouridine-3'-phosphate
  modified_base 18: mod_base = OTHER; note = 2'-O-methyluridine-3'-phosphate
  modified_base 19: mod_base = OTHER; note = 2'-deoxy-2'-fluorocytidine-3'-phosphate
  modified_base 20: mod_base = OTHER; note = 2'-O-methylcytidine-3'-phosphate
  modified_base 21: mod_base = OTHER; note = 2'-deoxy-2'-fluorouridine-3'-phosphate ((2S,4R)-1-[29-[[2-(acetylamino)-2-deoxy-beta-D-galactopyra nosyl]oxy]-14,14-bis[[3-[[3-[[5-[[2-(acetylamino)-2-deoxy-b eta-D-galactopyranosyl]oxy]-1-oxopentyl]amino]propyl]amino] -3-oxopropoxy]methyl]-1,12,19,25-tetraoxo-16-oxa-13,20,24-t riazanonacos-1-yl]-4-hydroxy-2-pyrrolidinyl)methyl ester
tgtcttctgtttagatttcct

SEQ ID NO: 41 - RNA, 21 nt, synthetic construct
  source 1..21: mol_type = other RNA
  modified_base 1: mod_base = OTHER; note = 2'-deoxy-2'-fluorocytidine-3'-phosphorothioate
  modified_base 2: mod_base = OTHER; note = 2'-O-methyluridine-3'-phosphorothioate
  modified_base 3: mod_base = OTHER; note = 2'-deoxy-2'-fluorouridine-3'-phosphate
  modified_base 4: mod_base = OTHER; note = 2'-O-methyluridine-3'-phosphate
  modified_base 5: mod_base = OTHER; note = 2'-deoxy-2'-fluoroguanosine-3'-phosphate
  modified_base 6: mod_base = OTHER; note = 2'-O-methylguanosine-3'-phosphate
  modified_base 7: mod_base = OTHER; note = 2'-deoxy-2'-fluorocytidine-3'-phosphate
  modified_base 8: mod_base = OTHER; note = 2'-O-methyluridine-3'-phosphate
  modified_base 9: mod_base = OTHER; note = 2'-deoxy-2'-fluoroguanosine-3'-phosphate
  modified_base 10: mod_base = OTHER; note = 2'-deoxy-2'-fluorouridine-3'-phosphate
  modified_base 11: mod_base = OTHER; note = 2'-deoxy-2'-fluorouridine-3'-phosphate
  modified_base 12: mod_base = OTHER; note = 2'-O-methyluridine-3'-phosphate
  modified_base 13: mod_base = OTHER; note = 2'-deoxy-2'-fluorocytidine-3'-phosphate
  modified_base 14: mod_base = OTHER; note = 2'-O-methylcytidine-3'-phosphate
  modified_base 15: mod_base = OTHER; note = 2'-deoxy-2'-fluoroadenosine-3'-phosphate
  modified_base 16: mod_base = OTHER; note = 2'-O-methyladenosine-3'-phosphate
  modified_base 17: mod_base = OTHER; note = 2'-deoxy-2'-fluoroguanosine-3'-phosphate
  modified_base 18: mod_base = OTHER; note = 2'-O-methyladenosine-3'-phosphate
  modified_base 19: mod_base = OTHER; note = 2'-deoxy-2'-fluorouridine-3'-phosphate
  modified_base 20: mod_base = OTHER; note = 2'-O-methylcytidine-3'-phosphate
  modified_base 21: mod_base = OTHER; note = 2'-deoxy-2'-fluorouridine-3'-phosphate ((2S,4R)-1-[29-[[2-(acetylamino)-2-deoxy-beta-D-galactopyra nosyl]oxy]-14,14-bis[[3-[[3-[[5-[[2-(acetylamino)-2-deoxy-b eta-D-galactopyranosyl]oxy]-1-oxopentyl]amino]propyl]amino] -3-oxopropoxy]methyl]-1,12,19,25-tetraoxo-16-oxa-13,20,24-t riazanonacos-1-yl]-4-hydroxy-2-pyrrolidinyl)methyl ester
ctttggctgtttccaagatct

SEQ ID NO: 42 - RNA, 21 nt, synthetic construct
  source 1..21: mol_type = other RNA
  modified_base 1: mod_base = OTHER; note = 2'-deoxy-2'-fluoroadenosine-3'-phosphorothioate
  modified_base 2: mod_base = OTHER; note = 2'-O-methyladenosine-3'-phosphorothioate
  modified_base 3: mod_base = OTHER; note = 2'-deoxy-2'-fluorouridine-3'-phosphate
  modified_base 4: mod_base = OTHER; note = 2'-O-methylguanosine-3'-phosphate
  modified_base 5: mod_base = OTHER; note = 2'-deoxy-2'-fluorouridine-3'-phosphate
  modified_base 6: mod_base = OTHER; note = 2'-O-methylguanosine-3'-phosphate
  modified_base 7: mod_base = OTHER; note = 2'-deoxy-2'-fluorouridine-3'-phosphate
  modified_base 8: mod_base = OTHER; note = 2'-O-methyluridine-3'-phosphate
  modified_base 9: mod_base = OTHER; note = 2'-deoxy-2'-fluorouridine-3'-phosphate
  modified_base 10: mod_base = OTHER; note = 2'-deoxy-2'-fluoroguanosine-3'-phosphate
  modified_base 11: mod_base = OTHER; note = 2'-deoxy-2'-fluoroguanosine-3'-phosphate
  modified_base 12: mod_base = OTHER; note = 2'-O-methylguanosine-3'-phosphate
  modified_base 13: mod_base = OTHER; note = 2'-deoxy-2'-fluorocytidine-3'-phosphate
  modified_base 14: mod_base = OTHER; note = 2'-O-methyladenosine-3'-phosphate
  modified_base 15: mod_base = OTHER; note = 2'-deoxy-2'-fluoroadenosine-3'-phosphate
  modified_base 16: mod_base = OTHER; note = 2'-O-methylcytidine-3'-phosphate
  modified_base 17: mod_base = OTHER; note = 2'-deoxy-2'-fluoroguanosine-3'-phosphate
  modified_base 18: mod_base = OTHER; note = 2'-O-methyluridine-3'-phosphate
  modified_base 19: mod_base = OTHER; note = 2'-deoxy-2'-fluorocytidine-3'-phosphate
  modified_base 20: mod_base = OTHER; note = 2'-O-methyladenosine-3'-phosphate
  modified_base 21: mod_base = OTHER; note = 2'-deoxy-2'-fluorouridine-3'-phosphate ((2S,4R)-1-[29-[[2-(acetylamino)-2-deoxy-beta-D-galactopyra nosyl]oxy]-14,14-bis[[3-[[3-[[5-[[2-(acetylamino)-2-deoxy-b eta-D-galactopyranosyl]oxy]-1-oxopentyl]amino]propyl]amino] -3-oxopropoxy]methyl]-1,12,19,25-tetraoxo-16-oxa-13,20,24-t riazanonacos-1-yl]-4-hydroxy-2-pyrrolidinyl)methyl ester
aatgtgtttgggcaacgtcat

SEQ ID NO: 43 - RNA, 21 nt, synthetic construct
  source 1..21: mol_type = other RNA
  modified_base 1: mod_base = OTHER; note = 2'-deoxy-2'-fluorouridine-3'-phosphorothioate
  modified_base 2: mod_base = OTHER; note = 2'-O-methylguanosine-3'-phosphorothioate
  modified_base 3: mod_base = OTHER; note = 2'-deoxy-2'-fluorouridine-3'-phosphate
  modified_base 4: mod_base = OTHER; note = 2'-O-methylguanosine-3'-phosphate
  modified_base 5: mod_base = OTHER; note = 2'-deoxy-2'-fluoroadenosine-3'-phosphate
  modified_base 6: mod_base = OTHER; note = 2'-O-methylcytidine-3'-phosphate
  modified_base 7: mod_base = OTHER; note = 2'-deoxy-2'-fluorouridine-3'-phosphate
  modified_base 8: mod_base = OTHER; note = 2'-O-methylguanosine-3'-phosphate
  modified_base 9: mod_base = OTHER; note = 2'-deoxy-2'-fluorouridine-3'-phosphate
  modified_base 10: mod_base = OTHER; note = 2'-deoxy-2'-fluoroguanosine-3'-phosphate
  modified_base 11: mod_base = OTHER; note = 2'-deoxy-2'-fluoroguanosine-3'-phosphate
  modified_base 12: mod_base = OTHER; note = 2'-O-methyladenosine-3'-phosphate
  modified_base 13: mod_base = OTHER; note = 2'-deoxy-2'-fluorocytidine-3'-phosphate
  modified_base 14: mod_base = OTHER; note = 2'-O-methyladenosine-3'-phosphate
  modified_base 15: mod_base = OTHER; note = 2'-deoxy-2'-fluorocytidine-3'-phosphate
  modified_base 16: mod_base = OTHER; note = 2'-O-methylcytidine-3'-phosphate
  modified_base 17: mod_base = OTHER; note = 2'-deoxy-2'-fluorocytidine-3'-phosphate
  modified_base 18: mod_base = OTHER; note = 2'-O-methylcytidine-3'-phosphate
  modified_base 19: mod_base = OTHER; note = 2'-deoxy-2'-fluorouridine-3'-phosphate
  modified_base 20: mod_base = OTHER; note = 2'-O-methyluridine-3'-phosphate
  modified_base 21: mod_base = OTHER; note = 2'-deoxy-2'-fluoroadenosine-3'-phosphate ((2S,4R)-1-[29-[[2-(acetylamino)-2-deoxy-beta-D-galactopyra nosyl]oxy]-14,14-bis[[3-[[3-[[5-[[2-(acetylamino)-2-deoxy-b eta-D-galactopyranosyl]oxy]-1-oxopentyl]amino]propyl]amino] -3-oxopropoxy]methyl]-1,12,19,25-tetraoxo-16-oxa-13,20,24-t riazanonacos-1-yl]-4-hydroxy-2-pyrrolidinyl)methyl ester
tgtgactgtggacacccctta

SEQ ID NO: 44 - RNA, 21 nt, synthetic construct
  source 1..21: mol_type = other RNA
  modified_base 1: mod_base = OTHER; note = 2'-deoxy-2'-fluoroguanosine-3'-phosphorothioate
  modified_base 2: mod_base = OTHER; note = 2'-O-methyladenosine-3'-phosphorothioate
  modified_base 3: mod_base = OTHER; note = 2'-deoxy-2'-fluorouridine-3'-phosphate
  modified_base 4: mod_base = OTHER; note = 2'-O-methylguanosine-3'-phosphate
  modified_base 5: mod_base = OTHER; note = 2'-deoxy-2'-fluoroguanosine-3'-phosphate
  modified_base 6: mod_base = OTHER; note = 2'-O-methylguanosine-3'-phosphate
  modified_base 7: mod_base = OTHER; note = 2'-deoxy-2'-fluoroguanosine-3'-phosphate
  modified_base 8: mod_base = OTHER; note = 2'-O-methyluridine-3'-phosphate
  modified_base 9: mod_base = OTHER; note = 2'-deoxy-2'-fluoroguanosine-3'-phosphate
  modified_base 10: mod_base = OTHER; note = 2'-deoxy-2'-fluorocytidine-3'-phosphate
  modified_base 11: mod_base = OTHER; note = 2'-deoxy-2'-fluorocytidine-3'-phosphate
  modified_base 12: mod_base = OTHER; note = 2'-O-methyladenosine-3'-phosphate
  modified_base 13: mod_base = OTHER; note = 2'-deoxy-2'-fluoroguanosine-3'-phosphate
  modified_base 14: mod_base = OTHER; note = 2'-O-methylcytidine-3'-phosphate
  modified_base 15: mod_base = OTHER; note = 2'-deoxy-2'-fluorouridine-3'-phosphate
  modified_base 16: mod_base = OTHER; note = 2'-O-methyladenosine-3'-phosphate
  modified_base 17: mod_base = OTHER; note = 2'-deoxy-2'-fluorocytidine-3'-phosphate
  modified_base 18: mod_base = OTHER; note = 2'-O-methyluridine-3'-phosphate
  modified_base 19: mod_base = OTHER; note = 2'-deoxy-2'-fluoroadenosine-3'-phosphate
  modified_base 20: mod_base = OTHER; note = 2'-O-methyluridine-3'-phosphate
  modified_base 21: mod_base = OTHER; note = 2'-deoxy-2'-fluorouridine-3'-phosphate ((2S,4R)-1-[29-[[2-(acetylamino)-2-deoxy-beta-D-galactopyra nosyl]oxy]-14,14-bis[[3-[[3-[[5-[[2-(acetylamino)-2-deoxy-b eta-D-galactopyranosyl]oxy]-1-oxopentyl]amino]propyl]amino] -3-oxopropoxy]methyl]-1,12,19,25-tetraoxo-16-oxa-13,20,24-t riazanonacos-1-yl]-4-hydroxy-2-pyrrolidinyl)methyl ester
gatggggtgccagctactatt

SEQ ID NO: 45 - RNA, 21 nt, synthetic construct
  source 1..21: mol_type = other RNA
  modified_base 1: mod_base = OTHER; note = 2'-deoxy-2'-fluoroguanosine-3'-phosphorothioate
  modified_base 2: mod_base = OTHER; note = 2'-O-methyladenosine-3'-phosphorothioate
  modified_base 3: mod_base = OTHER; note = 2'-deoxy-2'-fluoroadenosine-3'-phosphate
  modified_base 4: mod_base = OTHER; note = 2'-O-methyladenosine-3'-phosphate
  modified_base 5: mod_base = OTHER; note = 2'-deoxy-2'-fluoroadenosine-3'-phosphate
  modified_base 6: mod_base = OTHER; note = 2'-O-methyluridine-3'-phosphate
  modified_base 7: mod_base = OTHER; note = 2'-deoxy-2'-fluoroguanosine-3'-phosphate
  modified_base 8: mod_base = OTHER; note = 2'-O-methyluridine-3'-phosphate
  modified_base 9: mod_base = OTHER; note = 2'-deoxy-2'-fluoroguanosine-3'-phosphate
  modified_base 10: mod_base = OTHER; note = 2'-deoxy-2'-fluorouridine-3'-phosphate
  modified_base 11: mod_base = OTHER; note = 2'-deoxy-2'-fluorouridine-3'-phosphate
  modified_base 12: mod_base = OTHER; note = 2'-O-methyluridine-3'-phosphate
  modified_base 13: mod_base = OTHER; note = 2'-deoxy-2'-fluoroguanosine-3'-phosphate
  modified_base 14: mod_base = OTHER; note = 2'-O-methylguanosine-3'-phosphate
  modified_base 15: mod_base = OTHER; note = 2'-deoxy-2'-fluoroguanosine-3'-phosphate
  modified_base 16: mod_base = OTHER; note = 2'-O-methylcytidine-3'-phosphate
  modified_base 17: mod_base = OTHER; note = 2'-deoxy-2'-fluoroadenosine-3'-phosphate
  modified_base 18: mod_base = OTHER; note = 2'-O-methyladenosine-3'-phosphate
  modified_base 19: mod_base = OTHER; note = 2'-deoxy-2'-fluorocytidine-3'-phosphate
  modified_base 20: mod_base = OTHER; note = 2'-O-methylguanosine-3'-phosphate
  modified_base 21: mod_base = OTHER; note = 2'-deoxy-2'-fluorouridine-3'-phosphate ((2S,4R)-1-[29-[[2-(acetylamino)-2-deoxy-beta-D-galactopyra nosyl]oxy]-14,14-bis[[3-[[3-[[5-[[2-(acetylamino)-2-deoxy-b eta-D-galactopyranosyl]oxy]-1-oxopentyl]amino]propyl]amino] -3-oxopropoxy]methyl]-1,12,19,25-tetraoxo-16-oxa-13,20,24-t riazanonacos-1-yl]-4-hydroxy-2-pyrrolidinyl)methyl ester
gaaaatgtgtttgggcaacgt

SEQ ID NO: 46 - RNA, 21 nt, synthetic construct
  source 1..21: mol_type = other RNA
  modified_base 1: mod_base = OTHER; note = 2'-deoxy-2'-fluoroguanosine-3'-phosphorothioate
  modified_base 2: mod_base = OTHER; note = 2'-O-methylguanosine-3'-phosphorothioate
  modified_base 3: mod_base = OTHER; note = 2'-deoxy-2'-fluorocytidine-3'-phosphate
  modified_base 4: mod_base = OTHER; note = 2'-O-methyluridine-3'-phosphate
  modified_base 5: mod_base = OTHER; note = 2'-deoxy-2'-fluoroguanosine-3'-phosphate
  modified_base 6: mod_base = OTHER; note = 2'-O-methyluridine-3'-phosphate
  modified_base 7: mod_base = OTHER; note = 2'-deoxy-2'-fluorouridine-3'-phosphate
  modified_base 8: mod_base = OTHER; note = 2'-O-methyluridine-3'-phosphate
  modified_base 9: mod_base = OTHER; note = 2'-deoxy-2'-fluorocytidine-3'-phosphate
  modified_base 10: mod_base = OTHER; note = 2'-deoxy-2'-fluorocytidine-3'-phosphate
  modified_base 11: mod_base = OTHER; note = 2'-deoxy-2'-fluoroadenosine-3'-phosphate
  modified_base 12: mod_base = OTHER; note = 2'-O-methyladenosine-3'-phosphate
  modified_base 13: mod_base = OTHER; note = 2'-deoxy-2'-fluoroguanosine-3'-phosphate
  modified_base 14: mod_base = OTHER; note = 2'-O-methyladenosine-3'-phosphate
  modified_base 15: mod_base = OTHER; note = 2'-deoxy-2'-fluorouridine-3'-phosphate
  modified_base 16: mod_base = OTHER; note = 2'-O-methylcytidine-3'-phosphate
  modified_base 17: mod_base = OTHER; note = 2'-deoxy-2'-fluorouridine-3'-phosphate
  modified_base 18: mod_base = OTHER; note = 2'-O-methylguanosine-3'-phosphate
  modified_base 19: mod_base = OTHER; note = 2'-deoxy-2'-fluoroadenosine-3'-phosphate
  modified_base 20: mod_base = OTHER; note = 2'-O-methylcytidine-3'-phosphate
  modified_base 21: mod_base = OTHER; note = 2'-deoxy-2'-fluoroadenosine-3'-phosphate ((2S,4R)-1-[29-[[2-(acetylamino)-2-deoxy-beta-D-galactopyra nosyl]oxy]-14,14-bis[[3-[[3-[[5-[[2-(acetylamino)-2-deoxy-b eta-D-galactopyranosyl]oxy]-1-oxopentyl]amino]propyl]amino] -3-oxopropoxy]methyl]-1,12,19,25-tetraoxo-16-oxa-13,20,24-t riazanonacos-1-yl]-4-hydroxy-2-pyrrolidinyl)methyl ester
ggctgtttccaagatctgaca

SEQ ID NO: 47 - RNA, 21 nt, synthetic construct
  source 1..21: mol_type = other RNA
  modified_base 1: mod_base = OTHER; note = 2'-deoxy-2'-fluorouridine-3'-phosphorothioate
  modified_base 2: mod_base = OTHER; note = 2'-O-methylcytidine-3'-phosphorothioate
  modified_base 3: mod_base = OTHER; note = 2'-deoxy-2'-fluorocytidine-3'-phosphate
  modified_base 4: mod_base = OTHER; note = 2'-O-methyladenosine-3'-phosphate
  modified_base 5: mod_base = OTHER; note = 2'-deoxy-2'-fluoroadenosine-3'-phosphate
  modified_base 6: mod_base = OTHER; note = 2'-O-methylcytidine-3'-phosphate
  modified_base 7: mod_base = OTHER; note = 2'-deoxy-2'-fluoroadenosine-3'-phosphate
  modified_base 8: mod_base = OTHER; note = 2'-O-methyladenosine-3'-phosphate
  modified_base 9: mod_base = OTHER; note = 2'-deoxy-2'-fluoroadenosine-3'-phosphate
  modified_base 10: mod_base = OTHER; note = 2'-deoxy-2'-fluoroadenosine-3'-phosphate
  modified_base 11: mod_base = OTHER; note = 2'-deoxy-2'-fluorouridine-3'-phosphate
  modified_base 12: mod_base = OTHER; note = 2'-O-methyladenosine-3'-phosphate
  modified_base 13: mod_base = OTHER; note = 2'-deoxy-2'-fluoroguanosine-3'-phosphate
  modified_base 14: mod_base = OTHER; note = 2'-O-methylcytidine-3'-phosphate
  modified_base 15: mod_base = OTHER; note = 2'-deoxy-2'-fluorocytidine-3'-phosphate
  modified_base 16: mod_base = OTHER; note = 2'-O-methyladenosine-3'-phosphate
  modified_base 17: mod_base = OTHER; note = 2'-deoxy-2'-fluorocytidine-3'-phosphate
  modified_base 18: mod_base = OTHER; note = 2'-O-methylcytidine-3'-phosphate
  modified_base 19: mod_base = OTHER; note = 2'-deoxy-2'-fluorocytidine-3'-phosphate
  modified_base 20: mod_base = OTHER; note = 2'-O-methylcytidine-3'-phosphate
  modified_base 21: mod_base = OTHER; note = 2'-deoxy-2'-fluorouridine-3'-phosphate ((2S,4R)-1-[29-[[2-(acetylamino)-2-deoxy-beta-D-galactopyra nosyl]oxy]-14,14-bis[[3-[[3-[[5-[[2-(acetylamino)-2-deoxy-b eta-D-galactopyranosyl]oxy]-1-oxopentyl]amino]propyl]amino] -3-oxopropoxy]methyl]-1,12,19,25-tetraoxo-16-oxa-13,20,24-t riazanonacos-1-yl]-4-hydroxy-2-pyrrolidinyl)methyl ester
tccaacaaaatagccacccct

SEQ ID NO: 48 - RNA, 21 nt, synthetic construct
  source 1..21: mol_type = other RNA
  modified_base 1: mod_base = OTHER; note = 2'-deoxy-2'-fluoroguanosine-3'-phosphorothioate
  modified_base 2: mod_base = OTHER; note = 2'-O-methyluridine-3'-phosphorothioate
  modified_base 3: mod_base = OTHER; note = 2'-deoxy-2'-fluorocytidine-3'-phosphate
  modified_base 4: mod_base = OTHER; note = 2'-O-methyluridine-3'-phosphate
  modified_base 5: mod_base = OTHER; note = 2'-deoxy-2'-fluorouridine-3'-phosphate
  modified_base 6: mod_base = OTHER; note = 2'-O-methylcytidine-3'-phosphate
  modified_base 7: mod_base = OTHER; note = 2'-deoxy-2'-fluorouridine-3'-phosphate
  modified_base 8: mod_base = OTHER; note = 2'-O-methylguanosine-3'-phosphate
  modified_base 9: mod_base = OTHER; note = 2'-deoxy-2'-fluorouridine-3'-phosphate
  modified_base 10: mod_base = OTHER; note = 2'-deoxy-2'-fluorouridine-3'-phosphate
  modified_base 11: mod_base = OTHER; note = 2'-deoxy-2'-fluorouridine-3'-phosphate
  modified_base 12: mod_base = OTHER; note = 2'-O-methyladenosine-3'-phosphate
  modified_base 13: mod_base = OTHER; note = 2'-deoxy-2'-fluoroguanosine-3'-phosphate
  modified_base 14: mod_base = OTHER; note = 2'-O-methyladenosine-3'-phosphate
  modified_base 15: mod_base = OTHER; note = 2'-deoxy-2'-fluorouridine-3'-phosphate
  modified_base 16: mod_base = OTHER; note = 2'-O-methyluridine-3'-phosphate
  modified_base 17: mod_base = OTHER; note = 2'-deoxy-2'-fluorouridine-3'-phosphate
  modified_base 18: mod_base = OTHER; note = 2'-O-methylcytidine-3'-phosphate
  modified_base 19: mod_base = OTHER; note = 2'-deoxy-2'-fluorocytidine-3'-phosphate
  modified_base 20: mod_base = OTHER; note = 2'-O-methyluridine-3'-phosphate
  modified_base 21: mod_base = OTHER; note = 2'-deoxy-2'-fluorouridine-3'-phosphate ((2S,4R)-1-[29-[[2-(acetylamino)-2-deoxy-beta-D-galactopyra nosyl]oxy]-14,14-bis[[3-[[3-[[5-[[2-(acetylamino)-2-deoxy-b eta-D-galactopyranosyl]oxy]-1-oxopentyl]amino]propyl]amino] -3-oxopropoxy]methyl]-1,12,19,25-tetraoxo-16-oxa-13,20,24-t riazanonacos-1-yl]-4-hydroxy-2-pyrrolidinyl)methyl ester
gtcttctgtttagatttcctt

SEQ ID NO: 49 - RNA, 21 nt, synthetic construct
  source 1..21: mol_type = other RNA
  modified_base 1: mod_base = OTHER; note = 2'-deoxy-2'-fluorouridine-3'-phosphorothioate
  modified_base 2: mod_base = OTHER; note = 2'-O-methylguanosine-3'-phosphorothioate
  modified_base 3: mod_base = OTHER; note = 2'-deoxy-2'-fluoroguanosine-3'-phosphate
  modified_base 4: mod_base = OTHER; note = 2'-O-methyladenosine-3'-phosphate
  modified_base 5: mod_base = OTHER; note = 2'-deoxy-2'-fluoroadenosine-3'-phosphate
  modified_base 6: mod_base = OTHER; note = 2'-O-methylguanosine-3'-phosphate
  modified_base 7: mod_base = OTHER; note = 2'-deoxy-2'-fluoroguanosine-3'-phosphate
  modified_base 8: mod_base = OTHER; note = 2'-O-methylguanosine-3'-phosphate
  modified_base 9: mod_base = OTHER; note = 2'-deoxy-2'-fluoroadenosine-3'-phosphate
  modified_base 10: mod_base = OTHER; note = 2'-deoxy-2'-fluoroadenosine-3'-phosphate
  modified_base 11: mod_base = OTHER; note = 2'-deoxy-2'-fluoroguanosine-3'-phosphate
  modified_base 12: mod_base = OTHER; note = 2'-O-methylguanosine-3'-phosphate
  modified_base 13: mod_base = OTHER; note = 2'-deoxy-2'-fluorouridine-3'-phosphate
  modified_base 14: mod_base = OTHER; note = 2'-O-methyladenosine-3'-phosphate
  modified_base 15: mod_base = OTHER; note = 2'-deoxy-2'-fluoroguanosine-3'-phosphate
  modified_base 16: mod_base = OTHER; note = 2'-O-methyladenosine-3'-phosphate
  modified_base 17: mod_base = OTHER; note = 2'-deoxy-2'-fluoroadenosine-3'-phosphate
  modified_base 18: mod_base = OTHER; note = 2'-O-methylguanosine-3'-phosphate
  modified_base 19: mod_base = OTHER; note = 2'-deoxy-2'-fluorouridine-3'-phosphate
  modified_base 20: mod_base = OTHER; note = 2'-O-methylcytidine-3'-phosphate
  modified_base 21: mod_base = OTHER; note = 2'-deoxy-2'-fluorouridine-3'-phosphate ((2S,4R)-1-[29-[[2-(acetylamino)-2-deoxy-beta-D-galactopyra nosyl]oxy]-14,14-bis[[3-[[3-[[5-[[2-(acetylamino)-2-deoxy-b eta-D-galactopyranosyl]oxy]-1-oxopentyl]amino]propyl]amino] -3-oxopropoxy]methyl]-1,12,19,25-tetraoxo-16-oxa-13,20,24-t riazanonacos-1-yl]-4-hydroxy-2-pyrrolidinyl)methyl ester
tggaagggaaggtagaagtct

SEQ ID NO: 50 - RNA, 21 nt, synthetic construct
  source 1..21: mol_type = other RNA
  modified_base 1: mod_base = OTHER; note = 2'-deoxy-2'-fluorouridine-3'-phosphorothioate
  modified_base 2: mod_base = OTHER; note = 2'-O-methylcytidine-3'-phosphorothioate
  modified_base 3: mod_base = OTHER; note = 2'-deoxy-2'-fluorocytidine-3'-phosphate
  modified_base 4: mod_base = OTHER; note = 2'-O-methyluridine-3'-phosphate
  modified_base 5: mod_base = OTHER; note = 2'-deoxy-2'-fluorouridine-3'-phosphate
  modified_base 6: mod_base = OTHER; note = 2'-O-methyluridine-3'-phosphate
  modified_base 7: mod_base = OTHER; note = 2'-deoxy-2'-fluoroguanosine-3'-phosphate
  modified_base 8: mod_base = OTHER; note = 2'-O-methylguanosine-3'-phosphate
  modified_base 9: mod_base = OTHER; note = 2'-deoxy-2'-fluorocytidine-3'-phosphate
  modified_base 10: mod_base = OTHER; note = 2'-deoxy-2'-fluorouridine-3'-phosphate
  modified_base 11: mod_base = OTHER; note = 2'-deoxy-2'-fluoroguanosine-3'-phosphate
  modified_base 12: mod_base = OTHER; note = 2'-O-methyluridine-3'-phosphate
  modified_base 13: mod_base = OTHER; note = 2'-deoxy-2'-fluorouridine-3'-phosphate
  modified_base 14: mod_base = OTHER; note = 2'-O-methyluridine-3'-phosphate
  modified_base 15: mod_base = OTHER; note = 2'-deoxy-2'-fluorocytidine-3'-phosphate
  modified_base 16: mod_base = OTHER; note = 2'-O-methylcytidine-3'-phosphate
  modified_base 17: mod_base = OTHER; note = 2'-deoxy-2'-fluoroadenosine-3'-phosphate
  modified_base 18: mod_base = OTHER; note = 2'-O-methyladenosine-3'-phosphate
  modified_base 19: mod_base = OTHER; note = 2'-deoxy-2'-fluoroguanosine-3'-phosphate
  modified_base 20: mod_base = OTHER; note = 2'-O-methyladenosine-3'-phosphate
  modified_base 21: mod_base = OTHER; note = 2'-deoxy-2'-fluorouridine-3'-phosphate ((2S,4R)-1-[29-[[2-(acetylamino)-2-deoxy-beta-D-galactopyra nosyl]oxy]-14,14-bis[[3-[[3-[[5-[[2-(acetylamino)-2-deoxy-b eta-D-galactopyranosyl]oxy]-1-oxopentyl]amino]propyl]amino] -3-oxopropoxy]methyl]-1,12,19,25-tetraoxo-16-oxa-13,20,24-t riazanonacos-1-yl]-4-hydroxy-2-pyrrolidinyl)methyl ester
tcctttggctgtttccaagat

SEQ ID NO: 51 - RNA, 21 nt, synthetic construct
  source 1..21: mol_type = other RNA
  modified_base 1: mod_base = OTHER; note = 2'-deoxy-2'-fluorocytidine-3'-phosphorothioate
  modified_base 2: mod_base = OTHER; note = 2'-O-methyladenosine-3'-phosphorothioate
  modified_base 3: mod_base = OTHER; note = 2'-deoxy-2'-fluorouridine-3'-phosphate
  modified_base 4: mod_base = OTHER; note = 2'-O-methylcytidine-3'-phosphate
  modified_base 5: mod_base = OTHER; note = 2'-deoxy-2'-fluorouridine-3'-phosphate
  modified_base 6: mod_base = OTHER; note = 2'-O-methylcytidine-3'-phosphate
  modified_base 7: mod_base = OTHER; note = 2'-deoxy-2'-fluorouridine-3'-phosphate
  modified_base 8: mod_base = OTHER; note = 2'-O-methylcytidine-3'-phosphate
  modified_base 9: mod_base = OTHER; note = 2'-deoxy-2'-fluoroadenosine-3'-phosphate
  modified_base 10: mod_base = OTHER; note = 2'-deoxy-2'-fluoroguanosine-3'-phosphate
  modified_base 11: mod_base = OTHER; note = 2'-deoxy-2'-fluorocytidine-3'-phosphate
  modified_base 12: mod_base = OTHER; note = 2'-O-methyluridine-3'-phosphate
  modified_base 13: mod_base = OTHER; note = 2'-deoxy-2'-fluoroguanosine-3'-phosphate
  modified_base 14: mod_base = OTHER; note = 2'-O-methylguanosine-3'-phosphate
  modified_base 15: mod_base = OTHER; note = 2'-deoxy-2'-fluoroguanosine-3'-phosphate
  modified_base 16: mod_base = OTHER; note = 2'-O-methyladenosine-3'-phosphate
  modified_base 17: mod_base = OTHER; note = 2'-deoxy-2'-fluorouridine-3'-phosphate
  modified_base 18: mod_base = OTHER; note = 2'-O-methylguanosine-3'-phosphate
  modified_base 19: mod_base = OTHER; note = 2'-deoxy-2'-fluoroadenosine-3'-phosphate
  modified_base 20: mod_base = OTHER; note = 2'-O-methyluridine-3'-phosphate
  modified_base 21: mod_base = OTHER; note = 2'-deoxy-2'-fluoroadenosine-3'-phosphate ((2S,4R)-1-[29-[[2-(acetylamino)-2-deoxy-beta-D-galactopyra nosyl]oxy]-14,14-bis[[3-[[3-[[5-[[2-(acetylamino)-2-deoxy-b eta-D-galactopyranosyl]oxy]-1-oxopentyl]amino]propyl]amino] -3-oxopropoxy]methyl]-1,12,19,25-tetraoxo-16-oxa-13,20,24-t riazanonacos-1-yl]-4-hydroxy-2-pyrrolidinyl)methyl ester
catctctcagctgggatgata

SEQ ID NO: 52 - RNA, 21 nt, synthetic construct
  source 1..21: mol_type = other RNA
  modified_base 1: mod_base = OTHER; note = 2'-deoxy-2'-fluoroguanosine-3'-phosphorothioate
  modified_base 2: mod_base = OTHER; note = 2'-O-methylguanosine-3'-phosphorothioate
  modified_base 3: mod_base = OTHER; note = 2'-deoxy-2'-fluoroguanosine-3'-phosphate
  modified_base 4: mod_base = OTHER; note = 2'-O-methylguanosine-3'-phosphate
  modified_base 5: mod_base = OTHER; note = 2'-deoxy-2'-fluorouridine-3'-phosphate
  modified_base 6: mod_base = OTHER; note = 2'-O-methylguanosine-3'-phosphate
  modified_base 7: mod_base = OTHER; note = 2'-deoxy-2'-fluorocytidine-3'-phosphate
  modified_base 8: mod_base = OTHER; note = 2'-O-methylcytidine-3'-phosphate
  modified_base 9: mod_base = OTHER; note = 2'-deoxy-2'-fluoroadenosine-3'-phosphate
  modified_base 10: mod_base = OTHER; note = 2'-deoxy-2'-fluoroguanosine-3'-phosphate
  modified_base 11: mod_base = OTHER; note = 2'-deoxy-2'-fluorocytidine-3'-phosphate
  modified_base 12: mod_base = OTHER; note = 2'-O-methyluridine-3'-phosphate
  modified_base 13: mod_base = OTHER; note = 2'-deoxy-2'-fluoroadenosine-3'-phosphate
  modified_base 14: mod_base = OTHER; note = 2'-O-methylcytidine-3'-phosphate
  modified_base 15: mod_base = OTHER; note = 2'-deoxy-2'-fluorouridine-3'-phosphate
  modified_base 16: mod_base = OTHER; note = 2'-O-methyladenosine-3'-phosphate
  modified_base 17: mod_base = OTHER; note = 2'-deoxy-2'-fluorouridine-3'-phosphate
  modified_base 18: mod_base = OTHER; note = 2'-O-methyluridine-3'-phosphate
  modified_base 19: mod_base = OTHER; note = 2'-deoxy-2'-fluoroguanosine-3'-phosphate
  modified_base 20: mod_base = OTHER; note = 2'-O-methyladenosine-3'-phosphate
  modified_base 21: mod_base = OTHER; note = 2'-deoxy-2'-fluorouridine-3'-phosphate ((2S,4R)-1-[29-[[2-(acetylamino)-2-deoxy-beta-D-galactopyra nosyl]oxy]-14,14-bis[[3-[[3-[[5-[[2-(acetylamino)-2-deoxy-b eta-D-galactopyranosyl]oxy]-1-oxopentyl]amino]propyl]amino] -3-oxopropoxy]methyl]-1,12,19,25-tetraoxo-16-oxa-13,20,24-t riazanonacos-1-yl]-4-hydroxy-2-pyrrolidinyl)methyl ester
ggggtgccagctactattgat

SEQ ID NO: 53 - RNA, 21 nt, synthetic construct
  source 1..21: mol_type = other RNA
  modified_base 1: mod_base = OTHER; note = 2'-deoxy-2'-fluoroadenosine-3'-phosphorothioate
  modified_base 2: mod_base = OTHER; note = 2'-O-methyluridine-3'-phosphorothioate
  modified_base 3: mod_base = OTHER; note = 2'-deoxy-2'-fluoroguanosine-3'-phosphate
  modified_base 4: mod_base = OTHER; note = 2'-O-methyluridine-3'-phosphate
  modified_base 5: mod_base = OTHER; note = 2'-deoxy-2'-fluoroguanosine-3'-phosphate
  modified_base 6: mod_base = OTHER; note = 2'-O-methyluridine-3'-phosphate
  modified_base 7: mod_base = OTHER; note = 2'-deoxy-2'-fluorouridine-3'-phosphate
  modified_base 8: mod_base = OTHER; note = 2'-O-methyluridine-3'-phosphate
  modified_base 9: mod_base = OTHER; note = 2'-deoxy-2'-fluoroguanosine-3'-phosphate
  modified_base 10: mod_base = OTHER; note = 2'-deoxy-2'-fluoroguanosine-3'-phosphate
  modified_base 11: mod_base = OTHER; note = 2'-deoxy-2'-fluoroguanosine-3'-phosphate
  modified_base 12: mod_base = OTHER; note = 2'-O-methylcytidine-3'-phosphate
  modified_base 13: mod_base = OTHER; note = 2'-deoxy-2'-fluoroadenosine-3'-phosphate
  modified_base 14: mod_base = OTHER; note = 2'-O-methyladenosine-3'-phosphate
  modified_base 15: mod_base = OTHER; note = 2'-deoxy-2'-fluorocytidine-3'-phosphate
  modified_base 16: mod_base = OTHER; note = 2'-O-methylguanosine-3'-phosphate
  modified_base 17: mod_base = OTHER; note = 2'-deoxy-2'-fluorouridine-3'-phosphate
  modified_base 18: mod_base = OTHER; note = 2'-O-methylcytidine-3'-phosphate
  modified_base 19: mod_base = OTHER; note = 2'-deoxy-2'-fluoroadenosine-3'-phosphate
  modified_base 20: mod_base = OTHER; note = 2'-O-methyluridine-3'-phosphate
  modified_base 21: mod_base = OTHER; note = 2'-deoxy-2'-fluoroadenosine-3'-phosphate ((2S,4R)-1-[29-[[2-(acetylamino)-2-deoxy-beta-D-galactopyra nosyl]oxy]-14,14-bis[[3-[[3-[[5-[[2-(acetylamino)-2-deoxy-b eta-D-galactopyranosyl]oxy]-1-oxopentyl]amino]propyl]amino] -3-oxopropoxy]methyl]-1,12,19,25-tetraoxo-16-oxa-13,20,24-t riazanonacos-1-yl]-4-hydroxy-2-pyrrolidinyl)methyl ester
atgtgtttgggcaacgtcata

SEQ ID NO: 54 - RNA, 21 nt, synthetic construct
  source 1..21: mol_type = other RNA
  modified_base 1: mod_base = OTHER; note = 2'-deoxy-2'-fluorocytidine-3'-phosphorothioate
  modified_base 2: mod_base = OTHER; note = 2'-O-methyluridine-3'-phosphorothioate
  modified_base 3: mod_base = OTHER; note = 2'-deoxy-2'-fluoroguanosine-3'-phosphate
  modified_base 4: mod_base = OTHER; note = 2'-O-methyluridine-3'-phosphate
  modified_base 5: mod_base = OTHER; note = 2'-deoxy-2'-fluorouridine-3'-phosphate
  modified_base 6: mod_base = OTHER; note = 2'-O-methyluridine-3'-phosphate
  modified_base 7: mod_base = OTHER; note = 2'-deoxy-2'-fluoroadenosine-3'-phosphate
  modified_base 8: mod_base = OTHER; note = 2'-O-methylguanosine-3'-phosphate
  modified_base 9: mod_base = OTHER; note = 2'-deoxy-2'-fluoroadenosine-3'-phosphate
  modified_base 10: mod_base = OTHER; note = 2'-deoxy-2'-fluorouridine-3'-phosphate
  modified_base 11: mod_base = OTHER; note = 2'-deoxy-2'-fluorouridine-3'-phosphate
  modified_base 12: mod_base = OTHER; note = 2'-O-methyluridine-3'-phosphate
  modified_base 13: mod_base = OTHER; note = 2'-deoxy-2'-fluorocytidine-3'-phosphate
  modified_base 14: mod_base = OTHER; note = 2'-O-methylcytidine-3'-phosphate
  modified_base 15: mod_base = OTHER; note = 2'-deoxy-2'-fluorouridine-3'-phosphate
  modified_base 16: mod_base = OTHER; note = 2'-O-methyluridine-3'-phosphate
  modified_base 17: mod_base = OTHER; note = 2'-deoxy-2'-fluoroadenosine-3'-phosphate
  modified_base 18: mod_base = OTHER; note = 2'-O-methyladenosine-3'-phosphate
  modified_base 19: mod_base = OTHER; note = 2'-deoxy-2'-fluoroguanosine-3'-phosphate
  modified_base 20: mod_base = OTHER; note = 2'-O-methyladenosine-3'-phosphate
  modified_base 21: mod_base = OTHER; note = 2'-deoxy-2'-fluoroadenosine-3'-phosphate ((2S,4R)-1-[29-[[2-(acetylamino)-2-deoxy-beta-D-galactopyra nosyl]oxy]-14,14-bis[[3-[[3-[[5-[[2-(acetylamino)-2-deoxy-b eta-D-galactopyranosyl]oxy]-1-oxopentyl]amino]propyl]amino] -3-oxopropoxy]methyl]-1,12,19,25-tetraoxo-16-oxa-13,20,24-t riazanonacos-1-yl]-4-hydroxy-2-pyrrolidinyl)methyl ester
ctgtttagatttccttaagaa

SEQ ID NO: 55 - RNA, 21 nt, synthetic construct
  source 1..21: mol_type = other RNA
  modified_base 1: mod_base = OTHER; note = 2'-deoxy-2'-fluoroadenosine-3'-phosphorothioate
  modified_base 2: mod_base = OTHER; note = 2'-O-methylguanosine-3'-phosphorothioate
  modified_base 3: mod_base = OTHER; note = 2'-deoxy-2'-fluoroadenosine-3'-phosphate
  modified_base 4: mod_base = OTHER; note = 2'-O-methyladenosine-3'-phosphate
  modified_base 5: mod_base = OTHER; note = 2'-deoxy-2'-fluoroadenosine-3'-phosphate
  modified_base 6: mod_base = OTHER; note = 2'-O-methylguanosine-3'-phosphate
  modified_base 7: mod_base = OTHER; note = 2'-deoxy-2'-fluoroadenosine-3'-phosphate
  modified_base 8: mod_base = OTHER; note = 2'-O-methyladenosine-3'-phosphate
  modified_base 9: mod_base = OTHER; note = 2'-deoxy-2'-fluoroadenosine-3'-phosphate
  modified_base 10: mod_base = OTHER; note = 2'-deoxy-2'-fluorouridine-3'-phosphate
  modified_base 11: mod_base = OTHER; note = 2'-deoxy-2'-fluoroguanosine-3'-phosphate
  modified_base 12: mod_base = OTHER; note = 2'-O-methylguanosine-3'-phosphate
  modified_base 13: mod_base = OTHER; note = 2'-deoxy-2'-fluoroadenosine-3'-phosphate
  modified_base 14: mod_base = OTHER; note = 2'-O-methylcytidine-3'-phosphate
  modified_base 15: mod_base = OTHER; note = 2'-deoxy-2'-fluorouridine-3'-phosphate
  modified_base 16: mod_base = OTHER; note = 2'-O-methyluridine-3'-phosphate
  modified_base 17: mod_base = OTHER; note = 2'-deoxy-2'-fluoroguanosine-3'-phosphate
  modified_base 18: mod_base = OTHER; note = 2'-O-methylcytidine-3'-phosphate
  modified_base 19: mod_base = OTHER; note = 2'-deoxy-2'-fluoroadenosine-3'-phosphate
  modified_base 20: mod_base = OTHER; note = 2'-O-methyluridine-3'-phosphate
  modified_base 21: mod_base = OTHER; note = 2'-deoxy-2'-fluoroadenosine-3'-phosphate ((2S,4R)-1-[29-[[2-(acetylamino)-2-deoxy-beta-D-galactopyra nosyl]oxy]-14,14-bis[[3-[[3-[[5-[[2-(acetylamino)-2-deoxy-b eta-D-galactopyranosyl]oxy]-1-oxopentyl]amino]propyl]amino] -3-oxopropoxy]methyl]-1,12,19,25-tetraoxo-16-oxa-13,20,24-t riazanonacos-1-yl]-4-hydroxy-2-pyrrolidinyl)methyl ester
agaaagaaatggacttgcata

SEQ ID NO: 56 - RNA, 21 nt, synthetic construct
  source 1..21: mol_type = other RNA
  modified_base 1: mod_base = OTHER; note = 2'-deoxy-2'-fluoroguanosine-3'-phosphorothioate
  modified_base 2: mod_base = OTHER; note = 2'-O-methylcytidine-3'-phosphorothioate
  modified_base 3: mod_base = OTHER; note = 2'-deoxy-2'-fluoroadenosine-3'-phosphate
  modified_base 4: mod_base = OTHER; note = 2'-O-methyluridine-3'-phosphate
  modified_base 5: mod_base = OTHER; note = 2'-deoxy-2'-fluorocytidine-3'-phosphate
  modified_base 6: mod_base = OTHER; note = 2'-O-methylcytidine-3'-phosphate
  modified_base 7: mod_base = OTHER; note = 2'-deoxy-2'-fluorouridine-3'-phosphate
  modified_base 8: mod_base = OTHER; note = 2'-O-methylguanosine-3'-phosphate
  modified_base 9: mod_base = OTHER; note = 2'-deoxy-2'-fluoroguanosine-3'-phosphate
  modified_base 10: mod_base = OTHER; note = 2'-deoxy-2'-fluoroadenosine-3'-phosphate
  modified_base 11: mod_base = OTHER; note = 2'-deoxy-2'-fluoroadenosine-3'-phosphate
  modified_base 12: mod_base = OTHER; note = 2'-O-methyladenosine-3'-phosphate
  modified_base 13: mod_base = OTHER; note = 2'-deoxy-2'-fluorouridine-3'-phosphate
  modified_base 14: mod_base = OTHER; note = 2'-O-methyladenosine-3'-phosphate
  modified_base 15: mod_base = OTHER; note = 2'-deoxy-2'-fluorouridine-3'-phosphate
  modified_base 16: mod_base = OTHER; note = 2'-O-methyladenosine-3'-phosphate
  modified_base 17: mod_base = OTHER; note = 2'-deoxy-2'-fluorouridine-3'-phosphate
  modified_base 18: mod_base = OTHER; note = 2'-O-methyluridine-3'-phosphate
  modified_base 19: mod_base = OTHER; note = 2'-deoxy-2'-fluoroadenosine-3'-phosphate
  modified_base 20: mod_base = OTHER; note = 2'-O-methyladenosine-3'-phosphate
  modified_base 21: mod_base = OTHER; note = 2'-deoxy-2'-fluoroadenosine-3'-phosphate ((2S,4R)-1-[29-[[2-(acetylamino)-2-deoxy-beta-D-galactopyra nosyl]oxy]-14,14-bis[[3-[[3-[[5-[[2-(acetylamino)-2-deoxy-b eta-D-galactopyranosyl]oxy]-1-oxopentyl]amino]propyl]amino] -3-oxopropoxy]methyl]-1,12,19,25-tetraoxo-16-oxa-13,20,24-t riazanonacos-1-yl]-4-hydroxy-2-pyrrolidinyl)methyl ester
gcatcctggaaatatattaaa

SEQ ID NO: 57 - RNA, 21 nt, synthetic construct
  source 1..21: mol_type = other RNA
  modified_base 1: mod_base = OTHER; note = 2'-deoxy-2'-fluorocytidine-3'-phosphorothioate
  modified_base 2: mod_base = OTHER; note = 2'-O-methylcytidine-3'-phosphorothioate
  modified_base 3: mod_base = OTHER; note = 2'-deoxy-2'-fluorouridine-3'-phosphate
  modified_base 4: mod_base = OTHER; note = 2'-O-methylguanosine-3'-phosphate
  modified_base 5: mod_base = OTHER; note = 2'-deoxy-2'-fluorouridine-3'-phosphate
  modified_base 6: mod_base = OTHER; note = 2'-O-methylcytidine-3'-phosphate
  modified_base 7: mod_base = OTHER; note = 2'-deoxy-2'-fluoroadenosine-3'-phosphate
  modified_base 8: mod_base = OTHER; note = 2'-O-methylguanosine-3'-phosphate
  modified_base 9: mod_base = OTHER; note = 2'-deoxy-2'-fluoroadenosine-3'-phosphate
  modified_base 10: mod_base = OTHER; note = 2'-deoxy-2'-fluorocytidine-3'-phosphate
  modified_base 11: mod_base = OTHER; note = 2'-deoxy-2'-fluorocytidine-3'-phosphate
  modified_base 12: mod_base = OTHER; note = 2'-O-methyladenosine-3'-phosphate
  modified_base 13: mod_base = OTHER; note = 2'-deoxy-2'-fluorouridine-3'-phosphate
  modified_base 14: mod_base = OTHER; note = 2'-O-methylguanosine-3'-phosphate
  modified_base 15: mod_base = OTHER; note = 2'-deoxy-2'-fluoroguanosine-3'-phosphate
  modified_base 16: mod_base = OTHER; note = 2'-O-methylguanosine-3'-phosphate
  modified_base 17: mod_base = OTHER; note = 2'-deoxy-2'-fluoroadenosine-3'-phosphate
  modified_base 18: mod_base = OTHER; note = 2'-O-methyladenosine-3'-phosphate
  modified_base 19: mod_base = OTHER; note = 2'-deoxy-2'-fluorocytidine-3'-phosphate
  modified_base 20: mod_base = OTHER; note = 2'-O-methyluridine-3'-phosphate
  modified_base 21: mod_base = OTHER; note = 2'-deoxy-2'-fluoroadenosine-3'-phosphate ((2S,4R)-1-[29-[[2-(acetylamino)-2-deoxy-beta-D-galactopyra nosyl]oxy]-14,14-bis[[3-[[3-[[5-[[2-(acetylamino)-2-deoxy-b eta-D-galactopyranosyl]oxy]-1-oxopentyl]amino]propyl]amino] -3-oxopropoxy]methyl]-1,12,19,25-tetraoxo-16-oxa-13,20,24-t riazanonacos-1-yl]-4-hydroxy-2-pyrrolidinyl)methyl ester
cctgtcagaccatgggaacta

SEQ ID NO: 58 - RNA, 21 nt, synthetic construct
  source 1..21: mol_type = other RNA
  modified_base 1: mod_base = OTHER; note = 2'-deoxy-2'-fluoroadenosine-3'-phosphorothioate
  modified_base 2: mod_base = OTHER; note = 2'-O-methyladenosine-3'-phosphorothioate
  modified_base 3: mod_base = OTHER; note = 2'-deoxy-2'-fluoroadenosine-3'-phosphate
  modified_base 4: mod_base = OTHER; note = 2'-O-methylcytidine-3'-phosphate
  modified_base 5: mod_base = OTHER; note = 2'-deoxy-2'-fluoroadenosine-3'-phosphate
  modified_base 6: mod_base = OTHER; note = 2'-O-methyluridine-3'-phosphate
  modified_base 7: mod_base = OTHER; note = 2'-deoxy-2'-fluoroguanosine-3'-phosphate
  modified_base 8: mod_base = OTHER; note = 2'-O-methylguanosine-3'-phosphate
  modified_base 9: mod_base = OTHER; note = 2'-deoxy-2'-fluorouridine-3'-phosphate
  modified_base 10: mod_base = OTHER; note = 2'-deoxy-2'-fluoroguanosine-3'-phosphate
  modified_base 11: mod_base = OTHER; note = 2'-deoxy-2'-fluorouridine-3'-phosphate
  modified_base 12: mod_base = OTHER; note = 2'-O-methylguanosine-3'-phosphate
  modified_base 13: mod_base = OTHER; note = 2'-deoxy-2'-fluoroguanosine-3'-phosphate
  modified_base 14: mod_base = OTHER; note = 2'-O-methyladenosine-3'-phosphate
  modified_base 15: mod_base = OTHER; note = 2'-deoxy-2'-fluorouridine-3'-phosphate
  modified_base 16: mod_base = OTHER; note = 2'-O-methylguanosine-3'-phosphate
  modified_base 17: mod_base = OTHER; note = 2'-deoxy-2'-fluoroguanosine-3'-phosphate
  modified_base 18: mod_base = OTHER; note = 2'-O-methylguanosine-3'-phosphate
  modified_base 19: mod_base = OTHER; note = 2'-deoxy-2'-fluoroadenosine-3'-phosphate
  modified_base 20: mod_base = OTHER; note = 2'-O-methyluridine-3'-phosphate
  modified_base 21: mod_base = OTHER; note = 2'-deoxy-2'-fluoroadenosine-3'-phosphate ((2S,4R)-1-[29-[[2-(acetylamino)-2-deoxy-beta-D-galactopyra nosyl]oxy]-14,14-bis[[3-[[3-[[5-[[2-(acetylamino)-2-deoxy-b eta-D-galactopyranosyl]oxy]-1-oxopentyl]amino]propyl]amino] -3-oxopropoxy]methyl]-1,12,19,25-tetraoxo-16-oxa-13,20,24-t riazanonacos-1-yl]-4-hydroxy-2-pyrrolidinyl)methyl ester
aaacatggtgtggatgggata

SEQ ID NO: 59 - RNA, 21 nt, synthetic construct
  source 1..21: mol_type = other RNA
  modified_base 1: mod_base = OTHER; note = 2'-deoxy-2'-fluorocytidine-3'-phosphorothioate
  modified_base 2: mod_base = OTHER; note = 2'-O-methyluridine-3'-phosphorothioate
  modified_base 3: mod_base = OTHER; note = 2'-deoxy-2'-fluorocytidine-3'-phosphate
  modified_base 4: mod_base = OTHER; note = 2'-O-methyladenosine-3'-phosphate
  modified_base 5: mod_base = OTHER; note = 2'-deoxy-2'-fluoroguanosine-3'-phosphate
  modified_base 6: mod_base = OTHER; note = 2'-O-methylguanosine-3'-phosphate
  modified_base 7: mod_base = OTHER; note = 2'-deoxy-2'-fluoroadenosine-3'-phosphate
  modified_base 8: mod_base = OTHER; note = 2'-O-methyluridine-3'-phosphate
  modified_base 9: mod_base = OTHER; note = 2'-deoxy-2'-fluoroguanosine-3'-phosphate
  modified_base 10: mod_base = OTHER; note = 2'-deoxy-2'-fluoroadenosine-3'-phosphate
  modified_base 11: mod_base = OTHER; note = 2'-deoxy-2'-fluoroadenosine-3'-phosphate
  modified_base 12: mod_base = OTHER; note = 2'-O-methyladenosine-3'-phosphate
  modified_base 13: mod_base = OTHER; note = 2'-deoxy-2'-fluoroadenosine-3'-phosphate
  modified_base 14: mod_base = OTHER; note = 2'-O-methyladenosine-3'-phosphate
  modified_base 15: mod_base = OTHER; note = 2'-deoxy-2'-fluorouridine-3'-phosphate
  modified_base 16: mod_base = OTHER; note = 2'-O-methyluridine-3'-phosphate
  modified_base 17: mod_base = OTHER; note = 2'-deoxy-2'-fluorouridine-3'-phosphate
  modified_base 18: mod_base = OTHER; note = 2'-O-methyluridine-3'-phosphate
  modified_base 19: mod_base = OTHER; note = 2'-deoxy-2'-fluoroguanosine-3'-phosphate
  modified_base 20: mod_base = OTHER; note = 2'-O-methyladenosine-3'-phosphate
  modified_base 21: mod_base = OTHER; note = 2'-deoxy-2'-fluoroadenosine-3'-phosphate ((2S,4R)-1-[29-[[2-(acetylamino)-2-deoxy-beta-D-galactopyra nosyl]oxy]-14,14-bis[[3-[[3-[[5-[[2-(acetylamino)-2-deoxy-b eta-D-galactopyranosyl]oxy]-1-oxopentyl]amino]propyl]amino] -3-oxopropoxy]methyl]-1,12,19,25-tetraoxo-16-oxa-13,20,24-t riazanonacos-1-yl]-4-hydroxy-2-pyrrolidinyl)methyl ester
ctcaggatgaaaaattttgaa

SEQ ID NO: 60 - RNA, 21 nt, synthetic construct
  source 1..21: mol_type = other RNA
  modified_base 1: mod_base = OTHER; note = 2'-deoxy-2'-fluorocytidine-3'-phosphorothioate
  modified_base 2: mod_base = OTHER; note = 2'-O-methyladenosine-3'-phosphorothioate
  modified_base 3: mod_base = OTHER; note = 2'-deoxy-2'-fluoroguanosine-3'-phosphate
  modified_base 4: mod_base = OTHER; note = 2'-O-methylcytidine-3'-phosphate
  modified_base 5: mod_base = OTHER; note = 2'-deoxy-2'-fluoroadenosine-3'-phosphate
  modified_base 6: mod_base = OTHER; note = 2'-O-methyluridine-3'-phosphate
  modified_base 7: mod_base = OTHER; note = 2'-deoxy-2'-fluoroguanosine-3'-phosphate
  modified_base 8: mod_base = OTHER; note = 2'-O-methyluridine-3'-phosphate
  modified_base 9: mod_base = OTHER; note = 2'-deoxy-2'-fluoroadenosine-3'-phosphate
  modified_base 10: mod_base = OTHER; note = 2'-deoxy-2'-fluorouridine-3'-phosphate
  modified_base 11: mod_base = OTHER; note = 2'-deoxy-2'-fluorouridine-3'-phosphate
  modified_base 12: mod_base = OTHER; note = 2'-O-methyladenosine-3'-phosphate
  modified_base 13: mod_base = OTHER; note = 2'-deoxy-2'-fluorocytidine-3'-phosphate
  modified_base 14: mod_base = OTHER; note = 2'-O-methyluridine-3'-phosphate
  modified_base 15: mod_base = OTHER; note = 2'-deoxy-2'-fluorouridine-3'-phosphate
  modified_base 16: mod_base = OTHER; note = 2'-O-methylguanosine-3'-phosphate
  modified_base 17: mod_base = OTHER; note = 2'-deoxy-2'-fluoroadenosine-3'-phosphate
  modified_base 18: mod_base = OTHER; note = 2'-O-methylcytidine-3'-phosphate
  modified_base 19: mod_base = OTHER; note = 2'-deoxy-2'-fluoroadenosine-3'-phosphate
  modified_base 20: mod_base = OTHER; note = 2'-O-methyladenosine-3'-phosphate
  modified_base 21: mod_base = OTHER; note = 2'-deoxy-2'-fluoroadenosine-3'-phosphate ((2S,4R)-1-[29-[[2-(acetylamino)-2-deoxy-beta-D-galactopyra nosyl]oxy]-14,14-bis[[3-[[3-[[5-[[2-(acetylamino)-2-deoxy-b eta-D-galactopyranosyl]oxy]-1-oxopentyl]amino]propyl]amino] -3-oxopropoxy]methyl]-1,12,19,25-tetraoxo-16-oxa-13,20,24-t riazanonacos-1-yl]-4-hydroxy-2-pyrrolidinyl)methyl ester
cagcatgtattacttgacaaa

SEQ ID NO: 61 - RNA, 21 nt, synthetic construct
  source 1..21: mol_type = other RNA
  modified_base 1: mod_base = OTHER; note = 2'-deoxy-2'-fluorouridine-3'-phosphorothioate
  modified_base 2: mod_base = OTHER; note = 2'-O-methyladenosine-3'-phosphorothioate
  modified_base 3: mod_base = OTHER; note = 2'-deoxy-2'-fluorouridine-3'-phosphate
  modified_base 4: mod_base = OTHER; note = 2'-O-methylguanosine-3'-phosphate
  modified_base 5: mod_base = OTHER; note = 2'-deoxy-2'-fluoroadenosine-3'-phosphate
  modified_base 6: mod_base = OTHER; note = 2'-O-methyladenosine-3'-phosphate
  modified_base 7: mod_base = OTHER; note = 2'-deoxy-2'-fluorocytidine-3'-phosphate
  modified_base 8: mod_base = OTHER; note = 2'-O-methyladenosine-3'-phosphate
  modified_base 9: mod_base = OTHER; note = 2'-deoxy-2'-fluoroadenosine-3'-phosphate
  modified_base 10: mod_base = OTHER; note = 2'-deoxy-2'-fluorocytidine-3'-phosphate
  modified_base 11: mod_base = OTHER; note = 2'-deoxy-2'-fluoroadenosine-3'-phosphate
  modified_base 12: mod_base = OTHER; note = 2'-O-methyluridine-3'-phosphate
  modified_base 13: mod_base = OTHER; note = 2'-deoxy-2'-fluoroguanosine-3'-phosphate
  modified_base 14: mod_base = OTHER; note = 2'-O-methylcytidine-3'-phosphate
  modified_base 15: mod_base = OTHER; note = 2'-deoxy-2'-fluorouridine-3'-phosphate
  modified_base 16: mod_base = OTHER; note = 2'-O-methyladenosine-3'-phosphate
  modified_base 17: mod_base = OTHER; note = 2'-deoxy-2'-fluoroadenosine-3'-phosphate
  modified_base 18: mod_base = OTHER; note = 2'-O-methyladenosine-3'-phosphate
  modified_base 19: mod_base = OTHER; note = 2'-deoxy-2'-fluorouridine-3'-phosphate
  modified_base 20: mod_base = OTHER; note = 2'-O-methylcytidine-3'-phosphate
  modified_base 21: mod_base = OTHER; note = 2'-deoxy-2'-fluoroadenosine-3'-phosphate ((2S,4R)-1-[29-[[2-(acetylamino)-2-deoxy-beta-D-galactopyra nosyl]oxy]-14,14-bis[[3-[[3-[[5-[[2-(acetylamino)-2-deoxy-b eta-D-galactopyranosyl]oxy]-1-oxopentyl]amino]propyl]amino] -3-oxopropoxy]methyl]-1,12,19,25-tetraoxo-16-oxa-13,20,24-t riazanonacos-1-yl]-4-hydroxy-2-pyrrolidinyl)methyl ester
tatgaacaacatgctaaatca

SEQ ID NO: 62 - RNA, 21 nt, synthetic construct
  source 1..21: mol_type = other RNA
  modified_base 1: mod_base = OTHER; note = 2'-deoxy-2'-fluoroadenosine-3'-phosphorothioate
  modified_base 2: mod_base = OTHER; note = 2'-O-methyluridine-3'-phosphorothioate
  modified_base 3: mod_base = OTHER; note = 2'-deoxy-2'-fluoroadenosine-3'-phosphate
  modified_base 4: mod_base = OTHER; note = 2'-O-methyluridine-3'-phosphate
  modified_base 5: mod_base = OTHER; note = 2'-deoxy-2'-fluoroadenosine-3'-phosphate
  modified_base 6: mod_base = OTHER; note = 2'-O-methyluridine-3'-phosphate
  modified_base 7: mod_base = OTHER; note = 2'-deoxy-2'-fluorocytidine-3'-phosphate
  modified_base 8: mod_base = OTHER; note = 2'-O-methylcytidine-3'-phosphate
  modified_base 9: mod_base = OTHER; note = 2'-deoxy-2'-fluoroadenosine-3'-phosphate
  modified_base 10: mod_base = OTHER; note = 2'-deoxy-2'-fluoroadenosine-3'-phosphate
  modified_base 11: mod_base = OTHER; note = 2'-deoxy-2'-fluoroadenosine-3'-phosphate
  modified_base 12: mod_base = OTHER; note = 2'-O-methyluridine-3'-phosphate
  modified_base 13: mod_base = OTHER; note = 2'-deoxy-2'-fluoroguanosine-3'-phosphate
  modified_base 14: mod_base = OTHER; note = 2'-O-methyluridine-3'-phosphate
  modified_base 15: mod_base = OTHER; note = 2'-deoxy-2'-fluorouridine-3'-phosphate
  modified_base 16: mod_base = OTHER; note = 2'-O-methyluridine-3'-phosphate
  modified_base 17: mod_base = OTHER; note = 2'-deoxy-2'-fluorouridine-3'-phosphate
  modified_base 18: mod_base = OTHER; note = 2'-O-methyladenosine-3'-phosphate
  modified_base 19: mod_base = OTHER; note = 2'-deoxy-2'-fluoroguanosine-3'-phosphate
  modified_base 20: mod_base = OTHER; note = 2'-O-methylguanosine-3'-phosphate
  modified_base 21: mod_base = OTHER; note = 2'-deoxy-2'-fluoroadenosine-3'-phosphate ((2S,4R)-1-[29-[[2-(acetylamino)-2-deoxy-beta-D-galactopyra nosyl]oxy]-14,14-bis[[3-[[3-[[5-[[2-(acetylamino)-2-deoxy-b eta-D-galactopyranosyl]oxy]-1-oxopentyl]amino]propyl]amino] -3-oxopropoxy]methyl]-1,12,19,25-tetraoxo-16-oxa-13,20,24-t riazanonacos-1-yl]-4-hydroxy-2-pyrrolidinyl)methyl ester
atatatccaaatgttttagga

SEQ ID NO: 63 - RNA, 21 nt, synthetic construct
  source 1..21: mol_type = other RNA
  modified_base 1: mod_base = OTHER; note = 2'-deoxy-2'-fluorocytidine-3'-phosphorothioate
  modified_base 2: mod_base = OTHER; note = 2'-O-methylcytidine-3'-phosphorothioate
  modified_base 3: mod_base = OTHER; note = 2'-deoxy-2'-fluoroadenosine-3'-phosphate
  modified_base 4: mod_base = OTHER; note = 2'-O-methylguanosine-3'-phosphate
  modified_base 5: mod_base = OTHER; note = 2'-deoxy-2'-fluoroadenosine-3'-phosphate
  modified_base 6: mod_base = OTHER; note = 2'-O-methyluridine-3'-phosphate
  modified_base 7: mod_base = OTHER; note = 2'-deoxy-2'-fluoroguanosine-3'-phosphate
  modified_base 8: mod_base = OTHER; note = 2'-O-methylguanosine-3'-phosphate
  modified_base 9: mod_base = OTHER; note = 2'-deoxy-2'-fluoroadenosine-3'-phosphate
  modified_base 10: mod_base = OTHER; note = 2'-deoxy-2'-fluoroadenosine-3'-phosphate
  modified_base 11: mod_base = OTHER; note = 2'-deoxy-2'-fluoroguanosine-3'-phosphate
  modified_base 12: mod_base = OTHER; note = 2'-O-methylcytidine-3'-phosphate
  modified_base 13: mod_base = OTHER; note = 2'-deoxy-2'-fluorouridine-3'-phosphate
  modified_base 14: mod_base = OTHER; note = 2'-O-methylguanosine-3'-phosphate
  modified_base 15: mod_base = OTHER; note = 2'-deoxy-2'-fluorouridine-3'-phosphate
  modified_base 16: mod_base = OTHER; note = 2'-O-methyladenosine-3'-phosphate
  modified_base 17: mod_base = OTHER; note = 2'-deoxy-2'-fluorouridine-3'-phosphate
  modified_base 18: mod_base = OTHER; note = 2'-O-methylcytidine-3'-phosphate
  modified_base 19: mod_base = OTHER; note = 2'-deoxy-2'-fluorocytidine-3'-phosphate
  modified_base 20: mod_base = OTHER; note = 2'-O-methyladenosine-3'-phosphate
  modified_base 21: mod_base = OTHER; note = 2'-deoxy-2'-fluoroadenosine-3'-phosphate ((2S,4R)-1-[29-[[2-(acetylamino)-2-deoxy-beta-D-galactopyra nosyl]oxy]-14,14-bis[[3-[[3-[[5-[[2-(acetylamino)-2-deoxy-b eta-D-galactopyranosyl]oxy]-1-oxopentyl]amino]propyl]amino] -3-oxopropoxy]methyl]-1,12,19,25-tetraoxo-16-oxa-13,20,24-t riazanonacos-1-yl]-4-hydroxy-2-pyrrolidinyl)methyl ester
ccagatggaagctgtatccaa

SEQ ID NO: 64 - RNA, 21 nt, synthetic construct
  source 1..21: mol_type = other RNA
  modified_base 1: mod_base = OTHER; note = 2'-deoxy-2'-fluoroguanosine-3'-phosphorothioate
  modified_base 2: mod_base = OTHER; note = 2'-O-methyladenosine-3'-phosphorothioate
  modified_base 3: mod_base = OTHER; note = 2'-deoxy-2'-fluorocytidine-3'-phosphate
  modified_base 4: mod_base = OTHER; note = 2'-O-methyluridine-3'-phosphate
  modified_base 5: mod_base = OTHER; note = 2'-deoxy-2'-fluorouridine-3'-phosphate
  modified_base 6: mod_base = OTHER; note = 2'-O-methyluridine-3'-phosphate
  modified_base 7: mod_base = OTHER; note = 2'-deoxy-2'-fluorocytidine-3'-phosphate
  modified_base 8: mod_base = OTHER; note = 2'-O-methyladenosine-3'-phosphate
  modified_base 9: mod_base = OTHER; note = 2'-deoxy-2'-fluorouridine-3'-phosphate
  modified_base 10: mod_base = OTHER; note = 2'-deoxy-2'-fluorocytidine-3'-phosphate
  modified_base 11: mod_base = OTHER; note = 2'-deoxy-2'-fluorocytidine-3'-phosphate
  modified_base 12: mod_base = OTHER; note = 2'-O-methyluridine-3'-phosphate
  modified_base 13: mod_base = OTHER; note = 2'-deoxy-2'-fluoroguanosine-3'-phosphate
  modified_base 14: mod_base = OTHER; note = 2'-O-methylguanosine-3'-phosphate
  modified_base 15: mod_base = OTHER; note = 2'-deoxy-2'-fluoroadenosine-3'-phosphate
  modified_base 16: mod_base = OTHER; note = 2'-O-methyladenosine-3'-phosphate
  modified_base 17: mod_base = OTHER; note = 2'-deoxy-2'-fluoroadenosine-3'-phosphate
  modified_base 18: mod_base = OTHER; note = 2'-O-methyluridine-3'-phosphate
  modified_base 19: mod_base = OTHER; note = 2'-deoxy-2'-fluoroadenosine-3'-phosphate
  modified_base 20: mod_base = OTHER; note = 2'-O-methyluridine-3'-phosphate
  modified_base 21: mod_base = OTHER; note = 2'-deoxy-2'-fluoroadenosine-3'-phosphate ((2S,4R)-1-[29-[[2-(acetylamino)-2-deoxy-beta-D-galactopyra nosyl]oxy]-14,14-bis[[3-[[3-[[5-[[2-(acetylamino)-2-deoxy-b eta-D-galactopyranosyl]oxy]-1-oxopentyl]amino]propyl]amino] -3-oxopropoxy]methyl]-1,12,19,25-tetraoxo-16-oxa-13,20,24-t riazanonacos-1-yl]-4-hydroxy-2-pyrrolidinyl)methyl ester
gactttcatcctggaaatata

SEQ ID NO: 65 - RNA, 21 nt, synthetic construct
  source 1..21: mol_type = other RNA
  modified_base 1: mod_base = OTHER; note = 2'-deoxy-2'-fluorocytidine-3'-phosphorothioate
  modified_base 2: mod_base = OTHER; note = 2'-O-methylcytidine-3'-phosphorothioate
  modified_base 3: mod_base = OTHER; note = 2'-deoxy-2'-fluorocytidine-3'-phosphate
  modified_base 4: mod_base = OTHER; note = 2'-O-methylcytidine-3'-phosphate
  modified_base 5: mod_base = OTHER; note = 2'-deoxy-2'-fluoroguanosine-3'-phosphate
  modified_base 6: mod_base = OTHER; note = 2'-O-methylguanosine-3'-phosphate
  modified_base 7: mod_base = OTHER; note = 2'-deoxy-2'-fluorocytidine-3'-phosphate
  modified_base 8: mod_base = OTHER; note = 2'-O-methyluridine-3'-phosphate
  modified_base 9: mod_base = OTHER; note = 2'-deoxy-2'-fluoroadenosine-3'-phosphate
  modified_base 10: mod_base = OTHER; note = 2'-deoxy-2'-fluoroadenosine-3'-phosphate
  modified_base 11: mod_base = OTHER; note = 2'-deoxy-2'-fluorouridine-3'-phosphate
  modified_base 12: mod_base = OTHER; note = 2'-O-methyluridine-3'-phosphate
  modified_base 13: mod_base = OTHER; note = 2'-deoxy-2'-fluorouridine-3'-phosphate
  modified_base 14: mod_base = OTHER; note = 2'-O-methylguanosine-3'-phosphate
  modified_base 15: mod_base = OTHER; note = 2'-deoxy-2'-fluorouridine-3'-phosphate
  modified_base 16: mod_base = OTHER; note = 2'-O-methyladenosine-3'-phosphate
  modified_base 17: mod_base = OTHER; note = 2'-deoxy-2'-fluorouridine-3'-phosphate
  modified_base 18: mod_base = OTHER; note = 2'-O-methylcytidine-3'-phosphate
  modified_base 19: mod_base = OTHER; note = 2'-deoxy-2'-fluoroadenosine-3'-phosphate
  modified_base 20: mod_base = OTHER; note = 2'-O-methyladenosine-3'-phosphate
  modified_base 21: mod_base = OTHER; note = 2'-deoxy-2'-fluorouridine-3'-phosphate ((2S,4R)-1-[29-[[2-(acetylamino)-2-deoxy-beta-D-galactopyra nosyl]oxy]-14,14-bis[[3-[[3-[[5-[[2-(acetylamino)-2-deoxy-b eta-D-galactopyranosyl]oxy]-1-oxopentyl]amino]propyl]amino] -3-oxopropoxy]methyl]-1,12,19,25-tetraoxo-16-oxa-13,20,24-t riazanonacos-1-yl]-4-hydroxy-2-pyrrolidinyl)methyl ester
ccccggctaatttgtatcaat

SEQ ID NO: 66 - RNA, 21 nt, synthetic construct
  source 1..21: mol_type = other RNA
  modified_base 1: mod_base = OTHER; note = 2'-deoxy-2'-fluorouridine-3'-phosphorothioate
  modified_base 2: mod_base = OTHER; note = 2'-O-methyluridine-3'-phosphorothioate
  modified_base 3: mod_base = OTHER; note = 2'-deoxy-2'-fluoroadenosine-3'-phosphate
  modified_base 4: mod_base = OTHER; note = 2'-O-methyladenosine-3'-phosphate
  modified_base 5: mod_base = OTHER; note = 2'-deoxy-2'-fluoroadenosine-3'-phosphate
  modified_base 6: mod_base = OTHER; note = 2'-O-methylcytidine-3'-phosphate
  modified_base 7: mod_base = OTHER; note = 2'-deoxy-2'-fluoroadenosine-3'-phosphate
  modified_base 8: mod_base = OTHER; note = 2'-O-methyluridine-3'-phosphate
  modified_base 9: mod_base = OTHER; note = 2'-deoxy-2'-fluoroguanosine-3'-phosphate
  modified_base 10: mod_base = OTHER; note = 2'-deoxy-2'-fluoroguanosine-3'-phosphate
  modified_base 11: mod_base = OTHER; note = 2'-deoxy-2'-fluorocytidine-3'-phosphate
  modified_base 12: mod_base = OTHER; note = 2'-O-methyluridine-3'-phosphate
  modified_base 13: mod_base = OTHER; note = 2'-deoxy-2'-fluorouridine-3'-phosphate
  modified_base 14: mod_base = OTHER; note = 2'-O-methylguanosine-3'-phosphate
  modified_base 15: mod_base = OTHER; note = 2'-deoxy-2'-fluoroadenosine-3'-phosphate
  modified_base 16: mod_base = OTHER; note = 2'-O-methyladenosine-3'-phosphate
  modified_base 17: mod_base = OTHER; note = 2'-deoxy-2'-fluorouridine-3'-phosphate
  modified_base 18: mod_base = OTHER; note = 2'-O-methylguanosine-3'-phosphate
  modified_base 19: mod_base = OTHER; note = 2'-deoxy-2'-fluoroguanosine-3'-phosphate
  modified_base 20: mod_base = OTHER; note = 2'-O-methylguanosine-3'-phosphate
  modified_base 21: mod_base = OTHER; note = 2'-deoxy-2'-fluoroadenosine-3'-phosphate ((2S,4R)-1-[29-[[2-(acetylamino)-2-deoxy-beta-D-galactopyra nosyl]oxy]-14,14-bis[[3-[[3-[[5-[[2-(acetylamino)-2-deoxy-b eta-D-galactopyranosyl]oxy]-1-oxopentyl]amino]propyl]amino] -3-oxopropoxy]methyl]-1,12,19,25-tetraoxo-16-oxa-13,20,24-t riazanonacos-1-yl]-4-hydroxy-2-pyrrolidinyl)methyl ester
ttaaacatggcttgaatggga

SEQ ID NO: 67 - RNA, 21 nt, synthetic construct
  source 1..21: mol_type = other RNA
  modified_base 1: mod_base = OTHER; note = 2'-deoxy-2'-fluoroadenosine-3'-phosphorothioate
  modified_base 2: mod_base = OTHER; note = 2'-O-methyladenosine-3'-phosphorothioate
  modified_base 3: mod_base = OTHER; note = 2'-deoxy-2'-fluorouridine-3'-phosphate
  modified_base 4: mod_base = OTHER; note = 2'-O-methylguanosine-3'-phosphate
  modified_base 5: mod_base = OTHER; note = 2'-deoxy-2'-fluorouridine-3'-phosphate
  modified_base 6: mod_base = OTHER; note = 2'-O-methylguanosine-3'-phosphate
  modified_base 7: mod_base = OTHER; note = 2'-deoxy-2'-fluorouridine-3'-phosphate
  modified_base 8: mod_base = OTHER; note = 2'-O-methyluridine-3'-phosphate
  modified_base 9: mod_base = OTHER; note = 2'-deoxy-2'-fluorouridine-3'-phosphate
  modified_base 10: mod_base = OTHER; note = 2'-deoxy-2'-fluoroadenosine-3'-phosphate
  modified_base 11: mod_base = OTHER; note = 2'-deoxy-2'-fluoroguanosine-3'-phosphate
  modified_base 12: mod_base = OTHER; note = 2'-O-methyladenosine-3'-phosphate
  modified_base 13: mod_base = OTHER; note = 2'-deoxy-2'-fluorocytidine-3'-phosphate
  modified_base 14: mod_base = OTHER; note = 2'-O-methyladenosine-3'-phosphate
  modified_base 15: mod_base = OTHER; note = 2'-deoxy-2'-fluoroadenosine-3'-phosphate
  modified_base 16: mod_base = OTHER; note = 2'-O-methylcytidine-3'-phosphate
  modified_base 17: mod_base = OTHER; note = 2'-deoxy-2'-fluoroguanosine-3'-phosphate
  modified_base 18: mod_base = OTHER; note = 2'-O-methyluridine-3'-phosphate
  modified_base 19: mod_base = OTHER; note = 2'-deoxy-2'-fluorocytidine-3'-phosphate
  modified_base 20: mod_base = OTHER; note = 2'-O-methyladenosine-3'-phosphate
  modified_base 21: mod_base = OTHER; note = 2'-deoxy-2'-fluorouridine-3'-phosphate ((2S,4R)-1-[29-[[2-(acetylamino)-2-deoxy-beta-D-galactopyra nosyl]oxy]-14,14-bis[[3-[[3-[[5-[[2-(acetylamino)-2-deoxy-b eta-D-galactopyranosyl]oxy]-1-oxopentyl]amino]propyl]amino] -3-oxopropoxy]methyl]-1,12,19,25-tetraoxo-16-oxa-13,20,24-t riazanonacos-1-yl]-4-hydroxy-2-pyrrolidinyl)methyl ester
aatgtgtttagacaacgtcat

SEQ ID NO: 68 - RNA, 21 nt, synthetic construct
  source 1..21: mol_type = other RNA
  modified_base 1: mod_base = OTHER; note = 2'-deoxy-2'-fluoroadenosine-3'-phosphorothioate
  modified_base 2: mod_base = OTHER; note = 2'-O-methylcytidine-3'-phosphorothioate
  modified_base 3: mod_base = OTHER; note = 2'-deoxy-2'-fluorouridine-3'-phosphate
  modified_base 4: mod_base = OTHER; note = 2'-O-methyladenosine-3'-phosphate
  modified_base 5: mod_base = OTHER; note = 2'-deoxy-2'-fluoroadenosine-3'-phosphate
  modified_base 6: mod_base = OTHER; note = 2'-O-methyladenosine-3'-phosphate
  modified_base 7: mod_base = OTHER; note = 2'-deoxy-2'-fluoroguanosine-3'-phosphate
  modified_base 8: mod_base = OTHER; note = 2'-O-methylguanosine-3'-phosphate
  modified_base 9: mod_base = OTHER; note = 2'-deoxy-2'-fluoroadenosine-3'-phosphate
  modified_base 10: mod_base = OTHER; note = 2'-deoxy-2'-fluoroadenosine-3'-phosphate
  modified_base 11: mod_base = OTHER; note = 2'-deoxy-2'-fluoroguanosine-3'-phosphate
  modified_base 12: mod_base = OTHER; note = 2'-O-methyladenosine-3'-phosphate
  modified_base 13: mod_base = OTHER; note = 2'-deoxy-2'-fluoroadenosine-3'-phosphate
  modified_base 14: mod_base = OTHER; note = 2'-O-methyluridine-3'-phosphate
  modified_base 15: mod_base = OTHER; note = 2'-deoxy-2'-fluorouridine-3'-phosphate
  modified_base 16: mod_base = OTHER; note = 2'-O-methylcytidine-3'-phosphate
  modified_base 17: mod_base = OTHER; note = 2'-deoxy-2'-fluorocytidine-3'-phosphate
  modified_base 18: mod_base = OTHER; note = 2'-O-methylguanosine-3'-phosphate
  modified_base 19: mod_base = OTHER; note = 2'-deoxy-2'-fluoroguanosine-3'-phosphate
  modified_base 20: mod_base = OTHER; note = 2'-O-methyluridine-3'-phosphate
  modified_base 21: mod_base = OTHER; note = 2'-deoxy-2'-fluorouridine-3'-phosphate ((2S,4R)-1-[29-[[2-(acetylamino)-2-deoxy-beta-D-galactopyra nosyl]oxy]-14,14-bis[[3-[[3-[[5-[[2-(acetylamino)-2-deoxy-b eta-D-galactopyranosyl]oxy]-1-oxopentyl]amino]propyl]amino] -3-oxopropoxy]methyl]-1,12,19,25-tetraoxo-16-oxa-13,20,24-t riazanonacos-1-yl]-4-hydroxy-2-pyrrolidinyl)methyl ester
actaaaggaagaattccggtt

SEQ ID NO: 69 - RNA, 21 nt, synthetic construct
  source 1..21: mol_type = other RNA
  modified_base 1: mod_base = OTHER; note = 2'-deoxy-2'-fluorouridine-3'-phosphorothioate
  modified_base 2: mod_base = OTHER; note = 2'-O-methyladenosine-3'-phosphorothioate
  modified_base 3: mod_base = OTHER; note = 2'-deoxy-2'-fluorouridine-3'-phosphate
  modified_base 4: mod_base = OTHER; note = 2'-O-methyladenosine-3'-phosphate
  modified_base 5: mod_base = OTHER; note = 2'-deoxy-2'-fluorouridine-3'-phosphate
  modified_base 6: mod_base = OTHER; note = 2'-O-methylcytidine-3'-phosphate
  modified_base 7: mod_base = OTHER; note = 2'-deoxy-2'-fluorocytidine-3'-phosphate
  modified_base 8: mod_base = OTHER; note = 2'-O-methyladenosine-3'-phosphate
  modified_base 9: mod_base = OTHER; note = 2'-deoxy-2'-fluoroadenosine-3'-phosphate
  modified_base 10: mod_base = OTHER; note = 2'-deoxy-2'-fluoroadenosine-3'-phosphate
  modified_base 11: mod_base = OTHER; note = 2'-deoxy-2'-fluorouridine-3'-phosphate
  modified_base 12: mod_base = OTHER; note = 2'-O-methylguanosine-3'-phosphate
  modified_base 13: mod_base = OTHER; note = 2'-deoxy-2'-fluorouridine-3'-phosphate
  modified_base 14: mod_base = OTHER; note = 2'-O-methyluridine-3'-phosphate
  modified_base 15: mod_base = OTHER; note = 2'-deoxy-2'-fluorouridine-3'-phosphate
  modified_base 16: mod_base = OTHER; note = 2'-O-methyluridine-3'-phosphate
  modified_base 17: mod_base = OTHER; note = 2'-deoxy-2'-fluoroadenosine-3'-phosphate
  modified_base 18: mod_base = OTHER; note = 2'-O-methylguanosine-3'-phosphate
  modified_base 19: mod_base = OTHER; note = 2'-deoxy-2'-fluoroguanosine-3'-phosphate
  modified_base 20: mod_base = OTHER; note = 2'-O-methyladenosine-3'-phosphate
  modified_base 21: mod_base = OTHER; note = 2'-deoxy-2'-fluorouridine-3'-phosphate ((2S,4R)-1-[29-[[2-(acetylamino)-2-deoxy-beta-D-galactopyra nosyl]oxy]-14,14-bis[[3-[[3-[[5-[[2-(acetylamino)-2-deoxy-b eta-D-galactopyranosyl]oxy]-1-oxopentyl]amino]propyl]amino] -3-oxopropoxy]methyl]-1,12,19,25-tetraoxo-16-oxa-13,20,24-t riazanonacos-1-yl]-4-hydroxy-2-pyrrolidinyl)methyl ester
tatatccaaatgttttaggat

SEQ ID NO: 70 - RNA, 21 nt, synthetic construct
  source 1..21: mol_type = other RNA
  modified_base 1: mod_base = OTHER; note = 2'-deoxy-2'-fluoroguanosine-3'-phosphorothioate
  modified_base 2: mod_base = OTHER; note = 2'-O-methyluridine-3'-phosphorothioate
  modified_base 3: mod_base = OTHER; note = 2'-deoxy-2'-fluoroguanosine-3'-phosphate
  modified_base 4: mod_base = OTHER; note = 2'-O-methylcytidine-3'-phosphate
  modified_base 5: mod_base = OTHER; note = 2'-deoxy-2'-fluoroguanosine-3'-phosphate
  modified_base 6: mod_base = OTHER; note = 2'-O-methylguanosine-3'-phosphate
  modified_base 7: mod_base = OTHER; note = 2'-deoxy-2'-fluoroadenosine-3'-phosphate
  modified_base 8: mod_base = OTHER; note = 2'-O-methyladenosine-3'-phosphate
  modified_base 9: mod_base = OTHER; note = 2'-deoxy-2'-fluoroadenosine-3'-phosphate
  modified_base 10: mod_base = OTHER; note = 2'-deoxy-2'-fluoroguanosine-3'-phosphate
  modified_base 11: mod_base = OTHER; note = 2'-deoxy-2'-fluoroguanosine-3'-phosphate
  modified_base 12: mod_base = OTHER; note = 2'-O-methylcytidine-3'-phosphate
  modified_base 13: mod_base = OTHER; note = 2'-deoxy-2'-fluoroadenosine-3'-phosphate
  modified_base 14: mod_base = OTHER; note = 2'-O-methylcytidine-3'-phosphate
  modified_base 15: mod_base = OTHER; note = 2'-deoxy-2'-fluorouridine-3'-phosphate
  modified_base 16: mod_base = OTHER; note = 2'-O-methylguanosine-3'-phosphate
  modified_base 17: mod_base = OTHER; note = 2'-deoxy-2'-fluoroadenosine-3'-phosphate
  modified_base 18: mod_base = OTHER; note = 2'-O-methyluridine-3'-phosphate
  modified_base 19: mod_base = OTHER; note = 2'-deoxy-2'-fluoroguanosine-3'-phosphate
  modified_base 20: mod_base = OTHER; note = 2'-O-methyluridine-3'-phosphate
  modified_base 21: mod_base = OTHER; note = 2'-deoxy-2'-fluorouridine-3'-phosphate ((2S,4R)-1-[29-[[2-(acetylamino)-2-deoxy-beta-D-galactopyra nosyl]oxy]-14,14-bis[[3-[[3-[[5-[[2-(acetylamino)-2-deoxy-b eta-D-galactopyranosyl]oxy]-1-oxopentyl]amino]propyl]amino] -3-oxopropoxy]methyl]-1,12,19,25-tetraoxo-16-oxa-13,20,24-t riazanonacos-1-yl]-4-hydroxy-2-pyrrolidinyl)methyl ester
gtgcggaaaggcactgatgtt

SEQ ID NO: 71 - RNA, 21 nt, synthetic construct
  source 1..21: mol_type = other RNA
  modified_base 1: mod_base = OTHER; note = 2'-deoxy-2'-fluorouridine-3'-phosphorothioate
  modified_base 2: mod_base = OTHER; note = 2'-O-methyladenosine-3'-phosphorothioate
  modified_base 3: mod_base = OTHER; note = 2'-deoxy-2'-fluoroadenosine-3'-phosphate
  modified_base 4: mod_base = OTHER; note = 2'-O-methyladenosine-3'-phosphate
  modified_base 5: mod_base = OTHER; note = 2'-deoxy-2'-fluoroadenosine-3'-phosphate
  modified_base 6: mod_base = OTHER; note = 2'-O-methylcytidine-3'-phosphate
  modified_base 7: mod_base = OTHER; note = 2'-deoxy-2'-fluoroadenosine-3'-phosphate
  modified_base 8: mod_base = OTHER; note = 2'-O-methylguanosine-3'-phosphate
  modified_base 9: mod_base = OTHER; note = 2'-deoxy-2'-fluorouridine-3'-phosphate
  modified_base 10: mod_base = OTHER; note = 2'-deoxy-2'-fluoroguanosine-3'-phosphate
  modified_base 11: mod_base = OTHER; note = 2'-deoxy-2'-fluoroguanosine-3'-phosphate
  modified_base 12: mod_base = OTHER; note = 2'-O-methyluridine-3'-phosphate
  modified_base 13: mod_base = OTHER; note = 2'-deoxy-2'-fluorouridine-3'-phosphate
  modified_base 14: mod_base = OTHER; note = 2'-O-methylcytidine-3'-phosphate
  modified_base 15: mod_base = OTHER; note = 2'-deoxy-2'-fluorouridine-3'-phosphate
  modified_base 16: mod_base = OTHER; note = 2'-O-methyluridine-3'-phosphate
  modified_base 17: mod_base = OTHER; note = 2'-deoxy-2'-fluoroadenosine-3'-phosphate
  modified_base 18: mod_base = OTHER; note = 2'-O-methyladenosine-3'-phosphate
  modified_base 19: mod_base = OTHER; note = 2'-deoxy-2'-fluoroadenosine-3'-phosphate
  modified_base 20: mod_base = OTHER; note = 2'-O-methyluridine-3'-phosphate
  modified_base 21: mod_base = OTHER; note = 2'-deoxy-2'-fluorouridine-3'-phosphate ((2S,4R)-1-[29-[[2-(acetylamino)-2-deoxy-beta-D-galactopyra nosyl]oxy]-14,14-bis[[3-[[3-[[5-[[2-(acetylamino)-2-deoxy-b eta-D-galactopyranosyl]oxy]-1-oxopentyl]amino]propyl]amino] -3-oxopropoxy]methyl]-1,12,19,25-tetraoxo-16-oxa-13,20,24-t riazanonacos-1-yl]-4-hydroxy-2-pyrrolidinyl)methyl ester
taaaacagtggttcttaaatt

SEQ ID NO: 72 - RNA, 21 nt, synthetic construct
  source 1..21: mol_type = other RNA
  modified_base 1: mod_base = OTHER; note = 2'-deoxy-2'-fluoroadenosine-3'-phosphorothioate
  modified_base 2: mod_base = OTHER; note = 2'-O-methyluridine-3'-phosphorothioate
  modified_base 3: mod_base = OTHER; note = 2'-deoxy-2'-fluoroguanosine-3'-phosphate
  modified_base 4: mod_base = OTHER; note = 2'-O-methyladenosine-3'-phosphate
  modified_base 5: mod_base = OTHER; note = 2'-deoxy-2'-fluoroadenosine-3'-phosphate
  modified_base 6: mod_base = OTHER; note = 2'-O-methyladenosine-3'-phosphate
  modified_base 7: mod_base = OTHER; note = 2'-deoxy-2'-fluoroadenosine-3'-phosphate
  modified_base 8: mod_base = OTHER; note = 2'-O-methyladenosine-3'-phosphate
  modified_base 9: mod_base = OTHER; note = 2'-deoxy-2'-fluorouridine-3'-phosphate
  modified_base 10: mod_base = OTHER; note = 2'-deoxy-2'-fluorouridine-3'-phosphate
  modified_base 11: mod_base = OTHER; note = 2'-deoxy-2'-fluorouridine-3'-phosphate
  modified_base 12: mod_base = OTHER; note = 2'-O-methyluridine-3'-phosphate
  modified_base 13: mod_base = OTHER; note = 2'-deoxy-2'-fluoroguanosine-3'-phosphate
  modified_base 14: mod_base = OTHER; note = 2'-O-methyladenosine-3'-phosphate
  modified_base 15: mod_base = OTHER; note = 2'-deoxy-2'-fluoroadenosine-3'-phosphate
  modified_base 16: mod_base = OTHER; note = 2'-O-methyladenosine-3'-phosphate
  modified_base 17: mod_base = OTHER; note = 2'-deoxy-2'-fluorocytidine-3'-phosphate
  modified_base 18: mod_base = OTHER; note = 2'-O-methylcytidine-3'-phosphate
  modified_base 19: mod_base = OTHER; note = 2'-deoxy-2'-fluoroadenosine-3'-phosphate
  modified_base 20: mod_base = OTHER; note = 2'-O-methylguanosine-3'-phosphate
  modified_base 21: mod_base = OTHER; note = 2'-deoxy-2'-fluorouridine-3'-phosphate ((2S,4R)-1-[29-[[2-(acetylamino)-2-deoxy-beta-D-galactopyra nosyl]oxy]-14,14-bis[[3-[[3-[[5-[[2-(acetylamino)-2-deoxy-b eta-D-galactopyranosyl]oxy]-1-oxopentyl]amino]propyl]amino] -3-oxopropoxy]methyl]-1,12,19,25-tetraoxo-16-oxa-13,20,24-t riazanonacos-1-yl]-4-hydroxy-2-pyrrolidinyl)methyl ester
atgaaaaattttgaaaccagt

SEQ ID NO: 73 - RNA, 21 nt, synthetic construct
  source 1..21: mol_type = other RNA
  modified_base 1: mod_base = OTHER; note = 2'-deoxy-2'-fluoroadenosine-3'-phosphorothioate
  modified_base 2: mod_base = OTHER; note = 2'-O-methyladenosine-3'-phosphorothioate
  modified_base 3: mod_base = OTHER; note = 2'-deoxy-2'-fluorocytidine-3'-phosphate
  modified_base 4: mod_base = OTHER; note = 2'-O-methyladenosine-3'-phosphate
  modified_base 5: mod_base = OTHER; note = 2'-deoxy-2'-fluoroadenosine-3'-phosphate
  modified_base 6: mod_base = OTHER; note = 2'-O-methyladenosine-3'-phosphate
  modified_base 7: mod_base = OTHER; note = 2'-deoxy-2'-fluoroadenosine-3'-phosphate
  modified_base 8: mod_base = OTHER; note = 2'-O-methyluridine-3'-phosphate
  modified_base 9: mod_base = OTHER; note = 2'-deoxy-2'-fluoroadenosine-3'-phosphate
  modified_base 10: mod_base = OTHER; note = 2'-deoxy-2'-fluoroguanosine-3'-phosphate
  modified_base 11: mod_base = OTHER; note = 2'-deoxy-2'-fluorocytidine-3'-phosphate
  modified_base 12: mod_base = OTHER; note = 2'-O-methyladenosine-3'-phosphate
  modified_base 13: mod_base = OTHER; note = 2'-deoxy-2'-fluoroadenosine-3'-phosphate
  modified_base 14: mod_base = OTHER; note = 2'-O-methyluridine-3'-phosphate
  modified_base 15: mod_base = OTHER; note = 2'-deoxy-2'-fluorocytidine-3'-phosphate
  modified_base 16: mod_base = OTHER; note = 2'-O-methylcytidine-3'-phosphate
  modified_base 17: mod_base = OTHER; note = 2'-deoxy-2'-fluorocytidine-3'-phosphate
  modified_base 18: mod_base = OTHER; note = 2'-O-methyluridine-3'-phosphate
  modified_base 19: mod_base = OTHER; note = 2'-deoxy-2'-fluorouridine-3'-phosphate
  modified_base 20: mod_base = OTHER; note = 2'-O-methyluridine-3'-phosphate
  modified_base 21: mod_base = OTHER; note = 2'-deoxy-2'-fluorouridine-3'-phosphate ((2S,4R)-1-[29-[[2-(acetylamino)-2-deoxy-beta-D-galactopyra nosyl]oxy]-14,14-bis[[3-[[3-[[5-[[2-(acetylamino)-2-deoxy-b eta-D-galactopyranosyl]oxy]-1-oxopentyl]amino]propyl]amino] -3-oxopropoxy]methyl]-1,12,19,25-tetraoxo-16-oxa-13,20,24-t riazanonacos-1-yl]-4-hydroxy-2-pyrrolidinyl)methyl ester
aacaaaatagcaatccctttt

SEQ ID NO: 74 - RNA, 21 nt, synthetic construct
  source 1..21: mol_type = other RNA
  modified_base 1: mod_base = OTHER; note = 2'-deoxy-2'-fluorocytidine-3'-phosphorothioate
  modified_base 2: mod_base = OTHER; note = 2'-O-methyluridine-3'-phosphorothioate
  modified_base 3: mod_base = OTHER; note = 2'-deoxy-2'-fluoroguanosine-3'-phosphate
  modified_base 4: mod_base = OTHER; note = 2'-O-methyladenosine-3'-phosphate
  modified_base 5: mod_base = OTHER; note = 2'-deoxy-2'-fluoroadenosine-3'-phosphate
  modified_base 6: mod_base = OTHER; note = 2'-O-methyladenosine-3'-phosphate
  modified_base 7: mod_base = OTHER; note = 2'-deoxy-2'-fluorocytidine-3'-phosphate
  modified_base 8: mod_base = OTHER; note = 2'-O-methyladenosine-3'-phosphate
  modified_base 9: mod_base = OTHER; note = 2'-deoxy-2'-fluoroguanosine-3'-phosphate
  modified_base 10: mod_base = OTHER; note = 2'-deoxy-2'-fluoroadenosine-3'-phosphate
  modified_base 11: mod_base = OTHER; note = 2'-deoxy-2'-fluorouridine-3'-phosphate
  modified_base 12: mod_base = OTHER; note = 2'-O-methylcytidine-3'-phosphate
  modified_base 13: mod_base = OTHER; note = 2'-deoxy-2'-fluorouridine-3'-phosphate
  modified_base 14: mod_base = OTHER; note = 2'-O-methylguanosine-3'-phosphate
  modified_base 15: mod_base = OTHER; note = 2'-deoxy-2'-fluorouridine-3'-phosphate
  modified_base 16: mod_base = OTHER; note = 2'-O-methylcytidine-3'-phosphate
  modified_base 17: mod_base = OTHER; note = 2'-deoxy-2'-fluoroguanosine-3'-phosphate
  modified_base 18: mod_base = OTHER; note = 2'-O-methyladenosine-3'-phosphate
  modified_base 19: mod_base = OTHER; note = 2'-deoxy-2'-fluorocytidine-3'-phosphate
  modified_base 20: mod_base = OTHER; note = 2'-O-methyluridine-3'-phosphate
  modified_base 21: mod_base = OTHER; note = 2'-deoxy-2'-fluorouridine-3'-phosphate ((2S,4R)-1-[29-[[2-(acetylamino)-2-deoxy-beta-D-galactopyra nosyl]oxy]-14,14-bis[[3-[[3-[[5-[[2-(acetylamino)-2-deoxy-b eta-D-galactopyranosyl]oxy]-1-oxopentyl]amino]propyl]amino] -3-oxopropoxy]methyl]-1,12,19,25-tetraoxo-16-oxa-13,20,24-t riazanonacos-1-yl]-4-hydroxy-2-pyrrolidinyl)methyl ester
ctgaaacagatctgtcgactt

SEQ ID NO: 75 - RNA, 21 nt, synthetic construct
  source 1..21: mol_type = other RNA
  modified_base 1: mod_base = OTHER; note = 2'-deoxy-2'-fluorouridine-3'-phosphorothioate
  modified_base 2: mod_base = OTHER; note = 2'-O-methyluridine-3'-phosphorothioate
  modified_base 3: mod_base = OTHER; note = 2'-deoxy-2'-fluoroguanosine-3'-phosphate
  modified_base 4: mod_base = OTHER; note = 2'-O-methyluridine-3'-phosphate
  modified_base 5: mod_base = OTHER; note = 2'-deoxy-2'-fluorouridine-3'-phosphate
  modified_base 6: mod_base = OTHER; note = 2'-O-methylguanosine-3'-phosphate
  modified_base 7: mod_base = OTHER; note = 2'-deoxy-2'-fluorocytidine-3'-phosphate
  modified_base 8: mod_base = OTHER; note = 2'-O-methyladenosine-3'-phosphate
  modified_base 9: mod_base = OTHER; note = 2'-deoxy-2'-fluoroadenosine-3'-phosphate
  modified_base 10: mod_base = OTHER; note = 2'-deoxy-2'-fluoroadenosine-3'-phosphate
  modified_base 11: mod_base = OTHER; note = 2'-deoxy-2'-fluoroguanosine-3'-phosphate
  modified_base 12: mod_base = OTHER; note = 2'-O-methylguanosine-3'-phosphate
  modified_base 13: mod_base = OTHER; note = 2'-deoxy-2'-fluoroguanosine-3'-phosphate
  modified_base 14: mod_base = OTHER; note = 2'-O-methylcytidine-3'-phosphate
  modified_base 15: mod_base = OTHER; note = 2'-deoxy-2'-fluoroadenosine-3'-phosphate
  modified_base 16: mod_base = OTHER; note = 2'-O-methyluridine-3'-phosphate
  modified_base 17: mod_base = OTHER; note = 2'-deoxy-2'-fluorouridine-3'-phosphate
  modified_base 18: mod_base = OTHER; note = 2'-O-methyluridine-3'-phosphate
  modified_base 19: mod_base = OTHER; note = 2'-deoxy-2'-fluorouridine-3'-phosphate
  modified_base 20: mod_base = OTHER; note = 2'-O-methylguanosine-3'-phosphate
  modified_base 21: mod_base = OTHER; note = 2'-deoxy-2'-fluoroadenosine-3'-phosphate ((2S,4R)-1-[29-[[2-(acetylamino)-2-deoxy-beta-D-galactopyra nosyl]oxy]-14,14-bis[[3-[[3-[[5-[[2-(acetylamino)-2-deoxy-b eta-D-galactopyranosyl]oxy]-1-oxopentyl]amino]propyl]amino] -3-oxopropoxy]methyl]-1,12,19,25-tetraoxo-16-oxa-13,20,24-t riazanonacos-1-yl]-4-hydroxy-2-pyrrolidinyl)methyl ester
ttgttgcaaagggcattttga

SEQ ID NO: 76 - RNA, 21 nt, synthetic construct
  source 1..21: mol_type = other RNA
  modified_base 1: mod_base = OTHER; note = 2'-deoxy-2'-fluorocytidine-3'-phosphorothioate
  modified_base 2: mod_base = OTHER; note = 2'-O-methyluridine-3'-phosphorothioate
  modified_base 3: mod_base = OTHER; note = 2'-deoxy-2'-fluorocytidine-3'-phosphate
  modified_base 4: mod_base = OTHER; note = 2'-O-methyladenosine-3'-phosphate
  modified_base 5: mod_base = OTHER; note = 2'-deoxy-2'-fluorouridine-3'-phosphate
  modified_base 6: mod_base = OTHER; note = 2'-O-methyluridine-3'-phosphate
  modified_base 7: mod_base = OTHER; note = 2'-deoxy-2'-fluoroguanosine-3'-phosphate
  modified_base 8: mod_base = OTHER; note = 2'-O-methyluridine-3'-phosphate
  modified_base 9: mod_base = OTHER; note = 2'-deoxy-2'-fluorouridine-3'-phosphate
  modified_base 10: mod_base = OTHER; note = 2'-deoxy-2'-fluorouridine-3'-phosphate
  modified_base 11: mod_base = OTHER; note = 2'-deoxy-2'-fluoroadenosine-3'-phosphate
  modified_base 12: mod_base = OTHER; note = 2'-O-methyluridine-3'-phosphate
  modified_base 13: mod_base = OTHER; note = 2'-deoxy-2'-fluorouridine-3'-phosphate
  modified_base 14: mod_base = OTHER; note = 2'-O-methyladenosine-3'-phosphate
  modified_base 15: mod_base = OTHER; note = 2'-deoxy-2'-fluoroadenosine-3'-phosphate
  modified_base 16: mod_base = OTHER; note = 2'-O-methylcytidine-3'-phosphate
  modified_base 17: mod_base = OTHER; note = 2'-deoxy-2'-fluorocytidine-3'-phosphate
  modified_base 18: mod_base = OTHER; note = 2'-O-methyluridine-3'-phosphate
  modified_base 19: mod_base = OTHER; note = 2'-deoxy-2'-fluoroguanosine-3'-phosphate
  modified_base 20: mod_base = OTHER; note = 2'-O-methyluridine-3'-phosphate
  modified_base 21: mod_base = OTHER; note = 2'-deoxy-2'-fluoroadenosine-3'-phosphate ((2S,4R)-1-[29-[[2-(acetylamino)-2-deoxy-beta-D-galactopyra nosyl]oxy]-14,14-bis[[3-[[3-[[5-[[2-(acetylamino)-2-deoxy-b eta-D-galactopyranosyl]oxy]-1-oxopentyl]amino]propyl]amino] -3-oxopropoxy]methyl]-1,12,19,25-tetraoxo-16-oxa-13,20,24-t riazanonacos-1-yl]-4-hydroxy-2-pyrrolidinyl)methyl ester
ctcattgtttattaacctgta

SEQ ID NO: 77 - RNA, 21 nt, synthetic construct
  source 1..21: mol_type = other RNA
  modified_base 1: mod_base = OTHER; note = 2'-deoxy-2'-fluorocytidine-3'-phosphorothioate
  modified_base 2: mod_base = OTHER; note = 2'-O-methyladenosine-3'-phosphorothioate
  modified_base 3: mod_base = OTHER; note = 2'-deoxy-2'-fluoroadenosine-3'-phosphate
  modified_base 4: mod_base = OTHER; note = 2'-O-methylcytidine-3'-phosphate
  modified_base 5: mod_base = OTHER; note = 2'-deoxy-2'-fluoroadenosine-3'-phosphate
  modified_base 6: mod_base = OTHER; note = 2'-O-methyladenosine-3'-phosphate
  modified_base 7: mod_base = OTHER; note = 2'-deoxy-2'-fluoroadenosine-3'-phosphate
  modified_base 8: mod_base = OTHER; note = 2'-O-methyladenosine-3'-phosphate
  modified_base 9: mod_base = OTHER; note = 2'-deoxy-2'-fluorouridine-3'-phosphate
  modified_base 10: mod_base = OTHER; note = 2'-deoxy-2'-fluoroadenosine-3'-phosphate
  modified_base 11: mod_base = OTHER; note = 2'-deoxy-2'-fluoroguanosine-3'-phosphate
  modified_base 12: mod_base = OTHER; note = 2'-O-methylcytidine-3'-phosphate
  modified_base 13: mod_base = OTHER; note = 2'-deoxy-2'-fluoroadenosine-3'-phosphate
  modified_base 14: mod_base = OTHER; note = 2'-O-methyladenosine-3'-phosphate
  modified_base 15: mod_base = OTHER; note = 2'-deoxy-2'-fluorouridine-3'-phosphate
  modified_base 16: mod_base = OTHER; note = 2'-O-methylcytidine-3'-phosphate
  modified_base 17: mod_base = OTHER; note = 2'-deoxy-2'-fluorocytidine-3'-phosphate
  modified_base 18: mod_base = OTHER; note = 2'-O-methylcytidine-3'-phosphate
  modified_base 19: mod_base = OTHER; note = 2'-deoxy-2'-fluorouridine-3'-phosphate
  modified_base 20: mod_base = OTHER; note = 2'-O-methyluridine-3'-phosphate
  modified_base 21: mod_base = OTHER; note = 2'-deoxy-2'-fluorouridine-3'-phosphate ((2S,4R)-1-[29-[[2-(acetylamino)-2-deoxy-beta-D-galactopyra nosyl]oxy]-14,14-bis[[3-[[3-[[5-[[2-(acetylamino)-2-deoxy-b eta-D-galactopyranosyl]oxy]-1-oxopentyl]amino]propyl]amino] -3-oxopropoxy]methyl]-1,12,19,25-tetraoxo-16-oxa-13,20,24-t riazanonacos-1-yl]-4-hydroxy-2-pyrrolidinyl)methyl ester
caacaaaatagcaatcccttt

SEQ ID NO: 78 - RNA, 21 nt, synthetic construct
  source 1..21: mol_type = other RNA
  modified_base 1: mod_base = OTHER; note = 2'-deoxy-2'-fluorocytidine-3'-phosphorothioate
  modified_base 2: mod_base = OTHER; note = 2'-O-methyladenosine-3'-phosphorothioate
  modified_base 3: mod_base = OTHER; note = 2'-deoxy-2'-fluorouridine-3'-phosphate
  modified_base 4: mod_base = OTHER; note = 2'-O-methyluridine-3'-phosphate
  modified_base 5: mod_base = OTHER; note = 2'-deoxy-2'-fluoroguanosine-3'-phosphate
  modified_base 6: mod_base = OTHER; note = 2'-O-methyluridine-3'-phosphate
  modified_base 7: mod_base = OTHER; note = 2'-deoxy-2'-fluorouridine-3'-phosphate
  modified_base 8: mod_base = OTHER; note = 2'-O-methyluridine-3'-phosphate
  modified_base 9: mod_base = OTHER; note = 2'-deoxy-2'-fluoroadenosine-3'-phosphate
  modified_base 10: mod_base = OTHER; note = 2'-deoxy-2'-fluorouridine-3'-phosphate
  modified_base 11: mod_base = OTHER; note = 2'-deoxy-2'-fluorouridine-3'-phosphate
  modified_base 12: mod_base = OTHER; note = 2'-O-methyladenosine-3'-phosphate
  modified_base 13: mod_base = OTHER; note = 2'-deoxy-2'-fluoroadenosine-3'-phosphate
  modified_base 14: mod_base = OTHER; note = 2'-O-methylcytidine-3'-phosphate
  modified_base 15: mod_base = OTHER; note = 2'-deoxy-2'-fluorocytidine-3'-phosphate
  modified_base 16: mod_base = OTHER; note = 2'-O-methyluridine-3'-phosphate
  modified_base 17: mod_base = OTHER; note = 2'-deoxy-2'-fluoroguanosine-3'-phosphate
  modified_base 18: mod_base = OTHER; note = 2'-O-methyluridine-3'-phosphate
  modified_base 19: mod_base = OTHER; note = 2'-deoxy-2'-fluoroadenosine-3'-phosphate
  modified_base 20: mod_base = OTHER; note = 2'-O-methyluridine-3'-phosphate
  modified_base 21: mod_base = OTHER; note = 2'-deoxy-2'-fluorouridine-3'-phosphate ((2S,4R)-1-[29-[[2-(acetylamino)-2-deoxy-beta-D-galactopyra nosyl]oxy]-14,14-bis[[3-[[3-[[5-[[2-(acetylamino)-2-deoxy-b eta-D-galactopyranosyl]oxy]-1-oxopentyl]amino]propyl]amino] -3-oxopropoxy]methyl]-1,12,19,25-tetraoxo-16-oxa-13,20,24-t riazanonacos-1-yl]-4-hydroxy-2-pyrrolidinyl)methyl ester
cattgtttattaacctgtatt

SEQ ID NO: 79 - RNA, 21 nt, synthetic construct
  source 1..21: mol_type = other RNA
  modified_base 1: mod_base = OTHER; note = 2'-deoxy-2'-fluorouridine-3'-phosphorothioate
  modified_base 2: mod_base = OTHER; note = 2'-O-methyladenosine-3'-phosphorothioate
  modified_base 3: mod_base = OTHER; note = 2'-deoxy-2'-fluorouridine-3'-phosphate
  modified_base 4: mod_base = OTHER; note = 2'-O-methylcytidine-3'-phosphate
  modified_base 5: mod_base = OTHER; note = 2'-deoxy-2'-fluoroadenosine-3'-phosphate
  modified_base 6: mod_base = OTHER; note = 2'-O-methylguanosine-3'-phosphate
  modified_base 7: mod_base = OTHER; note = 2'-deoxy-2'-fluorocytidine-3'-phosphate
  modified_base 8: mod_base = OTHER; note = 2'-O-methyluridine-3'-phosphate
  modified_base 9: mod_base = OTHER; note = 2'-deoxy-2'-fluoroguanosine-3'-phosphate
  modified_base 10: mod_base = OTHER; note = 2'-deoxy-2'-fluoroguanosine-3'-phosphate
  modified_base 11: mod_base = OTHER; note = 2'-deoxy-2'-fluoroguanosine-3'-phosphate
  modified_base 12: mod_base = OTHER; note = 2'-O-methyladenosine-3'-phosphate
  modified_base 13: mod_base = OTHER; note = 2'-deoxy-2'-fluoroadenosine-3'-phosphate
  modified_base 14: mod_base = OTHER; note = 2'-O-methylguanosine-3'-phosphate
  modified_base 15: mod_base = OTHER; note = 2'-deoxy-2'-fluoroadenosine-3'-phosphate
  modified_base 16: mod_base = OTHER; note = 2'-O-methyluridine-3'-phosphate
  modified_base 17: mod_base = OTHER; note = 2'-deoxy-2'-fluoroadenosine-3'-phosphate
  modified_base 18: mod_base = OTHER; note = 2'-O-methyluridine-3'-phosphate
  modified_base 19: mod_base = OTHER; note = 2'-deoxy-2'-fluorocytidine-3'-phosphate
  modified_base 20: mod_base = OTHER; note = 2'-O-methyladenosine-3'-phosphate
  modified_base 21: mod_base = OTHER; note = 2'-deoxy-2'-fluoroadenosine-3'-phosphate ((2S,4R)-1-[29-[[2-(acetylamino)-2-deoxy-beta-D-galactopyra nosyl]oxy]-14,14-bis[[3-[[3-[[5-[[2-(acetylamino)-2-deoxy-b eta-D-galactopyranosyl]oxy]-1-oxopentyl]amino]propyl]amino] -3-oxopropoxy]methyl]-1,12,19,25-tetraoxo-16-oxa-13,20,24-t riazanonacos-1-yl]-4-hydroxy-2-pyrrolidinyl)methyl ester
tatcagctgggaagatatcaa

SEQ ID NO: 80 - RNA, 21 nt, synthetic construct
  source 1..21: mol_type = other RNA
  modified_base 1: mod_base = OTHER; note = 2'-deoxy-2'-fluorouridine-3'-phosphorothioate
  modified_base 2: mod_base = OTHER; note = 2'-O-methylguanosine-3'-phosphorothioate
  modified_base 3: mod_base = OTHER; note = 2'-deoxy-2'-fluorouridine-3'-phosphate
  modified_base 4: mod_base = OTHER; note = 2'-O-methylcytidine-3'-phosphate
  modified_base 5: mod_base = OTHER; note = 2'-deoxy-2'-fluorocytidine-3'-phosphate
  modified_base 6: mod_base = OTHER; note = 2'-O-methyluridine-3'-phosphate
  modified_base 7: mod_base = OTHER; note = 2'-deoxy-2'-fluoroadenosine-3'-phosphate
  modified_base 8: mod_base = OTHER; note = 2'-O-methylguanosine-3'-phosphate
  modified_base 9: mod_base = OTHER; note = 2'-deoxy-2'-fluoroguanosine-3'-phosphate
  modified_base 10: mod_base = OTHER; note = 2'-deoxy-2'-fluoroadenosine-3'-phosphate
  modified_base 11: mod_base = OTHER; note = 2'-deoxy-2'-fluoroadenosine-3'-phosphate
  modified_base 12: mod_base = OTHER; note = 2'-O-methylcytidine-3'-phosphate
  modified_base 13: mod_base = OTHER; note = 2'-deoxy-2'-fluorocytidine-3'-phosphate
  modified_base 14: mod_base = OTHER; note = 2'-O-methyluridine-3'-phosphate
  modified_base 15: mod_base = OTHER; note = 2'-deoxy-2'-fluorouridine-3'-phosphate
  modified_base 16: mod_base = OTHER; note = 2'-O-methyluridine-3'-phosphate
  modified_base 17: mod_base = OTHER; note = 2'-deoxy-2'-fluorouridine-3'-phosphate
  modified_base 18: mod_base = OTHER; note = 2'-O-methyladenosine-3'-phosphate
  modified_base 19: mod_base = OTHER; note = 2'-deoxy-2'-fluoroguanosine-3'-phosphate
  modified_base 20: mod_base = OTHER; note = 2'-O-methyladenosine-3'-phosphate
  modified_base 21: mod_base = OTHER; note = 2'-deoxy-2'-fluoroadenosine-3'-phosphate ((2S,4R)-1-[29-[[2-(acetylamino)-2-deoxy-beta-D-galactopyra nosyl]oxy]-14,14-bis[[3-[[3-[[5-[[2-(acetylamino)-2-deoxy-b eta-D-galactopyranosyl]oxy]-1-oxopentyl]amino]propyl]amino] -3-oxopropoxy]methyl]-1,12,19,25-tetraoxo-16-oxa-13,20,24-t riazanonacos-1-yl]-4-hydroxy-2-pyrrolidinyl)methyl ester
tgtcctaggaaccttttagaa

SEQ ID NO: 81 - RNA, 21 nt, synthetic construct
  source 1..21: mol_type = other RNA
  modified_base 1: mod_base = OTHER; note = 2'-deoxy-2'-fluorouridine-3'-phosphorothioate
  modified_base 2: mod_base = OTHER; note = 2'-O-methylcytidine-3'-phosphorothioate
  modified_base 3: mod_base = OTHER; note = 2'-deoxy-2'-fluorocytidine-3'-phosphate
  modified_base 4: mod_base = OTHER; note = 2'-O-methyladenosine-3'-phosphate
  modified_base 5: mod_base = OTHER; note = 2'-deoxy-2'-fluoroadenosine-3'-phosphate
  modified_base 6: mod_base = OTHER; note = 2'-O-methylcytidine-3'-phosphate
  modified_base 7: mod_base = OTHER; note = 2'-deoxy-2'-fluoroadenosine-3'-phosphate
  modified_base 8: mod_base = OTHER; note = 2'-O-methyladenosine-3'-phosphate
  modified_base 9: mod_base = OTHER; note = 2'-deoxy-2'-fluoroadenosine-3'-phosphate
  modified_base 10: mod_base = OTHER; note = 2'-deoxy-2'-fluoroadenosine-3'-phosphate
  modified_base 11: mod_base = OTHER; note = 2'-deoxy-2'-fluorouridine-3'-phosphate
  modified_base 12: mod_base = OTHER; note = 2'-O-methyladenosine-3'-phosphate
  modified_base 13: mod_base = OTHER; note = 2'-deoxy-2'-fluoroguanosine-3'-phosphate
  modified_base 14: mod_base = OTHER; note = 2'-O-methylcytidine-3'-phosphate
  modified_base 15: mod_base = OTHER; note = 2'-deoxy-2'-fluoroadenosine-3'-phosphate
  modified_base 16: mod_base = OTHER; note = 2'-O-methyladenosine-3'-phosphate
  modified_base 17: mod_base = OTHER; note = 2'-deoxy-2'-fluorouridine-3'-phosphate
  modified_base 18: mod_base = OTHER; note = 2'-O-methylcytidine-3'-phosphate
  modified_base 19: mod_base = OTHER; note = 2'-deoxy-2'-fluorocytidine-3'-phosphate
  modified_base 20: mod_base = OTHER; note = 2'-O-methylcytidine-3'-phosphate
  modified_base 21: mod_base = OTHER; note = 2'-deoxy-2'-fluorouridine-3'-phosphate ((2S,4R)-1-[29-[[2-(acetylamino)-2-deoxy-beta-D-galactopyra nosyl]oxy]-14,14-bis[[3-[[3-[[5-[[2-(acetylamino)-2-deoxy-b eta-D-galactopyranosyl]oxy]-1-oxopentyl]amino]propyl]amino] -3-oxopropoxy]methyl]-1,12,19,25-tetraoxo-16-oxa-13,20,24-t riazanonacos-1-yl]-4-hydroxy-2-pyrrolidinyl)methyl ester
tccaacaaaatagcaatccct

SEQ ID NO: 82 - RNA, 21 nt, synthetic construct
  source 1..21: mol_type = other RNA
  modified_base 1: mod_base = OTHER; note = 2'-deoxy-2'-fluoroguanosine-3'-phosphorothioate
  modified_base 2: mod_base = OTHER; note = 2'-O-methylguanosine-3'-phosphorothioate
  modified_base 3: mod_base = OTHER; note = 2'-deoxy-2'-fluorouridine-3'-phosphate
  modified_base 4: mod_base = OTHER; note = 2'-O-methylguanosine-3'-phosphate
  modified_base 5: mod_base = OTHER; note = 2'-deoxy-2'-fluorouridine-3'-phosphate
  modified_base 6: mod_base = OTHER; note = 2'-O-methylguanosine-3'-phosphate
  modified_base 7: mod_base = OTHER; note = 2'-deoxy-2'-fluorocytidine-3'-phosphate
  modified_base 8: mod_base = OTHER; note = 2'-O-methylguanosine-3'-phosphate
  modified_base 9: mod_base = OTHER; note = 2'-deoxy-2'-fluoroguanosine-3'-phosphate
  modified_base 10: mod_base = OTHER; note = 2'-deoxy-2'-fluoroadenosine-3'-phosphate
  modified_base 11: mod_base = OTHER; note = 2'-deoxy-2'-fluoroadenosine-3'-phosphate
  modified_base 12: mod_base = OTHER; note = 2'-O-methyladenosine-3'-phosphate
  modified_base 13: mod_base = OTHER; note = 2'-deoxy-2'-fluoroguanosine-3'-phosphate
  modified_base 14: mod_base = OTHER; note = 2'-O-methylguanosine-3'-phosphate
  modified_base 15: mod_base = OTHER; note = 2'-deoxy-2'-fluorocytidine-3'-phosphate
  modified_base 16: mod_base = OTHER; note = 2'-O-methyladenosine-3'-phosphate
  modified_base 17: mod_base = OTHER; note = 2'-deoxy-2'-fluorocytidine-3'-phosphate
  modified_base 18: mod_base = OTHER; note = 2'-O-methyluridine-3'-phosphate
  modified_base 19: mod_base = OTHER; note = 2'-deoxy-2'-fluoroguanosine-3'-phosphate
  modified_base 20: mod_base = OTHER; note = 2'-O-methyladenosine-3'-phosphate
  modified_base 21: mod_base = OTHER; note = 2'-deoxy-2'-fluorouridine-3'-phosphate ((2S,4R)-1-[29-[[2-(acetylamino)-2-deoxy-beta-D-galactopyra nosyl]oxy]-14,14-bis[[3-[[3-[[5-[[2-(acetylamino)-2-deoxy-b eta-D-galactopyranosyl]oxy]-1-oxopentyl]amino]propyl]amino] -3-oxopropoxy]methyl]-1,12,19,25-tetraoxo-16-oxa-13,20,24-t riazanonacos-1-yl]-4-hydroxy-2-pyrrolidinyl)methyl ester
ggtgtgcggaaaggcactgat

SEQ ID NO: 83 - RNA, 21 nt, synthetic construct
  source 1..21: mol_type = other RNA
  modified_base 1: mod_base = OTHER; note = 2'-deoxy-2'-fluorouridine-3'-phosphorothioate
  modified_base 2: mod_base = OTHER; note = 2'-O-methyluridine-3'-phosphorothioate
  modified_base 3: mod_base = OTHER; note = 2'-deoxy-2'-fluoroguanosine-3'-phosphate
  modified_base 4: mod_base = OTHER; note = 2'-O-methyladenosine-3'-phosphate
  modified_base 5: mod_base = OTHER; note = 2'-deoxy-2'-fluoroadenosine-3'-phosphate
  modified_base 6: mod_base = OTHER; note = 2'-O-methyladenosine-3'-phosphate
  modified_base 7: mod_base = OTHER; note = 2'-deoxy-2'-fluorocytidine-3'-phosphate
  modified_base 8: mod_base = OTHER; note = 2'-O-methylcytidine-3'-phosphate
  modified_base 9: mod_base = OTHER; note = 2'-deoxy-2'-fluoroadenosine-3'-phosphate
  modified_base 10: mod_base = OTHER; note = 2'-deoxy-2'-fluoroguanosine-3'-phosphate
  modified_base 11: mod_base = OTHER; note = 2'-deoxy-2'-fluorouridine-3'-phosphate
  modified_base 12: mod_base = OTHER; note = 2'-O-methyladenosine-3'-phosphate
  modified_base 13: mod_base = OTHER; note = 2'-deoxy-2'-fluorocytidine-3'-phosphate
  modified_base 14: mod_base = OTHER; note = 2'-O-methyluridine-3'-phosphate
  modified_base 15: mod_base = OTHER; note = 2'-deoxy-2'-fluorouridine-3'-phosphate
  modified_base 16: mod_base = OTHER; note = 2'-O-methyluridine-3'-phosphate
  modified_base 17: mod_base = OTHER; note = 2'-deoxy-2'-fluoroadenosine-3'-phosphate
  modified_base 18: mod_base = OTHER; note = 2'-O-methyluridine-3'-phosphate
  modified_base 19: mod_base = OTHER; note = 2'-deoxy-2'-fluorocytidine-3'-phosphate
  modified_base 20: mod_base = OTHER; note = 2'-O-methyladenosine-3'-phosphate
  modified_base 21: mod_base = OTHER; note = 2'-deoxy-2'-fluorouridine-3'-phosphate ((2S,4R)-1-[29-[[2-(acetylamino)-2-deoxy-beta-D-galactopyra nosyl]oxy]-14,14-bis[[3-[[3-[[5-[[2-(acetylamino)-2-deoxy-b eta-D-galactopyranosyl]oxy]-1-oxopentyl]amino]propyl]amino] -3-oxopropoxy]methyl]-1,12,19,25-tetraoxo-16-oxa-13,20,24-t riazanonacos-1-yl]-4-hydroxy-2-pyrrolidinyl)methyl ester
ttgaaaccagtactttatcat

SEQ ID NO: 84 - RNA, 21 nt, synthetic construct
  source 1..21: mol_type = other RNA
  modified_base 1: mod_base = OTHER; note = 2'-deoxy-2'-fluorouridine-3'-phosphorothioate
  modified_base 2: mod_base = OTHER; note = 2'-O-methyladenosine-3'-phosphorothioate
  modified_base 3: mod_base = OTHER; note = 2'-deoxy-2'-fluorocytidine-3'-phosphate
  modified_base 4: mod_base = OTHER; note = 2'-O-methyluridine-3'-phosphate
  modified_base 5: mod_base = OTHER; note = 2'-deoxy-2'-fluorouridine-3'-phosphate
  modified_base 6: mod_base = OTHER; note = 2'-O-methylcytidine-3'-phosphate
  modified_base 7: mod_base = OTHER; note = 2'-deoxy-2'-fluorocytidine-3'-phosphate
  modified_base 8: mod_base = OTHER; note = 2'-O-methyladenosine-3'-phosphate
  modified_base 9: mod_base = OTHER; note = 2'-deoxy-2'-fluoroadenosine-3'-phosphate
  modified_base 10: mod_base = OTHER; note = 2'-deoxy-2'-fluoroadenosine-3'-phosphate
  modified_base 11: mod_base = OTHER; note = 2'-deoxy-2'-fluoroguanosine-3'-phosphate
  modified_base 12: mod_base = OTHER; note = 2'-O-methyluridine-3'-phosphate
  modified_base 13: mod_base = OTHER; note = 2'-deoxy-2'-fluorocytidine-3'-phosphate
  modified_base 14: mod_base = OTHER; note = 2'-O-methyluridine-3'-phosphate
  modified_base 15: mod_base = OTHER; note = 2'-deoxy-2'-fluoroadenosine-3'-phosphate
  modified_base 16: mod_base = OTHER; note = 2'-O-methyluridine-3'-phosphate
  modified_base 17: mod_base = OTHER; note = 2'-deoxy-2'-fluoroadenosine-3'-phosphate
  modified_base 18: mod_base = OTHER; note = 2'-O-methyluridine-3'-phosphate
  modified_base 19: mod_base = OTHER; note = 2'-deoxy-2'-fluoroadenosine-3'-phosphate
  modified_base 20: mod_base = OTHER; note = 2'-O-methyluridine-3'-phosphate
  modified_base 21: mod_base = OTHER; note = 2'-deoxy-2'-fluoroadenosine-3'-phosphate ((2S,4R)-1-[29-[[2-(acetylamino)-2-deoxy-beta-D-galactopyra nosyl]oxy]-14,14-bis[[3-[[3-[[5-[[2-(acetylamino)-2-deoxy-b eta-D-galactopyranosyl]oxy]-1-oxopentyl]amino]propyl]amino] -3-oxopropoxy]methyl]-1,12,19,25-tetraoxo-16-oxa-13,20,24-t riazanonacos-1-yl]-4-hydroxy-2-pyrrolidinyl)methyl ester
tacttccaaagtctatatata

SEQ ID NO: 85 - RNA, 21 nt, synthetic construct
  source 1..21: mol_type = other RNA
  modified_base 1: mod_base = OTHER; note = 2'-deoxy-2'-fluorouridine-3'-phosphorothioate
  modified_base 2: mod_base = OTHER; note = 2'-O-methylcytidine-3'-phosphorothioate
  modified_base 3: mod_base = OTHER; note = 2'-deoxy-2'-fluorocytidine-3'-phosphate
  modified_base 4: mod_base = OTHER; note = 2'-O-methyluridine-3'-phosphate
  modified_base 5: mod_base = OTHER; note = 2'-deoxy-2'-fluoroadenosine-3'-phosphate
  modified_base 6: mod_base = OTHER; note = 2'-O-methylguanosine-3'-phosphate
  modified_base 7: mod_base = OTHER; note = 2'-deoxy-2'-fluoroguanosine-3'-phosphate
  modified_base 8: mod_base = OTHER; note = 2'-O-methyladenosine-3'-phosphate
  modified_base 9: mod_base = OTHER; note = 2'-deoxy-2'-fluoroadenosine-3'-phosphate
  modified_base 10: mod_base = OTHER; note = 2'-deoxy-2'-fluorocytidine-3'-phosphate
  modified_base 11: mod_base = OTHER; note = 2'-deoxy-2'-fluorocytidine-3'-phosphate
  modified_base 12: mod_base = OTHER; note = 2'-O-methyluridine-3'-phosphate
  modified_base 13: mod_base = OTHER; note = 2'-deoxy-2'-fluorouridine-3'-phosphate
  modified_base 14: mod_base = OTHER; note = 2'-O-methyluridine-3'-phosphate
  modified_base 15: mod_base = OTHER; note = 2'-deoxy-2'-fluorouridine-3'-phosphate
  modified_base 16: mod_base = OTHER; note = 2'-O-methyladenosine-3'-phosphate
  modified_base 17: mod_base = OTHER; note = 2'-deoxy-2'-fluoroguanosine-3'-phosphate
  modified_base 18: mod_base = OTHER; note = 2'-O-methyladenosine-3'-phosphate
  modified_base 19: mod_base = OTHER; note = 2'-deoxy-2'-fluoroadenosine-3'-phosphate
  modified_base 20: mod_base = OTHER; note = 2'-O-methyladenosine-3'-phosphate
  modified_base 21: mod_base = OTHER; note = 2'-deoxy-2'-fluorouridine-3'-phosphate ((2S,4R)-1-[29-[[2-(acetylamino)-2-deoxy-beta-D-galactopyra nosyl]oxy]-14,14-bis[[3-[[3-[[5-[[2-(acetylamino)-2-deoxy-b eta-D-galactopyranosyl]oxy]-1-oxopentyl]amino]propyl]amino] -3-oxopropoxy]methyl]-1,12,19,25-tetraoxo-16-oxa-13,20,24-t riazanonacos-1-yl]-4-hydroxy-2-pyrrolidinyl)methyl ester
tcctaggaaccttttagaaat

SEQ ID NO: 86 - RNA, 21 nt, synthetic construct
  source 1..21: mol_type = other RNA
  modified_base 1: mod_base = OTHER; note = 2'-deoxy-2'-fluorocytidine-3'-phosphorothioate
  modified_base 2: mod_base = OTHER; note = 2'-O-methyluridine-3'-phosphorothioate
  modified_base 3: mod_base = OTHER; note = 2'-deoxy-2'-fluorocytidine-3'-phosphate
  modified_base 4: mod_base = OTHER; note = 2'-O-methylcytidine-3'-phosphate
  modified_base 5: mod_base = OTHER; note = 2'-deoxy-2'-fluorouridine-3'-phosphate
  modified_base 6: mod_base = OTHER; note = 2'-O-methylguanosine-3'-phosphate
  modified_base 7: mod_base = OTHER; note = 2'-deoxy-2'-fluoroadenosine-3'-phosphate
  modified_base 8: mod_base = OTHER; note = 2'-O-methylguanosine-3'-phosphate
  modified_base 9: mod_base = OTHER; note = 2'-deoxy-2'-fluoroguanosine-3'-phosphate
  modified_base 10: mod_base = OTHER; note = 2'-deoxy-2'-fluoroadenosine-3'-phosphate
  modified_base 11: mod_base = OTHER; note = 2'-deoxy-2'-fluoroadenosine-3'-phosphate
  modified_base 12: mod_base = OTHER; note = 2'-O-methyladenosine-3'-phosphate
  modified_base 13: mod_base = OTHER; note = 2'-deoxy-2'-fluoroadenosine-3'-phosphate
  modified_base 14: mod_base = OTHER; note = 2'-O-methyluridine-3'-phosphate
  modified_base 15: mod_base = OTHER; note = 2'-deoxy-2'-fluorouridine-3'-phosphate
  modified_base 16: mod_base = OTHER; note = 2'-O-methyluridine-3'-phosphate
  modified_base 17: mod_base = OTHER; note = 2'-deoxy-2'-fluorouridine-3'-phosphate
  modified_base 18: mod_base = OTHER; note = 2'-O-methylguanosine-3'-phosphate
  modified_base 19: mod_base = OTHER; note = 2'-deoxy-2'-fluoroguanosine-3'-phosphate
  modified_base 20: mod_base = OTHER; note = 2'-O-methyladenosine-3'-phosphate
  modified_base 21: mod_base = OTHER; note = 2'-deoxy-2'-fluoroadenosine-3'-phosphate ((2S,4R)-1-[29-[[2-(acetylamino)-2-deoxy-beta-D-galactopyra nosyl]oxy]-14,14-bis[[3-[[3-[[5-[[2-(acetylamino)-2-deoxy-b eta-D-galactopyranosyl]oxy]-1-oxopentyl]amino]propyl]amino] -3-oxopropoxy]methyl]-1,12,19,25-tetraoxo-16-oxa-13,20,24-t riazanonacos-1-yl]-4-hydroxy-2-pyrrolidinyl)methyl ester
ctcctgaggaaaattttggaa

SEQ ID NO: 87 - RNA, 21 nt, synthetic construct
  source 1..21: mol_type = other RNA
  modified_base 1: mod_base = OTHER; note = 2'-deoxy-2'-fluoroguanosine-3'-phosphorothioate
  modified_base 2: mod_base = OTHER; note = 2'-O-methylcytidine-3'-phosphorothioate
  modified_base 3: mod_base = OTHER; note = 2'-deoxy-2'-fluorouridine-3'-phosphate
  modified_base 4: mod_base = OTHER; note = 2'-O-methylcytidine-3'-phosphate
  modified_base 5: mod_base = OTHER; note = 2'-deoxy-2'-fluorocytidine-3'-phosphate
  modified_base 6: mod_base = OTHER; note = 2'-O-methylguanosine-3'-phosphate
  modified_base 7: mod_base = OTHER; note = 2'-deoxy-2'-fluoroguanosine-3'-phosphate
  modified_base 8: mod_base = OTHER; note = 2'-O-methyladenosine-3'-phosphate
  modified_base 9: mod_base = OTHER; note = 2'-deoxy-2'-fluoroadenosine-3'-phosphate
  modified_base 10: mod_base = OTHER; note = 2'-deoxy-2'-fluorouridine-3'-phosphate
  modified_base 11: mod_base = OTHER; note = 2'-deoxy-2'-fluoroguanosine-3'-phosphate
  modified_base 12: mod_base = OTHER; note = 2'-O-methyluridine-3'-phosphate
  modified_base 13: mod_base = OTHER; note = 2'-deoxy-2'-fluorouridine-3'-phosphate
  modified_base 14: mod_base = OTHER; note = 2'-O-methylguanosine-3'-phosphate
  modified_base 15: mod_base = OTHER; note = 2'-deoxy-2'-fluorocytidine-3'-phosphate
  modified_base 16: mod_base = OTHER; note = 2'-O-methyluridine-3'-phosphate
  modified_base 17: mod_base = OTHER; note = 2'-deoxy-2'-fluoroguanosine-3'-phosphate
  modified_base 18: mod_base = OTHER; note = 2'-O-methyladenosine-3'-phosphate
  modified_base 19: mod_base = OTHER; note = 2'-deoxy-2'-fluoroadenosine-3'-phosphate
  modified_base 20: mod_base = OTHER; note = 2'-O-methyladenosine-3'-phosphate
  modified_base 21: mod_base = OTHER; note = 2'-deoxy-2'-fluorouridine-3'-phosphate ((2S,4R)-1-[29-[[2-(acetylamino)-2-deoxy-beta-D-galactopyra nosyl]oxy]-14,14-bis[[3-[[3-[[5-[[2-(acetylamino)-2-deoxy-b eta-D-galactopyranosyl]oxy]-1-oxopentyl]amino]propyl]amino] -3-oxopropoxy]methyl]-1,12,19,25-tetraoxo-16-oxa-13,20,24-t riazanonacos-1-yl]-4-hydroxy-2-pyrrolidinyl)methyl ester
gctccggaatgttgctgaaat

SEQ ID NO: 88 - RNA, 21 nt, synthetic construct
  source 1..21: mol_type = other RNA
  modified_base 1: mod_base = OTHER; note = 2'-deoxy-2'-fluoroguanosine-3'-phosphorothioate
  modified_base 2: mod_base = OTHER; note = 2'-O-methyluridine-3'-phosphorothioate
  modified_base 3: mod_base = OTHER; note = 2'-deoxy-2'-fluoroguanosine-3'-phosphate
  modified_base 4: mod_base = OTHER; note = 2'-O-methyluridine-3'-phosphate
  modified_base 5: mod_base = OTHER; note = 2'-deoxy-2'-fluorouridine-3'-phosphate
  modified_base 6: mod_base = OTHER; note = 2'-O-methyluridine-3'-phosphate
  modified_base 7: mod_base = OTHER; note = 2'-deoxy-2'-fluoroguanosine-3'-phosphate
  modified_base 8: mod_base = OTHER; note = 2'-O-methyluridine-3'-phosphate
  modified_base 9: mod_base = OTHER; note = 2'-deoxy-2'-fluoroguanosine-3'-phosphate
  modified_base 10: mod_base = OTHER; note = 2'-deoxy-2'-fluoroguanosine-3'-phosphate
  modified_base 11: mod_base = OTHER; note = 2'-deoxy-2'-fluoroguanosine-3'-phosphate
  modified_base 12: mod_base = OTHER; note = 2'-O-methylguanosine-3'-phosphate
  modified_base 13: mod_base = OTHER; note = 2'-deoxy-2'-fluoroadenosine-3'-phosphate
  modified_base 14: mod_base = OTHER; note = 2'-O-methylguanosine-3'-phosphate
  modified_base 15: mod_base = OTHER; note = 2'-deoxy-2'-fluoroadenosine-3'-phosphate
  modified_base 16: mod_base = OTHER; note = 2'-O-methylcytidine-3'-phosphate
  modified_base 17: mod_base = OTHER; note = 2'-deoxy-2'-fluorocytidine-3'-phosphate
  modified_base 18: mod_base = OTHER; note = 2'-O-methyladenosine-3'-phosphate
  modified_base 19: mod_base = OTHER; note = 2'-deoxy-2'-fluoroadenosine-3'-phosphate
  modified_base 20: mod_base = OTHER; note = 2'-O-methyluridine-3'-phosphate
  modified_base 21: mod_base = OTHER; note = 2'-deoxy-2'-fluoroadenosine-3'-phosphate ((2S,4R)-1-[29-[[2-(acetylamino)-2-deoxy-beta-D-galactopyra nosyl]oxy]-14,14-bis[[3-[[3-[[5-[[2-(acetylamino)-2-deoxy-b eta-D-galactopyranosyl]oxy]-1-oxopentyl]amino]propyl]amino] -3-oxopropoxy]methyl]-1,12,19,25-tetraoxo-16-oxa-13,20,24-t riazanonacos-1-yl]-4-hydroxy-2-pyrrolidinyl)methyl ester
gtgtttgtggggagaccaata

SEQ ID NO: 89 - RNA, 23 nt, synthetic construct
  source 1..23: mol_type = other RNA
  modified_base 1: mod_base = OTHER; note = 2'-O-methyluridine-3'-phosphorothioate
  modified_base 2: mod_base = OTHER; note = 2'-deoxy-2'-fluorouridine-3'-phosphorothioate
  modified_base 3: mod_base = OTHER; note = 2'-O-methylguanosine-3'-phosphate
  modified_base 4: mod_base = OTHER; note = 2'-deoxy-2'-fluorouridine-3'-phosphate
  modified_base 5: mod_base = OTHER; note = 2'-O-methylcytidine-3'-phosphate
  modified_base 6: mod_base = OTHER; note = 2'-deoxy-2'-fluoroguanosine-3'-phosphate
  modified_base 7: mod_base = OTHER; note = 2'-O-methyladenosine-3'-phosphate
  modified_base 8: mod_base = OTHER; note = 2'-deoxy-2'-fluorouridine-3'-phosphate
  modified_base 9: mod_base = OTHER; note = 2'-O-methylguanosine-3'-phosphate
  modified_base 10: mod_base = OTHER; note = 2'-deoxy-2'-fluoroadenosine-3'-phosphate
  modified_base 11: mod_base = OTHER; note = 2'-O-methylcytidine-3'-phosphate
  modified_base 12: mod_base = OTHER; note = 2'-O-methyluridine-3'-phosphate
  modified_base 13: mod_base = OTHER; note = 2'-O-methyluridine-3'-phosphate
  modified_base 14: mod_base = OTHER; note = 2'-deoxy-2'-fluorouridine-3'-phosphate
  modified_base 15: mod_base = OTHER; note = 2'-O-methylcytidine-3'-phosphate
  modified_base 16: mod_base = OTHER; note = 2'-deoxy-2'-fluoroadenosine-3'-phosphate
  modified_base 17: mod_base = OTHER; note = 2'-O-methylcytidine-3'-phosphate
  modified_base 18: mod_base = OTHER; note = 2'-deoxy-2'-fluoroadenosine-3'-phosphate
  modified_base 19: mod_base = OTHER; note = 2'-O-methyluridine-3'-phosphate
  modified_base 20: mod_base = OTHER; note = 2'-deoxy-2'-fluorouridine-3'-phosphate
  modified_base 21: mod_base = OTHER; note = 2'-O-methylcytidine-3'-phosphorothioate
  modified_base 22: mod_base = OTHER; note = 2'-O-methyluridine-3'-phosphorothioate
  modified_base 23: mod_base = OTHER; note = 2'-O-methylguanosine
ttgtcgatgactttcacattctg

SEQ ID NO: 90 - RNA, 23 nt, synthetic construct
  source 1..23: mol_type = other RNA
  modified_base 1: mod_base = OTHER; note = 2'-O-methyluridine-3'-phosphorothioate
  modified_base 2: mod_base = OTHER; note = 2'-deoxy-2'-fluorocytidine-3'-phosphorothioate
  modified_base 3: mod_base = OTHER; note = 2'-O-methylcytidine-3'-phosphate
  modified_base 4: mod_base = OTHER; note = 2'-deoxy-2'-fluorouridine-3'-phosphate
  modified_base 5: mod_base = OTHER; note = 2'-O-methyladenosine-3'-phosphate
  modified_base 6: mod_base = OTHER; note = 2'-deoxy-2'-fluoroguanosine-3'-phosphate
  modified_base 7: mod_base = OTHER; note = 2'-O-methylguanosine-3'-phosphate
  modified_base 8: mod_base = OTHER; note = 2'-deoxy-2'-fluoroadenosine-3'-phosphate
  modified_base 9: mod_base = OTHER; note = 2'-O-methylcytidine-3'-phosphate
  modified_base 10: mod_base = OTHER; note = 2'-deoxy-2'-fluoroadenosine-3'-phosphate
  modified_base 11: mod_base = OTHER; note = 2'-O-methylcytidine-3'-phosphate
  modified_base 12: mod_base = OTHER; note = 2'-O-methylcytidine-3'-phosphate
  modified_base 13: mod_base = OTHER; note = 2'-O-methylcytidine-3'-phosphate
  modified_base 14: mod_base = OTHER; note = 2'-deoxy-2'-fluoroadenosine-3'-phosphate
  modified_base 15: mod_base = OTHER; note = 2'-O-methyluridine-3'-phosphate
  modified_base 16: mod_base = OTHER; note = 2'-deoxy-2'-fluorouridine-3'-phosphate
  modified_base 17: mod_base = OTHER; note = 2'-O-methylguanosine-3'-phosphate
  modified_base 18: mod_base = OTHER; note = 2'-deoxy-2'-fluoroadenosine-3'-phosphate
  modified_base 19: mod_base = OTHER; note = 2'-O-methyladenosine-3'-phosphate
  modified_base 20: mod_base = OTHER; note = 2'-deoxy-2'-fluoroadenosine-3'-phosphate
  modified_base 21: mod_base = OTHER; note = 2'-O-methyladenosine-3'-phosphorothioate
  modified_base 22: mod_base = OTHER; note = 2'-O-methylguanosine-3'-phosphorothioate
  modified_base 23: mod_base = OTHER; note = 2'-O-methyluridine
tcctaggacacccattgaaaagt

SEQ ID NO: 91 - RNA, 23 nt, synthetic construct
  source 1..23: mol_type = other RNA
  modified_base 1: mod_base = OTHER; note = 2'-O-methyladenosine-3'-phosphorothioate
  modified_base 2: mod_base = OTHER; note = 2'-deoxy-2'-fluoroadenosine-3'-phosphorothioate
  modified_base 3: mod_base = OTHER; note = 2'-O-methyluridine-3'-phosphate
  modified_base 4: mod_base = OTHER; note = 2'-deoxy-2'-fluoroguanosine-3'-phosphate
  modified_base 5: mod_base = OTHER; note = 2'-O-methyluridine-3'-phosphate
  modified_base 6: mod_base = OTHER; note = 2'-deoxy-2'-fluorocytidine-3'-phosphate
  modified_base 7: mod_base = OTHER; note = 2'-O-methyluridine-3'-phosphate
  modified_base 8: mod_base = OTHER; note = 2'-deoxy-2'-fluorouridine-3'-phosphate
  modified_base 9: mod_base = OTHER; note = 2'-O-methylguanosine-3'-phosphate
  modified_base 10: mod_base = OTHER; note = 2'-deoxy-2'-fluorouridine-3'-phosphate
  modified_base 11: mod_base = OTHER; note = 2'-O-methylcytidine-3'-phosphate
  modified_base 12: mod_base = OTHER; note = 2'-O-methylguanosine-3'-phosphate
  modified_base 13: mod_base = OTHER; note = 2'-O-methyladenosine-3'-phosphate
  modified_base 14: mod_base = OTHER; note = 2'-deoxy-2'-fluorouridine-3'-phosphate
  modified_base 15: mod_base = OTHER; note = 2'-O-methylguanosine-3'-phosphate
  modified_base 16: mod_base = OTHER; note = 2'-deoxy-2'-fluoroadenosine-3'-phosphate
  modified_base 17: mod_base = OTHER; note = 2'-O-methylcytidine-3'-phosphate
  modified_base 18: mod_base = OTHER; note = 2'-deoxy-2'-fluorouridine-3'-phosphate
  modified_base 19: mod_base = OTHER; note = 2'-O-methyluridine-3'-phosphate
  modified_base 20: mod_base = OTHER; note = 2'-deoxy-2'-fluorouridine-3'-phosphate
  modified_base 21: mod_base = OTHER; note = 2'-O-methylcytidine-3'-phosphorothioate
  modified_base 22: mod_base = OTHER; note = 2'-O-methyladenosine-3'-phosphorothioate
  modified_base 23: mod_base = OTHER; note = 2'-O-methylcytidine
aatgtcttgtcgatgactttcac

SEQ ID NO: 92 - RNA, 23 nt, synthetic construct
  source 1..23: mol_type = other RNA
  modified_base 1: mod_base = OTHER; note = 2'-O-methyluridine-3'-phosphorothioate
  modified_base 2: mod_base = OTHER; note = 2'-deoxy-2'-fluorocytidine-3'-phosphorothioate
  modified_base 3: mod_base = OTHER; note = 2'-O-methyladenosine-3'-phosphate
  modified_base 4: mod_base = OTHER; note = 2'-deoxy-2'-fluorocytidine-3'-phosphate
  modified_base 5: mod_base = OTHER; note = 2'-O-methylcytidine-3'-phosphate
  modified_base 6: mod_base = OTHER; note = 2'-deoxy-2'-fluoroadenosine-3'-phosphate
  modified_base 7: mod_base = OTHER; note = 2'-O-methyladenosine-3'-phosphate
  modified_base 8: mod_base = OTHER; note = 2'-deoxy-2'-fluorouridine-3'-phosphate
  modified_base 9: mod_base = OTHER; note = 2'-O-methylguanosine-3'-phosphate
  modified_base 10: mod_base = OTHER; note = 2'-deoxy-2'-fluorouridine-3'-phosphate
  modified_base 11: mod_base = OTHER; note = 2'-O-methylcytidine-3'-phosphate
  modified_base 12: mod_base = OTHER; note = 2'-O-methyluridine-3'-phosphate
  modified_base 13: mod_base = OTHER; note = 2'-O-methyluridine-3'-phosphate
  modified_base 14: mod_base = OTHER; note = 2'-deoxy-2'-fluoroguanosine-3'-phosphate
  modified_base 15: mod_base = OTHER; note = 2'-O-methyluridine-3'-phosphate
  modified_base 16: mod_base = OTHER; note = 2'-deoxy-2'-fluorocytidine-3'-phosphate
  modified_base 17: mod_base = OTHER; note = 2'-O-methylguanosine-3'-phosphate
  modified_base 18: mod_base = OTHER; note = 2'-deoxy-2'-fluoroadenosine-3'-phosphate
  modified_base 19: mod_base = OTHER; note = 2'-O-methyluridine-3'-phosphate
  modified_base 20: mod_base = OTHER; note = 2'-deoxy-2'-fluoroguanosine-3'-phosphate
  modified_base 21: mod_base = OTHER; note = 2'-O-methyladenosine-3'-phosphorothioate
  modified_base 22: mod_base = OTHER; note = 2'-O-methylcytidine-3'-phosphorothioate
  modified_base 23: mod_base = OTHER; note = 2'-O-methyluridine
tcaccaatgtcttgtcgatgact

SEQ ID NO: 93 - RNA, 23 nt, synthetic construct
  source 1..23: mol_type = other RNA
  modified_base 1: mod_base = OTHER; note = 2'-O-methyluridine-3'-phosphorothioate
  modified_base 2: mod_base = OTHER; note = 2'-deoxy-2'-fluorouridine-3'-phosphorothioate
  modified_base 3: mod_base = OTHER; note = 2'-O-methylcytidine-3'-phosphate
  modified_base 4: mod_base = OTHER; note = 2'-deoxy-2'-fluorocytidine-3'-phosphate
  modified_base 5: mod_base = OTHER; note = 2'-O-methyluridine-3'-phosphate
  modified_base 6: mod_base = OTHER; note = 2'-deoxy-2'-fluoroadenosine-3'-phosphate
  modified_base 7: mod_base = OTHER; note = 2'-O-methylguanosine-3'-phosphate
  modified_base 8: mod_base = OTHER; note = 2'-deoxy-2'-fluoroguanosine-3'-phosphate
  modified_base 9: mod_base = OTHER; note = 2'-O-methyladenosine-3'-phosphate
  modified_base 10: mod_base = OTHER; note = 2'-deoxy-2'-fluorocytidine-3'-phosphate
  modified_base 11: mod_base = OTHER; note = 2'-O-methyladenosine-3'-phosphate
  modified_base 12: mod_base = OTHER; note = 2'-O-methylcytidine-3'-phosphate
  modified_base 13: mod_base = OTHER; note = 2'-O-methylcytidine-3'-phosphate
  modified_base 14: mod_base = OTHER; note = 2'-deoxy-2'-fluorocytidine-3'-phosphate
  modified_base 15: mod_base = OTHER; note = 2'-O-methyladenosine-3'-phosphate
  modified_base 16: mod_base = OTHER; note = 2'-deoxy-2'-fluorouridine-3'-phosphate
  modified_base 17: mod_base = OTHER; note = 2'-O-methyluridine-3'-phosphate
  modified_base 18: mod_base = OTHER; note = 2'-deoxy-2'-fluoroguanosine-3'-phosphate
  modified_base 19: mod_base = OTHER; note = 2'-O-methyladenosine-3'-phosphate
  modified_base 20: mod_base = OTHER; note = 2'-deoxy-2'-fluoroadenosine-3'-phosphate
  modified_base 21: mod_base = OTHER; note = 2'-O-methyladenosine-3'-phosphorothioate
  modified_base 22: mod_base = OTHER; note = 2'-O-methyladenosine-3'-phosphorothioate
  modified_base 23: mod_base = OTHER; note = 2'-O-methylguanosine
ttcctaggacacccattgaaaag

SEQ ID NO: 94 - RNA, 23 nt, synthetic construct
  source 1..23: mol_type = other RNA
  modified_base 1: mod_base = OTHER; note = 2'-O-methyladenosine-3'-phosphorothioate
  modified_base 2: mod_base = OTHER; note = 2'-deoxy-2'-fluoroadenosine-3'-phosphorothioate
  modified_base 3: mod_base = OTHER; note = 2'-O-methylguanosine-3'-phosphate
  modified_base 4: mod_base = OTHER; note = 2'-deoxy-2'-fluoroguanosine-3'-phosphate
  modified_base 5: mod_base = OTHER; note = 2'-O-methyluridine-3'-phosphate
  modified_base 6: mod_base = OTHER; note = 2'-deoxy-2'-fluorouridine-3'-phosphate
  modified_base 7: mod_base = OTHER; note = 2'-O-methylcytidine-3'-phosphate
  modified_base 8: mod_base = OTHER; note = 2'-deoxy-2'-fluorocytidine-3'-phosphate
  modified_base 9: mod_base = OTHER; note = 2'-O-methyluridine-3'-phosphate
  modified_base 10: mod_base = OTHER; note = 2'-deoxy-2'-fluoroadenosine-3'-phosphate
  modified_base 11: mod_base = OTHER; note = 2'-O-methylguanosine-3'-phosphate
  modified_base 12: mod_base = OTHER; note = 2'-O-methylguanosine-3'-phosphate
  modified_base 13: mod_base = OTHER; note = 2'-O-methyladenosine-3'-phosphate
  modified_base 14: mod_base = OTHER; note = 2'-deoxy-2'-fluorocytidine-3'-phosphate
  modified_base 15: mod_base = OTHER; note = 2'-O-methyladenosine-3'-phosphate
  modified_base 16: mod_base = OTHER; note = 2'-deoxy-2'-fluorocytidine-3'-phosphate
  modified_base 17: mod_base = OTHER; note = 2'-O-methylcytidine-3'-phosphate
  modified_base 18: mod_base = OTHER; note = 2'-deoxy-2'-fluorocytidine-3'-phosphate
  modified_base 19: mod_base = OTHER; note = 2'-O-methyladenosine-3'-phosphate
  modified_base 20: mod_base = OTHER; note = 2'-deoxy-2'-fluorouridine-3'-phosphate
  modified_base 21: mod_base = OTHER; note = 2'-O-methyluridine-3'-phosphorothioate
  modified_base 22: mod_base = OTHER; note = 2'-O-methylguanosine-3'-phosphorothioate
  modified_base 23: mod_base = OTHER; note = 2'-O-methyladenosine
aaggttcctaggacacccattga

SEQ ID NO: 95 - RNA, 23 nt, synthetic construct
  source 1..23: mol_type = other RNA
  modified_base 1: mod_base = OTHER; note = 2'-O-methyluridine-3'-phosphorothioate
  modified_base 2: mod_base = OTHER; note = 2'-deoxy-2'-fluoroguanosine-3'-phosphorothioate
  modified_base 3: mod_base = OTHER; note = 2'-O-methylguanosine-3'-phosphate
  modified_base 4: mod_base = OTHER; note = 2'-deoxy-2'-fluoroadenosine-3'-phosphate
  modified_base 5: mod_base = OTHER; note = 2'-O-methyladenosine-3'-phosphate
  modified_base 6: mod_base = OTHER; note = 2'-deoxy-2'-fluoroadenosine-3'-phosphate
  modified_base 7: mod_base = OTHER; note = 2'-O-methyladenosine-3'-phosphate
  modified_base 8: mod_base = OTHER; note = 2'-deoxy-2'-fluorouridine-3'-phosphate
  modified_base 9: mod_base = OTHER; note = 2'-O-methyladenosine-3'-phosphate
  modified_base 10: mod_base = OTHER; note = 2'-deoxy-2'-fluorouridine-3'-phosphate
  modified_base 11: mod_base = OTHER; note = 2'-O-methyluridine-3'-phosphate
  modified_base 12: mod_base = OTHER; note = 2'-O-methylguanosine-3'-phosphate
  modified_base 13: mod_base = OTHER; note = 2'-O-methyluridine-3'-phosphate
  modified_base 14: mod_base = OTHER; note = 2'-deoxy-2'-fluoroguanosine-3'-phosphate
  modified_base 15: mod_base = OTHER; note = 2'-O-methylcytidine-3'-phosphate
  modified_base 16: mod_base = OTHER; note = 2'-deoxy-2'-fluoroadenosine-3'-phosphate
  modified_base 17: mod_base = OTHER; note = 2'-O-methylcytidine-3'-phosphate
  modified_base 18: mod_base = OTHER; note = 2'-deoxy-2'-fluorouridine-3'-phosphate
  modified_base 19: mod_base = OTHER; note = 2'-O-methylguanosine-3'-phosphate
  modified_base 20: mod_base = OTHER; note = 2'-deoxy-2'-fluorouridine-3'-phosphate
  modified_base 21: mod_base = OTHER; note = 2'-O-methylcytidine-3'-phosphorothioate
  modified_base 22: mod_base = OTHER; note = 2'-O-methyladenosine-3'-phosphorothioate
  modified_base 23: mod_base = OTHER; note = 2'-O-methylguanosine
tggaaaatattgtgcactgtcag

SEQ ID NO: 96 - RNA, 23 nt, synthetic construct
  source 1..23: mol_type = other RNA
  modified_base 1: mod_base = OTHER; note = 2'-O-methyluridine-3'-phosphorothioate
  modified_base 2: mod_base = OTHER; note = 2'-deoxy-2'-fluorouridine-3'-phosphorothioate
  modified_base 3: mod_base = OTHER; note = 2'-O-methyladenosine-3'-phosphate
  modified_base 4: mod_base = OTHER; note = 2'-deoxy-2'-fluoroguanosine-3'-phosphate
  modified_base 5: mod_base = OTHER; note = 2'-O-methylguanosine-3'-phosphate
  modified_base 6: mod_base = OTHER; note = 2'-deoxy-2'-fluoroadenosine-3'-phosphate
  modified_base 7: mod_base = OTHER; note = 2'-O-methylcytidine-3'-phosphate
  modified_base 8: mod_base = OTHER; note = 2'-deoxy-2'-fluoroadenosine-3'-phosphate
  modified_base 9: mod_base = OTHER; note = 2'-O-methylcytidine-3'-phosphate
  modified_base 10: mod_base = OTHER; note = 2'-deoxy-2'-fluorocytidine-3'-phosphate
  modified_base 11: mod_base = OTHER; note = 2'-O-methylcytidine-3'-phosphate
  modified_base 12: mod_base = OTHER; note = 2'-O-methyladenosine-3'-phosphate
  modified_base 13: mod_base = OTHER; note = 2'-O-methyluridine-3'-phosphate
  modified_base 14: mod_base = OTHER; note = 2'-deoxy-2'-fluorouridine-3'-phosphate
  modified_base 15: mod_base = OTHER; note = 2'-O-methylguanosine-3'-phosphate
  modified_base 16: mod_base = OTHER; note = 2'-deoxy-2'-fluoroadenosine-3'-phosphate
  modified_base 17: mod_base = OTHER; note = 2'-O-methyladenosine-3'-phosphate
  modified_base 18: mod_base = OTHER; note = 2'-deoxy-2'-fluoroadenosine-3'-phosphate
  modified_base 19: mod_base = OTHER; note = 2'-O-methyladenosine-3'-phosphate
  modified_base 20: mod_base = OTHER; note = 2'-deoxy-2'-fluoroguanosine-3'-phosphate
  modified_base 21: mod_base = OTHER; note = 2'-O-methyluridine-3'-phosphorothioate
  modified_base 22: mod_base = OTHER; note = 2'-O-methylcytidine-3'-phosphorothioate
  modified_base 23: mod_base = OTHER; note = 2'-O-methyladenosine
ttaggacacccattgaaaagtca

SEQ ID NO: 97 - RNA, 23 nt, synthetic construct
  source 1..23: mol_type = other RNA
  modified_base 1: mod_base = OTHER; note = 2'-O-methyluridine-3'-phosphorothioate
  modified_base 2: mod_base = OTHER; note = 2'-deoxy-2'-fluorocytidine-3'-phosphorothioate
  modified_base 3: mod_base = OTHER; note = 2'-O-methyladenosine-3'-phosphate
  modified_base 4: mod_base = OTHER; note = 2'-deoxy-2'-fluoroadenosine-3'-phosphate
  modified_base 5: mod_base = OTHER; note = 2'-O-methyluridine-3'-phosphate
  modified_base 6: mod_base = OTHER; note = 2'-deoxy-2'-fluoroguanosine-3'-phosphate
  modified_base 7: mod_base = OTHER; note = 2'-O-methyluridine-3'-phosphate
  modified_base 8: mod_base = OTHER; note = 2'-deoxy-2'-fluorocytidine-3'-phosphate
  modified_base 9: mod_base = OTHER; note = 2'-O-methyluridine-3'-phosphate
  modified_base 10: mod_base = OTHER; note = 2'-deoxy-2'-fluorouridine-3'-phosphate
  modified_base 11: mod_base = OTHER; note = 2'-O-methylguanosine-3'-phosphate
  modified_base 12: mod_base = OTHER; note = 2'-O-methyluridine-3'-phosphate
  modified_base 13: mod_base = OTHER; note = 2'-O-methylcytidine-3'-phosphate
  modified_base 14: mod_base = OTHER; note = 2'-deoxy-2'-fluoroguanosine-3'-phosphate
  modified_base 15: mod_base = OTHER; note = 2'-O-methyladenosine-3'-phosphate
  modified_base 16: mod_base = OTHER; note = 2'-deoxy-2'-fluorouridine-3'-phosphate
  modified_base 17: mod_base = OTHER; note = 2'-O-methylguanosine-3'-phosphate
  modified_base 18: mod_base = OTHER; note = 2'-deoxy-2'-fluoroadenosine-3'-phosphate
  modified_base 19: mod_base = OTHER; note = 2'-O-methylcytidine-3'-phosphate
  modified_base 20: mod_base = OTHER; note = 2'-deoxy-2'-fluorouridine-3'-phosphate
  modified_base 21: mod_base = OTHER; note = 2'-O-methyluridine-3'-phosphorothioate
  modified_base 22: mod_base = OTHER; note = 2'-O-methyluridine-3'-phosphorothioate
  modified_base 23: mod_base = OTHER; note = 2'-O-methylcytidine
tcaatgtcttgtcgatgactttc

SEQ ID NO: 98 - RNA, 23 nt, synthetic construct
  source 1..23: mol_type = other RNA
  modified_base 1: mod_base = OTHER; note = 2'-O-methyluridine-3'-phosphorothioate
  modified_base 2: mod_base = OTHER; note = 2'-deoxy-2'-fluorocytidine-3'-phosphorothioate
  modified_base 3: mod_base = OTHER; note = 2'-O-methyluridine-3'-phosphate
  modified_base 4: mod_base = OTHER; note = 2'-deoxy-2'-fluorocytidine-3'-phosphate
  modified_base 5: mod_base = OTHER; note = 2'-O-methyladenosine-3'-phosphate
  modified_base 6: mod_base = OTHER; note = 2'-deoxy-2'-fluorocytidine-3'-phosphate
  modified_base 7: mod_base = OTHER; note = 2'-O-methylcytidine-3'-phosphate
  modified_base 8: mod_base = OTHER; note = 2'-deoxy-2'-fluoroadenosine-3'-phosphate
  modified_base 9: mod_base = OTHER; note = 2'-O-methyladenosine-3'-phosphate
  modified_base 10: mod_base = OTHER; note = 2'-deoxy-2'-fluorouridine-3'-phosphate
  modified_base 11: mod_base = OTHER; note = 2'-O-methylguanosine-3'-phosphate
  modified_base 12: mod_base = OTHER; note = 2'-O-methyluridine-3'-phosphate
  modified_base 13: mod_base = OTHER; note = 2'-O-methylcytidine-3'-phosphate
  modified_base 14: mod_base = OTHER; note = 2'-deoxy-2'-fluorouridine-3'-phosphate
  modified_base 15: mod_base = OTHER; note = 2'-O-methyluridine-3'-phosphate
  modified_base 16: mod_base = OTHER; note = 2'-deoxy-2'-fluoroguanosine-3'-phosphate
  modified_base 17: mod_base = OTHER; note = 2'-O-methyluridine-3'-phosphate
  modified_base 18: mod_base = OTHER; note = 2'-deoxy-2'-fluorocytidine-3'-phosphate
  modified_base 19: mod_base = OTHER; note = 2'-O-methylguanosine-3'-phosphate
  modified_base 20: mod_base = OTHER; note = 2'-deoxy-2'-fluoroadenosine-3'-phosphate
  modified_base 21: mod_base = OTHER; note = 2'-O-methyluridine-3'-phosphorothioate
  modified_base 22: mod_base = OTHER; note = 2'-O-methylguanosine-3'-phosphorothioate
  modified_base 23: mod_base = OTHER; note = 2'-O-methyladenosine
tctcaccaatgtcttgtcgatga

SEQ ID NO: 99 - RNA, 23 nt, synthetic construct
  source 1..23: mol_type = other RNA
  modified_base 1: mod_base = OTHER; note = 2'-O-methyluridine-3'-phosphorothioate
  modified_base 2: mod_base = OTHER; note = 2'-deoxy-2'-fluoroadenosine-3'-phosphorothioate
  modified_base 3: mod_base = OTHER; note = 2'-O-methyluridine-3'-phosphate
  modified_base 4: mod_base = OTHER; note = 2'-deoxy-2'-fluorocytidine-3'-phosphate
  modified_base 5: mod_base = OTHER; note = 2'-O-methyluridine-3'-phosphate
  modified_base 6: mod_base = OTHER; note = 2'-deoxy-2'-fluorouridine-3'-phosphate
  modified_base 7: mod_base = OTHER; note = 2'-O-methylguanosine-3'-phosphate
  modified_base 8: mod_base = OTHER; note = 2'-deoxy-2'-fluoroadenosine-3'-phosphate
  modified_base 9: mod_base = OTHER; note = 2'-O-methyladenosine-3'-phosphate
  modified_base 10: mod_base = OTHER; note = 2'-deoxy-2'-fluorocytidine-3'-phosphate
  modified_base 11: mod_base = OTHER; note = 2'-O-methyladenosine-3'-phosphate
  modified_base 12: mod_base = OTHER; note = 2'-O-methylcytidine-3'-phosphate
  modified_base 13: mod_base = OTHER; note = 2'-O-methylcytidine-3'-phosphate
  modified_base 14: mod_base = OTHER; note = 2'-deoxy-2'-fluorouridine-3'-phosphate
  modified_base 15: mod_base = OTHER; note = 2'-O-methyluridine-3'-phosphate
  modified_base 16: mod_base = OTHER; note = 2'-deoxy-2'-fluorouridine-3'-phosphate
  modified_base 17: mod_base = OTHER; note = 2'-O-methylcytidine-3'-phosphate
  modified_base 18: mod_base = OTHER; note = 2'-deoxy-2'-fluorouridine-3'-phosphate
  modified_base 19: mod_base = OTHER; note = 2'-O-methylcytidine-3'-phosphate
  modified_base 20: mod_base = OTHER; note = 2'-deoxy-2'-fluorocytidine-3'-phosphate
  modified_base 21: mod_base = OTHER; note = 2'-O-methylcytidine-3'-phosphorothioate
  modified_base 22: mod_base = OTHER; note = 2'-O-methylcytidine-3'-phosphorothioate
  modified_base 23: mod_base = OTHER; note = 2'-O-methylcytidine
tatcttgaacacctttctccccc

SEQ ID NO: 100 - RNA, 23 nt, synthetic construct
  source 1..23: mol_type = other RNA
  modified_base 1: mod_base = OTHER; note = 2'-O-methyluridine-3'-phosphorothioate
  modified_base 2: mod_base = OTHER; note = 2'-deoxy-2'-fluorocytidine-3'-phosphorothioate
  modified_base 3: mod_base = OTHER; note = 2'-O-methyluridine-3'-phosphate
  modified_base 4: mod_base = OTHER; note = 2'-deoxy-2'-fluoroadenosine-3'-phosphate
  modified_base 5: mod_base = OTHER; note = 2'-O-methylguanosine-3'-phosphate
  modified_base 6: mod_base = OTHER; note = 2'-deoxy-2'-fluoroguanosine-3'-phosphate
  modified_base 7: mod_base = OTHER; note = 2'-O-methyladenosine-3'-phosphate
  modified_base 8: mod_base = OTHER; note = 2'-deoxy-2'-fluorocytidine-3'-phosphate
  modified_base 9: mod_base = OTHER; note = 2'-O-methyladenosine-3'-phosphate
  modified_base 10: mod_base = OTHER; note = 2'-deoxy-2'-fluorocytidine-3'-phosphate
  modified_base 11: mod_base = OTHER; note = 2'-O-methylcytidine-3'-phosphate
  modified_base 12: mod_base = OTHER; note = 2'-O-methylcytidine-3'-phosphate
  modified_base 13: mod_base = OTHER; note = 2'-O-methyladenosine-3'-phosphate
  modified_base 14: mod_base = OTHER; note = 2'-deoxy-2'-fluorouridine-3'-phosphate
  modified_base 15: mod_base = OTHER; note = 2'-O-methyluridine-3'-phosphate
  modified_base 16: mod_base = OTHER; note = 2'-deoxy-2'-fluoroguanosine-3'-phosphate
  modified_base 17: mod_base = OTHER; note = 2'-O-methyladenosine-3'-phosphate
  modified_base 18: mod_base = OTHER; note = 2'-deoxy-2'-fluoroadenosine-3'-phosphate
  modified_base 19: mod_base = OTHER; note = 2'-O-methyladenosine-3'-phosphate
  modified_base 20: mod_base = OTHER; note = 2'-deoxy-2'-fluoroadenosine-3'-phosphate
  modified_base 21: mod_base = OTHER; note = 2'-O-methylguanosine-3'-phosphorothioate
  modified_base 22: mod_base = OTHER; note = 2'-O-methyluridine-3'-phosphorothioate
  modified_base 23: mod_base = OTHER; note = 2'-O-methylcytidine
tctaggacacccattgaaaagtc

SEQ ID NO: 101 - RNA, 23 nt, synthetic construct
  source 1..23: mol_type = other RNA
  modified_base 1: mod_base = OTHER; note = 2'-O-methyluridine-3'-phosphorothioate
  modified_base 2: mod_base = OTHER; note = 2'-deoxy-2'-fluoroguanosine-3'-phosphorothioate
  modified_base 3: mod_base = OTHER; note = 2'-O-methyluridine-3'-phosphate
  modified_base 4: mod_base = OTHER; note = 2'-deoxy-2'-fluorouridine-3'-phosphate
  modified_base 5: mod_base = OTHER; note = 2'-O-methylcytidine-3'-phosphate
  modified_base 6: mod_base = OTHER; note = 2'-deoxy-2'-fluorocytidine-3'-phosphate
  modified_base 7: mod_base = OTHER; note = 2'-O-methyluridine-3'-phosphate
  modified_base 8: mod_base = OTHER; note = 2'-deoxy-2'-fluoroadenosine-3'-phosphate
  modified_base 9: mod_base = OTHER; note = 2'-O-methylguanosine-3'-phosphate
  modified_base 10: mod_base = OTHER; note = 2'-deoxy-2'-fluoroguanosine-3'-phosphate
  modified_base 11: mod_base = OTHER; note = 2'-O-methyladenosine-3'-phosphate
  modified_base 12: mod_base = OTHER; note = 2'-O-methylcytidine-3'-phosphate
  modified_base 13: mod_base = OTHER; note = 2'-O-methyladenosine-3'-phosphate
  modified_base 14: mod_base = OTHER; note = 2'-deoxy-2'-fluorocytidine-3'-phosphate
  modified_base 15: mod_base = OTHER; note = 2'-O-methylcytidine-3'-phosphate
  modified_base 16: mod_base = OTHER; note = 2'-deoxy-2'-fluorocytidine-3'-phosphate
  modified_base 17: mod_base = OTHER; note = 2'-O-methyladenosine-3'-phosphate
  modified_base 18: mod_base = OTHER; note = 2'-deoxy-2'-fluorouridine-3'-phosphate
  modified_base 19: mod_base = OTHER; note = 2'-O-methyluridine-3'-phosphate
  modified_base 20: mod_base = OTHER; note = 2'-deoxy-2'-fluoroguanosine-3'-phosphate
  modified_base 21: mod_base = OTHER; note = 2'-O-methyladenosine-3'-phosphorothioate
  modified_base 22: mod_base = OTHER; note = 2'-O-methyladenosine-3'-phosphorothioate
  modified_base 23: mod_base = OTHER; note = 2'-O-methyladenosine
tgttcctaggacacccattgaaa

SEQ ID NO: 102 - RNA, 23 nt, synthetic construct
  source 1..23: mol_type = other RNA
  modified_base 1: mod_base = OTHER; note = 2'-O-methyluridine-3'-phosphorothioate
  modified_base 2: mod_base = OTHER; note = 2'-deoxy-2'-fluoroguanosine-3'-phosphorothioate
  modified_base 3: mod_base = OTHER; note = 2'-O-methyladenosine-3'-phosphate
  modified_base 4: mod_base = OTHER; note = 2'-deoxy-2'-fluorocytidine-3'-phosphate
  modified_base 5: mod_base = OTHER; note = 2'-O-methyladenosine-3'-phosphate
  modified_base 6: mod_base = OTHER; note = 2'-deoxy-2'-fluorocytidine-3'-phosphate
  modified_base 7: mod_base = OTHER; note = 2'-O-methylcytidine-3'-phosphate
  modified_base 8: mod_base = OTHER; note = 2'-deoxy-2'-fluorocytidine-3'-phosphate
  modified_base 9: mod_base = OTHER; note = 2'-O-methyladenosine-3'-phosphate
  modified_base 10: mod_base = OTHER; note = 2'-deoxy-2'-fluorouridine-3'-phosphate
  modified_base 11: mod_base = OTHER; note = 2'-O-methyluridine-3'-phosphate
  modified_base 12: mod_base = OTHER; note = 2'-O-methylguanosine-3'-phosphate
  modified_base 13: mod_base = OTHER; note = 2'-O-methyladenosine-3'-phosphate
  modified_base 14: mod_base = OTHER; note = 2'-deoxy-2'-fluoroadenosine-3'-phosphate
  modified_base 15: mod_base = OTHER; note = 2'-O-methyladenosine-3'-phosphate
  modified_base 16: mod_base = OTHER; note = 2'-deoxy-2'-fluoroadenosine-3'-phosphate
  modified_base 17: mod_base = OTHER; note = 2'-O-methylguanosine-3'-phosphate
  modified_base 18: mod_base = OTHER; note = 2'-deoxy-2'-fluorouridine-3'-phosphate
  modified_base 19: mod_base = OTHER; note = 2'-O-methylcytidine-3'-phosphate
  modified_base 20: mod_base = OTHER; note = 2'-deoxy-2'-fluoroadenosine-3'-phosphate
  modified_base 21: mod_base = OTHER; note = 2'-O-methyladenosine-3'-phosphorothioate
  modified_base 22: mod_base = OTHER; note = 2'-O-methyladenosine-3'-phosphorothioate
  modified_base 23: mod_base = OTHER; note = 2'-O-methyladenosine
tgacacccattgaaaagtcaaaa

SEQ ID NO: 103 - RNA, 23 nt, synthetic construct
  source 1..23: mol_type = other RNA
  modified_base 1: mod_base = OTHER; note = 2'-O-methyluridine-3'-phosphorothioate
  modified_base 2: mod_base = OTHER; note = 2'-deoxy-2'-fluoroadenosine-3'-phosphorothioate
  modified_base 3: mod_base = OTHER; note = 2'-O-methyladenosine-3'-phosphate
  modified_base 4: mod_base = OTHER; note = 2'-deoxy-2'-fluorouridine-3'-phosphate
  modified_base 5: mod_base = OTHER; note = 2'-O-methylguanosine-3'-phosphate
  modified_base 6: mod_base = OTHER; note = 2'-deoxy-2'-fluorouridine-3'-phosphate
  modified_base 7: mod_base = OTHER; note = 2'-O-methylcytidine-3'-phosphate
  modified_base 8: mod_base = OTHER; note = 2'-deoxy-2'-fluorouridine-3'-phosphate
  modified_base 9: mod_base = OTHER; note = 2'-O-methyluridine-3'-phosphate
  modified_base 10: mod_base = OTHER; note = 2'-deoxy-2'-fluoroguanosine-3'-phosphate
  modified_base 11: mod_base = OTHER; note = 2'-O-methyluridine-3'-phosphate
  modified_base 12: mod_base = OTHER; note = 2'-O-methylcytidine-3'-phosphate
  modified_base 13: mod_base = OTHER; note = 2'-O-methylguanosine-3'-phosphate
  modified_base 14: mod_base = OTHER; note = 2'-deoxy-2'-fluoroadenosine-3'-phosphate
  modified_base 15: mod_base = OTHER; note = 2'-O-methyluridine-3'-phosphate
  modified_base 16: mod_base = OTHER; note = 2'-deoxy-2'-fluoroguanosine-3'-phosphate
  modified_base 17: mod_base = OTHER; note = 2'-O-methyladenosine-3'-phosphate
  modified_base 18: mod_base = OTHER; note = 2'-deoxy-2'-fluorocytidine-3'-phosphate
  modified_base 19: mod_base = OTHER; note = 2'-O-methyluridine-3'-phosphate
  modified_base 20: mod_base = OTHER; note = 2'-deoxy-2'-fluorouridine-3'-phosphate
  modified_base 21: mod_base = OTHER; note = 2'-O-methyluridine-3'-phosphorothioate
  modified_base 22: mod_base = OTHER; note = 2'-O-methylcytidine-3'-phosphorothioate
  modified_base 23: mod_base = OTHER; note = 2'-O-methyladenosine
taatgtcttgtcgatgactttca

SEQ ID NO: 104 - RNA, 23 nt, synthetic construct
  source 1..23: mol_type = other RNA
  modified_base 1: mod_base = OTHER; note = 2'-O-methyluridine-3'-phosphorothioate
  modified_base 2: mod_base = OTHER; note = 2'-deoxy-2'-fluorouridine-3'-phosphorothioate
  modified_base 3: mod_base = OTHER; note = 2'-O-methylguanosine-3'-phosphate
  modified_base 4: mod_base = OTHER; note = 2'-deoxy-2'-fluoroadenosine-3'-phosphate
  modified_base 5: mod_base = OTHER; note = 2'-O-methyladenosine-3'-phosphate
  modified_base 6: mod_base = OTHER; note = 2'-deoxy-2'-fluorocytidine-3'-phosphate
  modified_base 7: mod_base = OTHER; note = 2'-O-methyladenosine-3'-phosphate
  modified_base 8: mod_base = OTHER; note = 2'-deoxy-2'-fluorocytidine-3'-phosphate
  modified_base 9: mod_base = OTHER; note = 2'-O-methylcytidine-3'-phosphate
  modified_base 10: mod_base = OTHER; note = 2'-deoxy-2'-fluorouridine-3'-phosphate
  modified_base 11: mod_base = OTHER; note = 2'-O-methyluridine-3'-phosphate
  modified_base 12: mod_base = OTHER; note = 2'-O-methyluridine-3'-phosphate
  modified_base 13: mod_base = OTHER; note = 2'-O-methylcytidine-3'-phosphate
  modified_base 14: mod_base = OTHER; note = 2'-deoxy-2'-fluorouridine-3'-phosphate
  modified_base 15: mod_base = OTHER; note = 2'-O-methylcytidine-3'-phosphate
  modified_base 16: mod_base = OTHER; note = 2'-deoxy-2'-fluorocytidine-3'-phosphate
  modified_base 17: mod_base = OTHER; note = 2'-O-methylcytidine-3'-phosphate
  modified_base 18: mod_base = OTHER; note = 2'-deoxy-2'-fluorocytidine-3'-phosphate
  modified_base 19: mod_base = OTHER; note = 2'-O-methylcytidine-3'-phosphate
  modified_base 20: mod_base = OTHER; note = 2'-deoxy-2'-fluorouridine-3'-phosphate
  modified_base 21: mod_base = OTHER; note = 2'-O-methylguanosine-3'-phosphorothioate
  modified_base 22: mod_base = OTHER; note = 2'-O-methylguanosine-3'-phosphorothioate
  modified_base 23: mod_base = OTHER; note = 2'-O-methyladenosine
ttgaacacctttctccccctgga

SEQ ID NO: 105 - RNA, 23 nt, synthetic construct
  source 1..23: mol_type = other RNA
  modified_base 1: mod_base = OTHER; note = 2'-O-methyladenosine-3'-phosphorothioate
  modified_base 2: mod_base = OTHER; note = 2'-deoxy-2'-fluoroadenosine-3'-phosphorothioate
  modified_base 3: mod_base = OTHER; note = 2'-O-methylguanosine-3'-phosphate
  modified_base 4: mod_base = OTHER; note = 2'-deoxy-2'-fluoroguanosine-3'-phosphate
  modified_base 5: mod_base = OTHER; note = 2'-O-methyladenosine-3'-phosphate
  modified_base 6: mod_base = OTHER; note = 2'-deoxy-2'-fluorouridine-3'-phosphate
  modified_base 7: mod_base = OTHER; note = 2'-O-methyluridine-3'-phosphate
  modified_base 8: mod_base = OTHER; note = 2'-deoxy-2'-fluorouridine-3'-phosphate
  modified_base 9: mod_base = OTHER; note = 2'-O-methyluridine-3'-phosphate
  modified_base 10: mod_base = OTHER; note = 2'-deoxy-2'-fluorouridine-3'-phosphate
  modified_base 11: mod_base = OTHER; note = 2'-O-methylcytidine-3'-phosphate
  modified_base 12: mod_base = OTHER; note = 2'-O-methylcytidine-3'-phosphate
  modified_base 13: mod_base = OTHER; note = 2'-O-methyluridine-3'-phosphate
  modified_base 14: mod_base = OTHER; note = 2'-deoxy-2'-fluorocytidine-3'-phosphate
  modified_base 15: mod_base = OTHER; note = 2'-O-methyladenosine-3'-phosphate
  modified_base 16: mod_base = OTHER; note = 2'-deoxy-2'-fluorocytidine-3'-phosphate
  modified_base 17: mod_base = OTHER; note = 2'-O-methylcytidine-3'-phosphate
  modified_base 18: mod_base = OTHER; note = 2'-deoxy-2'-fluoroadenosine-3'-phosphate
  modified_base 19: mod_base = OTHER; note = 2'-O-methyladenosine-3'-phosphate
  modified_base 20: mod_base = OTHER; note = 2'-deoxy-2'-fluorouridine-3'-phosphate
  modified_base 21: mod_base = OTHER; note = 2'-O-methylguanosine-3'-phosphorothioate
  modified_base 22: mod_base = OTHER; note = 2'-O-methyluridine-3'-phosphorothioate
  modified_base 23: mod_base = OTHER; note = 2'-O-methylcytidine
aaggatttttcctcaccaatgtc

SEQ ID NO: 106 - RNA, 23 nt, synthetic construct
  source 1..23: mol_type = other RNA
  modified_base 1: mod_base = OTHER; note = 2'-O-methyladenosine-3'-phosphorothioate
  modified_base 2: mod_base = OTHER; note = 2'-deoxy-2'-fluoroguanosine-3'-phosphorothioate
  modified_base 3: mod_base = OTHER; note = 2'-O-methylguanosine-3'-phosphate
  modified_base 4: mod_base = OTHER; note = 2'-deoxy-2'-fluoroadenosine-3'-phosphate
  modified_base 5: mod_base = OTHER; note = 2'-O-methyluridine-3'-phosphate
  modified_base 6: mod_base = OTHER; note = 2'-deoxy-2'-fluorouridine-3'-phosphate
  modified_base 7: mod_base = OTHER; note = 2'-O-methyluridine-3'-phosphate
  modified_base 8: mod_base = OTHER; note = 2'-deoxy-2'-fluorouridine-3'-phosphate
  modified_base 9: mod_base = OTHER; note = 2'-O-methyluridine-3'-phosphate
  modified_base 10: mod_base = OTHER; note = 2'-deoxy-2'-fluorocytidine-3'-phosphate
  modified_base 11: mod_base = OTHER; note = 2'-O-methylcytidine-3'-phosphate
  modified_base 12: mod_base = OTHER; note = 2'-O-methyluridine-3'-phosphate
  modified_base 13: mod_base = OTHER; note = 2'-O-methylcytidine-3'-phosphate
  modified_base 14: mod_base = OTHER; note = 2'-deoxy-2'-fluoroadenosine-3'-phosphate
  modified_base 15: mod_base = OTHER; note = 2'-O-methylcytidine-3'-phosphate
  modified_base 16: mod_base = OTHER; note = 2'-deoxy-2'-fluorocytidine-3'-phosphate
  modified_base 17: mod_base = OTHER; note = 2'-O-methyladenosine-3'-phosphate
  modified_base 18: mod_base = OTHER; note = 2'-deoxy-2'-fluoroadenosine-3'-phosphate
  modified_base 19: mod_base = OTHER; note = 2'-O-methyluridine-3'-phosphate
  modified_base 20: mod_base = OTHER; note = 2'-deoxy-2'-fluoroguanosine-3'-phosphate
  modified_base 21: mod_base = OTHER; note = 2'-O-methyluridine-3'-phosphorothioate
  modified_base 22: mod_base = OTHER; note = 2'-O-methylcytidine-3'-phosphorothioate
  modified_base 23: mod_base = OTHER; note = 2'-O-methyluridine
aggatttttcctcaccaatgtct

SEQ ID NO: 107 - RNA, 23 nt, synthetic construct
  source 1..23: mol_type = other RNA
  modified_base 1: mod_base = OTHER; note = 2'-O-methyluridine-3'-phosphorothioate
  modified_base 2: mod_base = OTHER; note = 2'-deoxy-2'-fluorouridine-3'-phosphorothioate
  modified_base 3: mod_base = OTHER; note = 2'-O-methyluridine-3'-phosphate
  modified_base 4: mod_base = OTHER; note = 2'-deoxy-2'-fluoroguanosine-3'-phosphate
  modified_base 5: mod_base = OTHER; note = 2'-O-methyladenosine-3'-phosphate
  modified_base 6: mod_base = OTHER; note = 2'-deoxy-2'-fluoroadenosine-3'-phosphate
  modified_base 7: mod_base = OTHER; note = 2'-O-methylcytidine-3'-phosphate
  modified_base 8: mod_base = OTHER; note = 2'-deoxy-2'-fluoroadenosine-3'-phosphate
  modified_base 9: mod_base = OTHER; note = 2'-O-methylcytidine-3'-phosphate
  modified_base 10: mod_base = OTHER; note = 2'-deoxy-2'-fluorocytidine-3'-phosphate
  modified_base 11: mod_base = OTHER; note = 2'-O-methyluridine-3'-phosphate
  modified_base 12: mod_base = OTHER; note = 2'-O-methyluridine-3'-phosphate
  modified_base 13: mod_base = OTHER; note = 2'-O-methyluridine-3'-phosphate
  modified_base 14: mod_base = OTHER; note = 2'-deoxy-2'-fluorocytidine-3'-phosphate
  modified_base 15: mod_base = OTHER; note = 2'-O-methyluridine-3'-phosphate
  modified_base 16: mod_base = OTHER; note = 2'-deoxy-2'-fluorocytidine-3'-phosphate
  modified_base 17: mod_base = OTHER; note = 2'-O-methylcytidine-3'-phosphate
  modified_base 18: mod_base = OTHER; note = 2'-deoxy-2'-fluorocytidine-3'-phosphate
  modified_base 19: mod_base = OTHER; note = 2'-O-methylcytidine-3'-phosphate
  modified_base 20: mod_base = OTHER; note = 2'-deoxy-2'-fluorocytidine-3'-phosphate
  modified_base 21: mod_base = OTHER; note = 2'-O-methyluridine-3'-phosphorothioate
  modified_base 22: mod_base = OTHER; note = 2'-O-methylguanosine-3'-phosphorothioate
  modified_base 23: mod_base = OTHER; note = 2'-O-methylguanosine
tttgaacacctttctccccctgg

SEQ ID NO: 108 - RNA, 23 nt, synthetic construct
  source 1..23: mol_type = other RNA
  modified_base 1: mod_base = OTHER; note = 2'-O-methyladenosine-3'-phosphorothioate
  modified_base 2: mod_base = OTHER; note = 2'-deoxy-2'-fluoroadenosine-3'-phosphorothioate
  modified_base 3: mod_base = OTHER; note = 2'-O-methyladenosine-3'-phosphate
  modified_base 4: mod_base = OTHER; note = 2'-deoxy-2'-fluoroadenosine-3'-phosphate
  modified_base 5: mod_base = OTHER; note = 2'-O-methyluridine-3'-phosphate
  modified_base 6: mod_base = OTHER; note = 2'-deoxy-2'-fluorocytidine-3'-phosphate
  modified_base 7: mod_base = OTHER; note = 2'-O-methyladenosine-3'-phosphate
  modified_base 8: mod_base = OTHER; note = 2'-deoxy-2'-fluorocytidine-3'-phosphate
  modified_base 9: mod_base = OTHER; note = 2'-O-methyladenosine-3'-phosphate
  modified_base 10: mod_base = OTHER; note = 2'-deoxy-2'-fluoroadenosine-3'-phosphate
  modified_base 11: mod_base = OTHER; note = 2'-O-methyladenosine-3'-phosphate
  modified_base 12: mod_base = OTHER; note = 2'-O-methyluridine-3'-phosphate
  modified_base 13: mod_base = OTHER; note = 2'-O-methyluridine-3'-phosphate
  modified_base 14: mod_base = OTHER; note = 2'-deoxy-2'-fluoroadenosine-3'-phosphate
  modified_base 15: mod_base = OTHER; note = 2'-O-methylcytidine-3'-phosphate
  modified_base 16: mod_base = OTHER; note = 2'-deoxy-2'-fluorocytidine-3'-phosphate
  modified_base 17: mod_base = OTHER; note = 2'-O-methyladenosine-3'-phosphate
  modified_base 18: mod_base = OTHER; note = 2'-deoxy-2'-fluorocytidine-3'-phosphate
  modified_base 19: mod_base = OTHER; note = 2'-O-methylcytidine-3'-phosphate
  modified_base 20: mod_base = OTHER; note = 2'-deoxy-2'-fluoroadenosine-3'-phosphate
  modified_base 21: mod_base = OTHER; note = 2'-O-methyluridine-3'-phosphorothioate
  modified_base 22: mod_base = OTHER; note = 2'-O-methylcytidine-3'-phosphorothioate
  modified_base 23: mod_base = OTHER; note = 2'-O-methylcytidine
aaaatcacaaattaccaccatcc

SEQ ID NO: 109 - RNA, 23 nt, synthetic construct
  source 1..23: mol_type = other RNA
  modified_base 1: mod_base = OTHER; note = 2'-O-methyluridine-3'-phosphorothioate
  modified_base 2: mod_base = OTHER; note = 2'-deoxy-2'-fluoroadenosine-3'-phosphorothioate
  modified_base 3: mod_base = OTHER; note = 2'-O-methyluridine-3'-phosphate
  modified_base 4: mod_base = OTHER; note = 2'-deoxy-2'-fluoroadenosine-3'-phosphate
  modified_base 5: mod_base = OTHER; note = 2'-O-methyluridine-3'-phosphate
  modified_base 6: mod_base = OTHER; note = 2'-deoxy-2'-fluorouridine-3'-phosphate
  modified_base 7: mod_base = OTHER; note = 2'-O-methyluridine-3'-phosphate
  modified_base 8: mod_base = OTHER; note = 2'-deoxy-2'-fluorocytidine-3'-phosphate
  modified_base 9: mod_base = OTHER; note = 2'-O-methylcytidine-3'-phosphate
  modified_base 10: mod_base = OTHER; note = 2'-deoxy-2'-fluoroadenosine-3'-phosphate
  modified_base 11: mod_base = OTHER; note = 2'-O-methylguanosine-3'-phosphate
  modified_base 12: mod_base = OTHER; note = 2'-O-methylguanosine-3'-phosphate
  modified_base 13: mod_base = OTHER; note = 2'-O-methyladenosine-3'-phosphate
  modified_base 14: mod_base = OTHER; note = 2'-deoxy-2'-fluorouridine-3'-phosphate
  modified_base 15: mod_base = OTHER; note = 2'-O-methylguanosine-3'-phosphate
  modified_base 16: mod_base = OTHER; note = 2'-deoxy-2'-fluorocytidine-3'-phosphate
  modified_base 17: mod_base = OTHER; note = 2'-O-methyladenosine-3'-phosphate
  modified_base 18: mod_base = OTHER; note = 2'-deoxy-2'-fluoroadenosine-3'-phosphate
  modified_base 19: mod_base = OTHER; note = 2'-O-methylguanosine-3'-phosphate
  modified_base 20: mod_base = OTHER; note = 2'-deoxy-2'-fluorouridine-3'-phosphate
  modified_base 21: mod_base = OTHER; note = 2'-O-methylcytidine-3'-phosphorothioate
  modified_base 22: mod_base = OTHER; note = 2'-O-methylcytidine-3'-phosphorothioate
  modified_base 23: mod_base = OTHER; note = 2'-O-methyladenosine
tatatttccaggatgcaagtcca

SEQ ID NO: 110 - RNA, 23 nt, synthetic construct
  source 1..23: mol_type = other RNA
  modified_base 1: mod_base = OTHER; note = 2'-O-methyladenosine-3'-phosphorothioate
  modified_base 2: mod_base = OTHER; note = 2'-deoxy-2'-fluoroadenosine-3'-phosphorothioate
  modified_base 3: mod_base = OTHER; note = 2'-O-methylguanosine-3'-phosphate
  modified_base 4: mod_base = OTHER; note = 2'-deoxy-2'-fluoroadenosine-3'-phosphate
  modified_base 5: mod_base = OTHER; note = 2'-O-methylcytidine-3'-phosphate
  modified_base 6: mod_base = OTHER; note = 2'-deoxy-2'-fluorouridine-3'-phosphate
  modified_base 7: mod_base = OTHER; note = 2'-O-methyluridine-3'-phosphate
  modified_base 8: mod_base = OTHER; note = 2'-deoxy-2'-fluorocytidine-3'-phosphate
  modified_base 9: mod_base = OTHER; note = 2'-O-methyluridine-3'-phosphate
  modified_base 10: mod_base = OTHER; note = 2'-deoxy-2'-fluoroadenosine-3'-phosphate
  modified_base 11: mod_base = OTHER; note = 2'-O-methylcytidine-3'-phosphate
  modified_base 12: mod_base = OTHER; note = 2'-O-methylcytidine-3'-phosphate
  modified_base 13: mod_base = OTHER; note = 2'-O-methyluridine-3'-phosphate
  modified_base 14: mod_base = OTHER; note = 2'-deoxy-2'-fluorouridine-3'-phosphate
  modified_base 15: mod_base = OTHER; note = 2'-O-methylcytidine-3'-phosphate
  modified_base 16: mod_base = OTHER; note = 2'-deoxy-2'-fluorocytidine-3'-phosphate
  modified_base 17: mod_base = OTHER; note = 2'-O-methylcytidine-3'-phosphate
  modified_base 18: mod_base = OTHER; note = 2'-deoxy-2'-fluorouridine-3'-phosphate
  modified_base 19: mod_base = OTHER; note = 2'-O-methyluridine-3'-phosphate
  modified_base 20: mod_base = OTHER; note = 2'-deoxy-2'-fluorocytidine-3'-phosphate
  modified_base 21: mod_base = OTHER; note = 2'-O-methylcytidine-3'-phosphorothioate
  modified_base 22: mod_base = OTHER; note = 2'-O-methyladenosine-3'-phosphorothioate
  modified_base 23: mod_base = OTHER; note = 2'-O-methylcytidine
aagacttctaccttcccttccac

SEQ ID NO: 111 - RNA, 23 nt, synthetic construct
  source 1..23: mol_type = other RNA
  modified_base 1: mod_base = OTHER; note = 2'-O-methyladenosine-3'-phosphorothioate
  modified_base 2: mod_base = OTHER; note = 2'-deoxy-2'-fluoroguanosine-3'-phosphorothioate
  modified_base 3: mod_base = OTHER; note = 2'-O-methylguanosine-3'-phosphate
  modified_base 4: mod_base = OTHER; note = 2'-deoxy-2'-fluoroadenosine-3'-phosphate
  modified_base 5: mod_base = OTHER; note = 2'-O-methyladenosine-3'-phosphate
  modified_base 6: mod_base = OTHER; note = 2'-deoxy-2'-fluoroadenosine-3'-phosphate
  modified_base 7: mod_base = OTHER; note = 2'-O-methyluridine-3'-phosphate
  modified_base 8: mod_base = OTHER; note = 2'-deoxy-2'-fluorocytidine-3'-phosphate
  modified_base 9: mod_base = OTHER; note = 2'-O-methyluridine-3'-phosphate
  modified_base 10: mod_base = OTHER; note = 2'-deoxy-2'-fluoroadenosine-3'-phosphate
  modified_base 11: mod_base = OTHER; note = 2'-O-methyladenosine-3'-phosphate
  modified_base 12: mod_base = OTHER; note = 2'-O-methyladenosine-3'-phosphate
  modified_base 13: mod_base = OTHER; note = 2'-O-methylcytidine-3'-phosphate
  modified_base 14: mod_base = OTHER; note = 2'-deoxy-2'-fluoroadenosine-3'-phosphate
  modified_base 15: mod_base = OTHER; note = 2'-O-methylguanosine-3'-phosphate
  modified_base 16: mod_base = OTHER; note = 2'-deoxy-2'-fluoroadenosine-3'-phosphate
  modified_base 17: mod_base = OTHER; note = 2'-O-methyladenosine-3'-phosphate
  modified_base 18: mod_base = OTHER; note = 2'-deoxy-2'-fluoroguanosine-3'-phosphate
  modified_base 19: mod_base = OTHER; note = 2'-O-methyladenosine-3'-phosphate
  modified_base 20: mod_base = OTHER; note = 2'-deoxy-2'-fluorocytidine-3'-phosphate
  modified_base 21: mod_base = OTHER; note = 2'-O-methyladenosine-3'-phosphorothioate
  modified_base 22: mod_base = OTHER; note = 2'-O-methylguanosine-3'-phosphorothioate
  modified_base 23: mod_base = OTHER; note = 2'-O-methylguanosine
aggaaatctaaacagaagacagg

SEQ ID NO: 112 - RNA, 23 nt, synthetic construct
  source 1..23: mol_type = other RNA
  modified_base 1: mod_base = OTHER; note = 2'-O-methyladenosine-3'-phosphorothioate
  modified_base 2: mod_base = OTHER; note = 2'-deoxy-2'-fluoroguanosine-3'-phosphorothioate
  modified_base 3: mod_base = OTHER; note = 2'-O-methyladenosine-3'-phosphate
  modified_base 4: mod_base = OTHER; note = 2'-deoxy-2'-fluorouridine-3'-phosphate
  modified_base 5: mod_base = OTHER; note = 2'-O-methylcytidine-3'-phosphate
  modified_base 6: mod_base = OTHER; note = 2'-deoxy-2'-fluorouridine-3'-phosphate
  modified_base 7: mod_base = OTHER; note = 2'-O-methyluridine-3'-phosphate
  modified_base 8: mod_base = OTHER; note = 2'-deoxy-2'-fluoroguanosine-3'-phosphate
  modified_base 9: mod_base = OTHER; note = 2'-O-methylguanosine-3'-phosphate
  modified_base 10: mod_base = OTHER; note = 2'-deoxy-2'-fluoroadenosine-3'-phosphate
  modified_base 11: mod_base = OTHER; note = 2'-O-methyladenosine-3'-phosphate
  modified_base 12: mod_base = OTHER; note = 2'-O-methyladenosine-3'-phosphate
  modified_base 13: mod_base = OTHER; note = 2'-O-methylcytidine-3'-phosphate
  modified_base 14: mod_base = OTHER; note = 2'-deoxy-2'-fluoroadenosine-3'-phosphate
  modified_base 15: mod_base = OTHER; note = 2'-O-methylguanosine-3'-phosphate
  modified_base 16: mod_base = OTHER; note = 2'-deoxy-2'-fluorocytidine-3'-phosphate
  modified_base 17: mod_base = OTHER; note = 2'-O-methylcytidine-3'-phosphate
  modified_base 18: mod_base = OTHER; note = 2'-deoxy-2'-fluoroadenosine-3'-phosphate
  modified_base 19: mod_base = OTHER; note = 2'-O-methyladenosine-3'-phosphate
  modified_base 20: mod_base = OTHER; note = 2'-deoxy-2'-fluoroadenosine-3'-phosphate
  modified_base 21: mod_base = OTHER; note = 2'-O-methylguanosine-3'-phosphorothioate
  modified_base 22: mod_base = OTHER; note = 2'-O-methylguanosine-3'-phosphorothioate
  modified_base 23: mod_base = OTHER; note = 2'-O-methyladenosine
agatcttggaaacagccaaagga

SEQ ID NO: 113 - RNA, 23 nt, synthetic construct
  source 1..23: mol_type = other RNA
  modified_base 1: mod_base = OTHER; note = 2'-O-methyladenosine-3'-phosphorothioate
  modified_base 2: mod_base = OTHER; note = 2'-deoxy-2'-fluorouridine-3'-phosphorothioate
  modified_base 3: mod_base = OTHER; note = 2'-O-methylguanosine-3'-phosphate
  modified_base 4: mod_base = OTHER; note = 2'-deoxy-2'-fluoroadenosine-3'-phosphate
  modified_base 5: mod_base = OTHER; note = 2'-O-methylcytidine-3'-phosphate
  modified_base 6: mod_base = OTHER; note = 2'-deoxy-2'-fluoroguanosine-3'-phosphate
  modified_base 7: mod_base = OTHER; note = 2'-O-methyluridine-3'-phosphate
  modified_base 8: mod_base = OTHER; note = 2'-deoxy-2'-fluorouridine-3'-phosphate
  modified_base 9: mod_base = OTHER; note = 2'-O-methylguanosine-3'-phosphate
  modified_base 10: mod_base = OTHER; note = 2'-deoxy-2'-fluorocytidine-3'-phosphate
  modified_base 11: mod_base = OTHER; note = 2'-O-methylcytidine-3'-phosphate
  modified_base 12: mod_base = OTHER; note = 2'-O-methylcytidine-3'-phosphate
  modified_base 13: mod_base = OTHER; note = 2'-O-methyladenosine-3'-phosphate
  modified_base 14: mod_base = OTHER; note = 2'-deoxy-2'-fluoroadenosine-3'-phosphate
  modified_base 15: mod_base = OTHER; note = 2'-O-methyladenosine-3'-phosphate
  modified_base 16: mod_base = OTHER; note = 2'-deoxy-2'-fluorocytidine-3'-phosphate
  modified_base 17: mod_base = OTHER; note = 2'-O-methyladenosine-3'-phosphate
  modified_base 18: mod_base = OTHER; note = 2'-deoxy-2'-fluorocytidine-3'-phosphate
  modified_base 19: mod_base = OTHER; note = 2'-O-methyladenosine-3'-phosphate
  modified_base 20: mod_base = OTHER; note = 2'-deoxy-2'-fluorouridine-3'-phosphate
  modified_base 21: mod_base = OTHER; note = 2'-O-methyluridine-3'-phosphorothioate
  modified_base 22: mod_base = OTHER; note = 2'-O-methyluridine-3'-phosphorothioate
  modified_base 23: mod_base = OTHER; note = 2'-O-methyluridine
atgacgttgcccaaacacatttt

SEQ ID NO: 114 - RNA, 23 nt, synthetic construct
  source 1..23: mol_type = other RNA
  modified_base 1: mod_base = OTHER; note = 2'-O-methyluridine-3'-phosphorothioate
  modified_base 2: mod_base = OTHER; note = 2'-deoxy-2'-fluoroadenosine-3'-phosphorothioate
  modified_base 3: mod_base = OTHER; note = 2'-O-methyladenosine-3'-phosphate
  modified_base 4: mod_base = OTHER; note = 2'-deoxy-2'-fluoroguanosine-3'-phosphate
  modified_base 5: mod_base = OTHER; note = 2'-O-methylguanosine-3'-phosphate
  modified_base 6: mod_base = OTHER; note = 2'-deoxy-2'-fluoroguanosine-3'-phosphate
  modified_base 7: mod_base = OTHER; note = 2'-O-methylguanosine-3'-phosphate
  modified_base 8: mod_base = OTHER; note = 2'-deoxy-2'-fluorouridine-3'-phosphate
  modified_base 9: mod_base = OTHER; note = 2'-O-methylguanosine-3'-phosphate
  modified_base 10: mod_base = OTHER; note = 2'-deoxy-2'-fluorouridine-3'-phosphate
  modified_base 11: mod_base = OTHER; note = 2'-O-methylcytidine-3'-phosphate
  modified_base 12: mod_base = OTHER; note = 2'-O-methylcytidine-3'-phosphate
  modified_base 13: mod_base = OTHER; note = 2'-O-methyladenosine-3'-phosphate
  modified_base 14: mod_base = OTHER; note = 2'-deoxy-2'-fluorocytidine-3'-phosphate
  modified_base 15: mod_base = OTHER; note = 2'-O-methyladenosine-3'-phosphate
  modified_base 16: mod_base = OTHER; note = 2'-deoxy-2'-fluoroguanosine-3'-phosphate
  modified_base 17: mod_base = OTHER; note = 2'-O-methyluridine-3'-phosphate
  modified_base 18: mod_base = OTHER; note = 2'-deoxy-2'-fluorocytidine-3'-phosphate
  modified_base 19: mod_base = OTHER; note = 2'-O-methyladenosine-3'-phosphate
  modified_base 20: mod_base = OTHER; note = 2'-deoxy-2'-fluorocytidine-3'-phosphate
  modified_base 21: mod_base = OTHER; note = 2'-O-methyladenosine-3'-phosphorothioate
  modified_base 22: mod_base = OTHER; note = 2'-O-methyladenosine-3'-phosphorothioate
  modified_base 23: mod_base = OTHER; note = 2'-O-methyladenosine
taaggggtgtccacagtcacaaa

SEQ ID NO: 115 - RNA, 23 nt, synthetic construct
  source 1..23: mol_type = other RNA
  modified_base 1: mod_base = OTHER; note = 2'-O-methyladenosine-3'-phosphorothioate
  modified_base 2: mod_base = OTHER; note = 2'-deoxy-2'-fluoroadenosine-3'-phosphorothioate
  modified_base 3: mod_base = OTHER; note = 2'-O-methyluridine-3'-phosphate
  modified_base 4: mod_base = OTHER; note = 2'-deoxy-2'-fluoroadenosine-3'-phosphate
  modified_base 5: mod_base = OTHER; note = 2'-O-methylguanosine-3'-phosphate
  modified_base 6: mod_base = OTHER; note = 2'-deoxy-2'-fluorouridine-3'-phosphate
  modified_base 7: mod_base = OTHER; note = 2'-O-methyladenosine-3'-phosphate
  modified_base 8: mod_base = OTHER; note = 2'-deoxy-2'-fluoroguanosine-3'-phosphate
  modified_base 9: mod_base = OTHER; note = 2'-O-methylcytidine-3'-phosphate
  modified_base 10: mod_base = OTHER; note = 2'-deoxy-2'-fluorouridine-3'-phosphate
  modified_base 11: mod_base = OTHER; note = 2'-O-methylguanosine-3'-phosphate
  modified_base 12: mod_base = OTHER; note = 2'-O-methylguanosine-3'-phosphate
  modified_base 13: mod_base = OTHER; note = 2'-O-methylcytidine-3'-phosphate
  modified_base 14: mod_base = OTHER; note = 2'-deoxy-2'-fluoroadenosine-3'-phosphate
  modified_base 15: mod_base = OTHER; note = 2'-O-methylcytidine-3'-phosphate
  modified_base 16: mod_base = OTHER; note = 2'-deoxy-2'-fluorocytidine-3'-phosphate
  modified_base 17: mod_base = OTHER; note = 2'-O-methylcytidine-3'-phosphate
  modified_base 18: mod_base = OTHER; note = 2'-deoxy-2'-fluorocytidine-3'-phosphate
  modified_base 19: mod_base = OTHER; note = 2'-O-methyladenosine-3'-phosphate
  modified_base 20: mod_base = OTHER; note = 2'-deoxy-2'-fluorouridine-3'-phosphate
  modified_base 21: mod_base = OTHER; note = 2'-O-methylcytidine-3'-phosphorothioate
  modified_base 22: mod_base = OTHER; note = 2'-O-methylcytidine-3'-phosphorothioate
  modified_base 23: mod_base = OTHER; note = 2'-O-methyladenosine
aatagtagctggcaccccatcca

SEQ ID NO: 116 - RNA, 23 nt, synthetic construct
  source 1..23: mol_type = other RNA
  modified_base 1: mod_base = OTHER; note = 2'-O-methyladenosine-3'-phosphorothioate
  modified_base 2: mod_base = OTHER; note = 2'-deoxy-2'-fluorocytidine-3'-phosphorothioate
  modified_base 3: mod_base = OTHER; note = 2'-O-methylguanosine-3'-phosphate
  modified_base 4: mod_base = OTHER; note = 2'-deoxy-2'-fluorouridine-3'-phosphate
  modified_base 5: mod_base = OTHER; note = 2'-O-methyluridine-3'-phosphate
  modified_base 6: mod_base = OTHER; note = 2'-deoxy-2'-fluoroguanosine-3'-phosphate
  modified_base 7: mod_base = OTHER; note = 2'-O-methylcytidine-3'-phosphate
  modified_base 8: mod_base = OTHER; note = 2'-deoxy-2'-fluorocytidine-3'-phosphate
  modified_base 9: mod_base = OTHER; note = 2'-O-methylcytidine-3'-phosphate
  modified_base 10: mod_base = OTHER; note = 2'-deoxy-2'-fluoroadenosine-3'-phosphate
  modified_base 11: mod_base = OTHER; note = 2'-O-methyladenosine-3'-phosphate
  modified_base 12: mod_base = OTHER; note = 2'-O-methyladenosine-3'-phosphate
  modified_base 13: mod_base = OTHER; note = 2'-O-methylcytidine-3'-phosphate
  modified_base 14: mod_base = OTHER; note = 2'-deoxy-2'-fluoroadenosine-3'-phosphate
  modified_base 15: mod_base = OTHER; note = 2'-O-methylcytidine-3'-phosphate
  modified_base 16: mod_base = OTHER; note = 2'-deoxy-2'-fluoroadenosine-3'-phosphate
  modified_base 17: mod_base = OTHER; note = 2'-O-methyluridine-3'-phosphate
  modified_base 18: mod_base = OTHER; note = 2'-deoxy-2'-fluorouridine-3'-phosphate
  modified_base 19: mod_base = OTHER; note = 2'-O-methyluridine-3'-phosphate
  modified_base 20: mod_base = OTHER; note = 2'-deoxy-2'-fluorouridine-3'-phosphate
  modified_base 21: mod_base = OTHER; note = 2'-O-methylcytidine-3'-phosphorothioate
  modified_base 22: mod_base = OTHER; note = 2'-O-methyladenosine-3'-phosphorothioate
  modified_base 23: mod_base = OTHER; note = 2'-O-methyladenosine
acgttgcccaaacacattttcaa

SEQ ID NO: 117 - RNA, 23 nt, synthetic construct
  source 1..23: mol_type = other RNA
  modified_base 1: mod_base = OTHER; note = 2'-O-methyluridine-3'-phosphorothioate
  modified_base 2: mod_base = OTHER; note = 2'-deoxy-2'-fluoroguanosine-3'-phosphorothioate
  modified_base 3: mod_base = OTHER; note = 2'-O-methyluridine-3'-phosphate
  modified_base 4: mod_base = OTHER; note = 2'-deoxy-2'-fluorocytidine-3'-phosphate
  modified_base 5: mod_base = OTHER; note = 2'-O-methyladenosine-3'-phosphate
  modified_base 6: mod_base = OTHER; note = 2'-deoxy-2'-fluoroguanosine-3'-phosphate
  modified_base 7: mod_base = OTHER; note = 2'-O-methyladenosine-3'-phosphate
  modified_base 8: mod_base = OTHER; note = 2'-deoxy-2'-fluorouridine-3'-phosphate
  modified_base 9: mod_base = OTHER; note = 2'-O-methylcytidine-3'-phosphate
  modified_base 10: mod_base = OTHER; note = 2'-deoxy-2'-fluorouridine-3'-phosphate
  modified_base 11: mod_base = OTHER; note = 2'-O-methyluridine-3'-phosphate
  modified_base 12: mod_base = OTHER; note = 2'-O-methylguanosine-3'-phosphate
  modified_base 13: mod_base = OTHER; note = 2'-O-methylguanosine-3'-phosphate
  modified_base 14: mod_base = OTHER; note = 2'-deoxy-2'-fluoroadenosine-3'-phosphate
  modified_base 15: mod_base = OTHER; note = 2'-O-methyladenosine-3'-phosphate
  modified_base 16: mod_base = OTHER; note = 2'-deoxy-2'-fluoroadenosine-3'-phosphate
  modified_base 17: mod_base = OTHER; note = 2'-O-methylcytidine-3'-phosphate
  modified_base 18: mod_base = OTHER; note = 2'-deoxy-2'-fluoroadenosine-3'-phosphate
  modified_base 19: mod_base = OTHER; note = 2'-O-methylguanosine-3'-phosphate
  modified_base 20: mod_base = OTHER; note = 2'-deoxy-2'-fluorocytidine-3'-phosphate
  modified_base 21: mod_base = OTHER; note = 2'-O-methylcytidine-3'-phosphorothioate
  modified_base 22: mod_base = OTHER; note = 2'-O-methyladenosine-3'-phosphorothioate
  modified_base 23: mod_base = OTHER; note = 2'-O-methyladenosine
tgtcagatcttggaaacagccaa

SEQ ID NO: 118 - RNA, 23 nt, synthetic construct
  source 1..23: mol_type = other RNA
  modified_base 1: mod_base = OTHER; note = 2'-O-methyladenosine-3'-phosphorothioate
  modified_base 2: mod_base = OTHER; note = 2'-deoxy-2'-fluoroguanosine-3'-phosphorothioate
  modified_base 3: mod_base = OTHER; note = 2'-O-methylguanosine-3'-phosphate
  modified_base 4: mod_base = OTHER; note = 2'-deoxy-2'-fluoroguanosine-3'-phosphate
  modified_base 5: mod_base = OTHER; note = 2'-O-methylguanosine-3'-phosphate
  modified_base 6: mod_base = OTHER; note = 2'-deoxy-2'-fluorouridine-3'-phosphate
  modified_base 7: mod_base = OTHER; note = 2'-O-methylguanosine-3'-phosphate
  modified_base 8: mod_base = OTHER; note = 2'-deoxy-2'-fluoroguanosine-3'-phosphate
  modified_base 9: mod_base = OTHER; note = 2'-O-methylcytidine-3'-phosphate
  modified_base 10: mod_base = OTHER; note = 2'-deoxy-2'-fluorouridine-3'-phosphate
  modified_base 11: mod_base = OTHER; note = 2'-O-methyladenosine-3'-phosphate
  modified_base 12: mod_base = OTHER; note = 2'-O-methyluridine-3'-phosphate
  modified_base 13: mod_base = OTHER; note = 2'-O-methyluridine-3'-phosphate
  modified_base 14: mod_base = OTHER; note = 2'-deoxy-2'-fluorouridine-3'-phosphate
  modified_base 15: mod_base = OTHER; note = 2'-O-methyluridine-3'-phosphate
  modified_base 16: mod_base = OTHER; note = 2'-deoxy-2'-fluoroguanosine-3'-phosphate
  modified_base 17: mod_base = OTHER; note = 2'-O-methyluridine-3'-phosphate
  modified_base 18: mod_base = OTHER; note = 2'-deoxy-2'-fluorouridine-3'-phosphate
  modified_base 19: mod_base = OTHER; note = 2'-O-methylguanosine-3'-phosphate
  modified_base 20: mod_base = OTHER; note = 2'-deoxy-2'-fluoroguanosine-3'-phosphate
  modified_base 21: mod_base = OTHER; note = 2'-O-methyladenosine-3'-phosphorothioate
  modified_base 22: mod_base = OTHER; note = 2'-O-methyladenosine-3'-phosphorothioate
  modified_base 23: mod_base = OTHER; note = 2'-O-methyladenosine
aggggtggctattttgttggaaa

SEQ ID NO: 119 - RNA, 23 nt, synthetic construct
  source 1..23: mol_type = other RNA
  modified_base 1: mod_base = OTHER; note = 2'-O-methyladenosine-3'-phosphorothioate
  modified_base 2: mod_base = OTHER; note = 2'-deoxy-2'-fluoroadenosine-3'-phosphorothioate
  modified_base 3: mod_base = OTHER; note = 2'-O-methylguanosine-3'-phosphate
  modified_base 4: mod_base = OTHER; note = 2'-deoxy-2'-fluoroguanosine-3'-phosphate
  modified_base 5: mod_base = OTHER; note = 2'-O-methyladenosine-3'-phosphate
  modified_base 6: mod_base = OTHER; note = 2'-deoxy-2'-fluoroadenosine-3'-phosphate
  modified_base 7: mod_base = OTHER; note = 2'-O-methyladenosine-3'-phosphate
  modified_base 8: mod_base = OTHER; note = 2'-deoxy-2'-fluorouridine-3'-phosphate
  modified_base 9: mod_base = OTHER; note = 2'-O-methylcytidine-3'-phosphate
  modified_base 10: mod_base = OTHER; note = 2'-deoxy-2'-fluorouridine-3'-phosphate
  modified_base 11: mod_base = OTHER; note = 2'-O-methyladenosine-3'-phosphate
  modified_base 12: mod_base = OTHER; note = 2'-O-methyladenosine-3'-phosphate
  modified_base 13: mod_base = OTHER; note = 2'-O-methyladenosine-3'-phosphate
  modified_base 14: mod_base = OTHER; note = 2'-deoxy-2'-fluorocytidine-3'-phosphate
  modified_base 15: mod_base = OTHER; note = 2'-O-methyladenosine-3'-phosphate
  modified_base 16: mod_base = OTHER; note = 2'-deoxy-2'-fluoroguanosine-3'-phosphate
  modified_base 17: mod_base = OTHER; note = 2'-O-methyladenosine-3'-phosphate
  modified_base 18: mod_base = OTHER; note = 2'-deoxy-2'-fluoroadenosine-3'-phosphate
  modified_base 19: mod_base = OTHER; note = 2'-O-methylguanosine-3'-phosphate
  modified_base 20: mod_base = OTHER; note = 2'-deoxy-2'-fluoroadenosine-3'-phosphate
  modified_base 21: mod_base = OTHER; note = 2'-O-methylcytidine-3'-phosphorothioate
  modified_base 22: mod_base = OTHER; note = 2'-O-methyladenosine-3'-phosphorothioate
  modified_base 23: mod_base = OTHER; note = 2'-O-methylguanosine
aaggaaatctaaacagaagacag

SEQ ID NO: 120 - RNA, 23 nt, synthetic construct
  source 1..23: mol_type = other RNA
  modified_base 1: mod_base = OTHER; note = 2'-O-methyladenosine-3'-phosphorothioate
  modified_base 2: mod_base = OTHER; note = 2'-deoxy-2'-fluoroguanosine-3'-phosphorothioate
  modified_base 3: mod_base = OTHER; note = 2'-O-methyladenosine-3'-phosphate
  modified_base 4: mod_base = OTHER; note = 2'-deoxy-2'-fluorocytidine-3'-phosphate
  modified_base 5: mod_base = OTHER; note = 2'-O-methyluridine-3'-phosphate
  modified_base 6: mod_base = OTHER; note = 2'-deoxy-2'-fluorouridine-3'-phosphate
  modified_base 7: mod_base = OTHER; note = 2'-O-methylcytidine-3'-phosphate
  modified_base 8: mod_base = OTHER; note = 2'-deoxy-2'-fluorouridine-3'-phosphate
  modified_base 9: mod_base = OTHER; note = 2'-O-methyladenosine-3'-phosphate
  modified_base 10: mod_base = OTHER; note = 2'-deoxy-2'-fluorocytidine-3'-phosphate
  modified_base 11: mod_base = OTHER; note = 2'-O-methylcytidine-3'-phosphate
  modified_base 12: mod_base = OTHER; note = 2'-O-methyluridine-3'-phosphate
  modified_base 13: mod_base = OTHER; note = 2'-O-methyluridine-3'-phosphate
  modified_base 14: mod_base = OTHER; note = 2'-deoxy-2'-fluorocytidine-3'-phosphate
  modified_base 15: mod_base = OTHER; note = 2'-O-methylcytidine-3'-phosphate
  modified_base 16: mod_base = OTHER; note = 2'-deoxy-2'-fluorocytidine-3'-phosphate
  modified_base 17: mod_base = OTHER; note = 2'-O-methyluridine-3'-phosphate
  modified_base 18: mod_base = OTHER; note = 2'-deoxy-2'-fluorouridine-3'-phosphate
  modified_base 19: mod_base = OTHER; note = 2'-O-methylcytidine-3'-phosphate
  modified_base 20: mod_base = OTHER; note = 2'-deoxy-2'-fluorocytidine-3'-phosphate
  modified_base 21: mod_base = OTHER; note = 2'-O-methyladenosine-3'-phosphorothioate
  modified_base 22: mod_base = OTHER; note = 2'-O-methylcytidine-3'-phosphorothioate
  modified_base 23: mod_base = OTHER; note = 2'-O-methyladenosine
agacttctaccttcccttccaca

SEQ ID NO: 121 - RNA, 23 nt, synthetic construct
  source 1..23: mol_type = other RNA
  modified_base 1: mod_base = OTHER; note = 2'-O-methyladenosine-3'-phosphorothioate
  modified_base 2: mod_base = OTHER; note = 2'-deoxy-2'-fluorouridine-3'-phosphorothioate
  modified_base 3: mod_base = OTHER; note = 2'-O-methylcytidine-3'-phosphate
  modified_base 4: mod_base = OTHER; note = 2'-deoxy-2'-fluorouridine-3'-phosphate
  modified_base 5: mod_base = OTHER; note = 2'-O-methyluridine-3'-phosphate
  modified_base 6: mod_base = OTHER; note = 2'-deoxy-2'-fluoroguanosine-3'-phosphate
  modified_base 7: mod_base = OTHER; note = 2'-O-methylguanosine-3'-phosphate
  modified_base 8: mod_base = OTHER; note = 2'-deoxy-2'-fluoroadenosine-3'-phosphate
  modified_base 9: mod_base = OTHER; note = 2'-O-methyladenosine-3'-phosphate
  modified_base 10: mod_base = OTHER; note = 2'-deoxy-2'-fluoroadenosine-3'-phosphate
  modified_base 11: mod_base = OTHER; note = 2'-O-methylcytidine-3'-phosphate
  modified_base 12: mod_base = OTHER; note = 2'-O-methyladenosine-3'-phosphate
  modified_base 13: mod_base = OTHER; note = 2'-O-methylguanosine-3'-phosphate
  modified_base 14: mod_base = OTHER; note = 2'-deoxy-2'-fluorocytidine-3'-phosphate
  modified_base 15: mod_base = OTHER; note = 2'-O-methylcytidine-3'-phosphate
  modified_base 16: mod_base = OTHER; note = 2'-deoxy-2'-fluoroadenosine-3'-phosphate
  modified_base 17: mod_base = OTHER; note = 2'-O-methyladenosine-3'-phosphate
  modified_base 18: mod_base = OTHER; note = 2'-deoxy-2'-fluoroadenosine-3'-phosphate
  modified_base 19: mod_base = OTHER; note = 2'-O-methylguanosine-3'-phosphate
  modified_base 20: mod_base = OTHER; note = 2'-deoxy-2'-fluoroguanosine-3'-phosphate
  modified_base 21: mod_base = OTHER; note = 2'-O-methyladenosine-3'-phosphorothioate
  modified_base 22: mod_base = OTHER; note = 2'-O-methyluridine-3'-phosphorothioate
  modified_base 23: mod_base = OTHER; note = 2'-O-methyluridine
atcttggaaacagccaaaggatt

SEQ ID NO: 122 - RNA, 23 nt, synthetic construct
  source 1..23: mol_type = other RNA
  modified_base 1: mod_base = OTHER; note = 2'-O-methyluridine-3'-phosphorothioate
  modified_base 2: mod_base = OTHER; note = 2'-deoxy-2'-fluoroadenosine-3'-phosphorothioate
  modified_base 3: mod_base = OTHER; note = 2'-O-methyluridine-3'-phosphate
  modified_base 4: mod_base = OTHER; note = 2'-deoxy-2'-fluorocytidine-3'-phosphate
  modified_base 5: mod_base = OTHER; note = 2'-O-methyladenosine-3'-phosphate
  modified_base 6: mod_base = OTHER; note = 2'-deoxy-2'-fluorouridine-3'-phosphate
  modified_base 7: mod_base = OTHER; note = 2'-O-methylcytidine-3'-phosphate
  modified_base 8: mod_base = OTHER; note = 2'-deoxy-2'-fluorocytidine-3'-phosphate
  modified_base 9: mod_base = OTHER; note = 2'-O-methylcytidine-3'-phosphate
  modified_base 10: mod_base = OTHER; note = 2'-deoxy-2'-fluoroadenosine-3'-phosphate
  modified_base 11: mod_base = OTHER; note = 2'-O-methylguanosine-3'-phosphate
  modified_base 12: mod_base = OTHER; note = 2'-O-methylcytidine-3'-phosphate
  modified_base 13: mod_base = OTHER; note = 2'-O-methyluridine-3'-phosphate
  modified_base 14: mod_base = OTHER; note = 2'-deoxy-2'-fluoroguanosine-3'-phosphate
  modified_base 15: mod_base = OTHER; note = 2'-O-methyladenosine-3'-phosphate
  modified_base 16: mod_base = OTHER; note = 2'-deoxy-2'-fluoroguanosine-3'-phosphate
  modified_base 17: mod_base = OTHER; note = 2'-O-methyladenosine-3'-phosphate
  modified_base 18: mod_base = OTHER; note = 2'-deoxy-2'-fluoroguanosine-3'-phosphate
  modified_base 19: mod_base = OTHER; note = 2'-O-methyladenosine-3'-phosphate
  modified_base 20: mod_base = OTHER; note = 2'-deoxy-2'-fluorouridine-3'-phosphate
  modified_base 21: mod_base = OTHER; note = 2'-O-methylguanosine-3'-phosphorothioate
  modified_base 22: mod_base = OTHER; note = 2'-O-methylguanosine-3'-phosphorothioate
  modified_base 23: mod_base = OTHER; note = 2'-O-methylguanosine
tatcatcccagctgagagatggg

SEQ ID NO: 123 - RNA, 23 nt, synthetic construct
  source 1..23: mol_type = other RNA
  modified_base 1: mod_base = OTHER; note = 2'-O-methyladenosine-3'-phosphorothioate
  modified_base 2: mod_base = OTHER; note = 2'-deoxy-2'-fluorouridine-3'-phosphorothioate
  modified_base 3: mod_base = OTHER; note = 2'-O-methylcytidine-3'-phosphate
  modified_base 4: mod_base = OTHER; note = 2'-deoxy-2'-fluoroadenosine-3'-phosphate
  modified_base 5: mod_base = OTHER; note = 2'-O-methyladenosine-3'-phosphate
  modified_base 6: mod_base = OTHER; note = 2'-deoxy-2'-fluorouridine-3'-phosphate
  modified_base 7: mod_base = OTHER; note = 2'-O-methyladenosine-3'-phosphate
  modified_base 8: mod_base = OTHER; note = 2'-deoxy-2'-fluoroguanosine-3'-phosphate
  modified_base 9: mod_base = OTHER; note = 2'-O-methyluridine-3'-phosphate
  modified_base 10: mod_base = OTHER; note = 2'-deoxy-2'-fluoroadenosine-3'-phosphate
  modified_base 11: mod_base = OTHER; note = 2'-O-methylguanosine-3'-phosphate
  modified_base 12: mod_base = OTHER; note = 2'-O-methylcytidine-3'-phosphate
  modified_base 13: mod_base = OTHER; note = 2'-O-methyluridine-3'-phosphate
  modified_base 14: mod_base = OTHER; note = 2'-deoxy-2'-fluoroguanosine-3'-phosphate
  modified_base 15: mod_base = OTHER; note = 2'-O-methylguanosine-3'-phosphate
  modified_base 16: mod_base = OTHER; note = 2'-deoxy-2'-fluorocytidine-3'-phosphate
  modified_base 17: mod_base = OTHER; note = 2'-O-methyladenosine-3'-phosphate
  modified_base 18: mod_base = OTHER; note = 2'-deoxy-2'-fluorocytidine-3'-phosphate
  modified_base 19: mod_base = OTHER; note = 2'-O-methylcytidine-3'-phosphate
  modified_base 20: mod_base = OTHER; note = 2'-deoxy-2'-fluorocytidine-3'-phosphate
  modified_base 21: mod_base = OTHER; note = 2'-O-methylcytidine-3'-phosphorothioate
  modified_base 22: mod_base = OTHER; note = 2'-O-methyladenosine-3'-phosphorothioate
  modified_base 23: mod_base = OTHER; note = 2'-O-methyluridine
atcaatagtagctggcaccccat

SEQ ID NO: 124 - RNA, 23 nt, synthetic construct
  source 1..23: mol_type = other RNA
  modified_base 1: mod_base = OTHER; note = 2'-O-methyluridine-3'-phosphorothioate
  modified_base 2: mod_base = OTHER; note = 2'-deoxy-2'-fluoroadenosine-3'-phosphorothioate
  modified_base 3: mod_base = OTHER; note = 2'-O-methyluridine-3'-phosphate
  modified_base 4: mod_base = OTHER; note = 2'-deoxy-2'-fluoroguanosine-3'-phosphate
  modified_base 5: mod_base = OTHER; note = 2'-O-methyladenosine-3'-phosphate
  modified_base 6: mod_base = OTHER; note = 2'-deoxy-2'-fluorocytidine-3'-phosphate
  modified_base 7: mod_base = OTHER; note = 2'-O-methylguanosine-3'-phosphate
  modified_base 8: mod_base = OTHER; note = 2'-deoxy-2'-fluorouridine-3'-phosphate
  modified_base 9: mod_base = OTHER; note = 2'-O-methyluridine-3'-phosphate
  modified_base 10: mod_base = OTHER; note = 2'-deoxy-2'-fluoroguanosine-3'-phosphate
  modified_base 11: mod_base = OTHER; note = 2'-O-methylcytidine-3'-phosphate
  modified_base 12: mod_base = OTHER; note = 2'-O-methylcytidine-3'-phosphate
  modified_base 13: mod_base = OTHER; note = 2'-O-methylcytidine-3'-phosphate
  modified_base 14: mod_base = OTHER; note = 2'-deoxy-2'-fluoroadenosine-3'-phosphate
  modified_base 15: mod_base = OTHER; note = 2'-O-methyladenosine-3'-phosphate
  modified_base 16: mod_base = OTHER; note = 2'-deoxy-2'-fluoroadenosine-3'-phosphate
  modified_base 17: mod_base = OTHER; note = 2'-O-methylcytidine-3'-phosphate
  modified_base 18: mod_base = OTHER; note = 2'-deoxy-2'-fluoroadenosine-3'-phosphate
  modified_base 19: mod_base = OTHER; note = 2'-O-methylcytidine-3'-phosphate
  modified_base 20: mod_base = OTHER; note = 2'-deoxy-2'-fluoroadenosine-3'-phosphate
  modified_base 21: mod_base = OTHER; note = 2'-O-methyluridine-3'-phosphorothioate
  modified_base 22: mod_base = OTHER; note = 2'-O-methyluridine-3'-phosphorothioate
  modified_base 23: mod_base = OTHER; note = 2'-O-methyluridine
tatgacgttgcccaaacacattt

SEQ ID NO: 125 - RNA, 23 nt, synthetic construct
  source 1..23: mol_type = other RNA
  modified_base 1: mod_base = OTHER; note = 2'-O-methyluridine-3'-phosphorothioate
  modified_base 2: mod_base = OTHER; note = 2'-deoxy-2'-fluorouridine-3'-phosphorothioate
  modified_base 3: mod_base = OTHER; note = 2'-O-methylcytidine-3'-phosphate
  modified_base 4: mod_base = OTHER; note = 2'-deoxy-2'-fluorouridine-3'-phosphate
  modified_base 5: mod_base = OTHER; note = 2'-O-methyluridine-3'-phosphate
  modified_base 6: mod_base = OTHER; note = 2'-deoxy-2'-fluoroadenosine-3'-phosphate
  modified_base 7: mod_base = OTHER; note = 2'-O-methyladenosine-3'-phosphate
  modified_base 8: mod_base = OTHER; note = 2'-deoxy-2'-fluoroguanosine-3'-phosphate
  modified_base 9: mod_base = OTHER; note = 2'-O-methylguanosine-3'-phosphate
  modified_base 10: mod_base = OTHER; note = 2'-deoxy-2'-fluoroadenosine-3'-phosphate
  modified_base 11: mod_base = OTHER; note = 2'-O-methyladenosine-3'-phosphate
  modified_base 12: mod_base = OTHER; note = 2'-O-methyladenosine-3'-phosphate
  modified_base 13: mod_base = OTHER; note = 2'-O-methyluridine-3'-phosphate
  modified_base 14: mod_base = OTHER; note = 2'-deoxy-2'-fluorocytidine-3'-phosphate
  modified_base 15: mod_base = OTHER; note = 2'-O-methyluridine-3'-phosphate
  modified_base 16: mod_base = OTHER; note = 2'-deoxy-2'-fluoroadenosine-3'-phosphate
  modified_base 17: mod_base = OTHER; note = 2'-O-methyladenosine-3'-phosphate
  modified_base 18: mod_base = OTHER; note = 2'-deoxy-2'-fluoroadenosine-3'-phosphate
  modified_base 19: mod_base = OTHER; note = 2'-O-methylcytidine-3'-phosphate
  modified_base 20: mod_base = OTHER; note = 2'-deoxy-2'-fluoroadenosine-3'-phosphate
  modified_base 21: mod_base = OTHER; note = 2'-O-methylguanosine-3'-phosphorothioate
  modified_base 22: mod_base = OTHER; note = 2'-O-methyladenosine-3'-phosphorothioate
  modified_base 23: mod_base = OTHER; note = 2'-O-methyladenosine
ttcttaaggaaatctaaacagaa

SEQ ID NO: 126 - RNA, 23 nt, synthetic construct
  source 1..23: mol_type = other RNA
  modified_base 1: mod_base = OTHER; note = 2'-O-methyluridine-3'-phosphorothioate
  modified_base 2: mod_base = OTHER; note = 2'-deoxy-2'-fluoroadenosine-3'-phosphorothioate
  modified_base 3: mod_base = OTHER; note = 2'-O-methyluridine-3'-phosphate
  modified_base 4: mod_base = OTHER; note = 2'-deoxy-2'-fluoroguanosine-3'-phosphate
  modified_base 5: mod_base = OTHER; note = 2'-O-methylcytidine-3'-phosphate
  modified_base 6: mod_base = OTHER; note = 2'-deoxy-2'-fluoroadenosine-3'-phosphate
  modified_base 7: mod_base = OTHER; note = 2'-O-methyladenosine-3'-phosphate
  modified_base 8: mod_base = OTHER; note = 2'-deoxy-2'-fluoroguanosine-3'-phosphate
  modified_base 9: mod_base = OTHER; note = 2'-O-methyluridine-3'-phosphate
  modified_base 10: mod_base = OTHER; note = 2'-deoxy-2'-fluorocytidine-3'-phosphate
  modified_base 11: mod_base = OTHER; note = 2'-O-methylcytidine-3'-phosphate
  modified_base 12: mod_base = OTHER; note = 2'-O-methyladenosine-3'-phosphate
  modified_base 13: mod_base = OTHER; note = 2'-O-methyluridine-3'-phosphate
  modified_base 14: mod_base = OTHER; note = 2'-deoxy-2'-fluorouridine-3'-phosphate
  modified_base 15: mod_base = OTHER; note = 2'-O-methyluridine-3'-phosphate
  modified_base 16: mod_base = OTHER; note = 2'-deoxy-2'-fluorocytidine-3'-phosphate
  modified_base 17: mod_base = OTHER; note = 2'-O-methyluridine-3'-phosphate
  modified_base 18: mod_base = OTHER; note = 2'-deoxy-2'-fluorouridine-3'-phosphate
  modified_base 19: mod_base = OTHER; note = 2'-O-methyluridine-3'-phosphate
  modified_base 20: mod_base = OTHER; note = 2'-deoxy-2'-fluorocytidine-3'-phosphate
  modified_base 21: mod_base = OTHER; note = 2'-O-methyluridine-3'-phosphorothioate
  modified_base 22: mod_base = OTHER; note = 2'-O-methyladenosine-3'-phosphorothioate
  modified_base 23: mod_base = OTHER; note = 2'-O-methylguanosine
tatgcaagtccatttctttctag

SEQ ID NO: 127 - RNA, 23 nt, synthetic construct
  source 1..23: mol_type = other RNA
  modified_base 1: mod_base = OTHER; note = 2'-O-methyluridine-3'-phosphorothioate
  modified_base 2: mod_base = OTHER; note = 2'-deoxy-2'-fluorouridine-3'-phosphorothioate
  modified_base 3: mod_base = OTHER; note = 2'-O-methyluridine-3'-phosphate
  modified_base 4: mod_base = OTHER; note = 2'-deoxy-2'-fluoroadenosine-3'-phosphate
  modified_base 5: mod_base = OTHER; note = 2'-O-methyladenosine-3'-phosphate
  modified_base 6: mod_base = OTHER; note = 2'-deoxy-2'-fluorouridine-3'-phosphate
  modified_base 7: mod_base = OTHER; note = 2'-O-methyladenosine-3'-phosphate
  modified_base 8: mod_base = OTHER; note = 2'-deoxy-2'-fluorouridine-3'-phosphate
  modified_base 9: mod_base = OTHER; note = 2'-O-methyladenosine-3'-phosphate
  modified_base 10: mod_base = OTHER; note = 2'-deoxy-2'-fluorouridine-3'-phosphate
  modified_base 11: mod_base = OTHER; note = 2'-O-methyluridine-3'-phosphate
  modified_base 12: mod_base = OTHER; note = 2'-O-methyluridine-3'-phosphate
  modified_base 13: mod_base = OTHER; note = 2'-O-methylcytidine-3'-phosphate
  modified_base 14: mod_base = OTHER; note = 2'-deoxy-2'-fluorocytidine-3'-phosphate
  modified_base 15: mod_base = OTHER; note = 2'-O-methyladenosine-3'-phosphate
  modified_base 16: mod_base = OTHER; note = 2'-deoxy-2'-fluoroguanosine-3'-phosphate
  modified_base 17: mod_base = OTHER; note = 2'-O-methylguanosine-3'-phosphate
  modified_base 18: mod_base = OTHER; note = 2'-deoxy-2'-fluoroadenosine-3'-phosphate
  modified_base 19: mod_base = OTHER; note = 2'-O-methyluridine-3'-phosphate
  modified_base 20: mod_base = OTHER; note = 2'-deoxy-2'-fluoroguanosine-3'-phosphate
  modified_base 21: mod_base = OTHER; note = 2'-O-methylcytidine-3'-phosphorothioate
  modified_base 22: mod_base = OTHER; note = 2'-O-methyladenosine-3'-phosphorothioate
  modified_base 23: mod_base = OTHER; note = 2'-O-methyladenosine
tttaatatatttccaggatgcaa

SEQ ID NO: 128 - RNA, 23 nt, synthetic construct
  source 1..23: mol_type = other RNA
  modified_base 1: mod_base = OTHER; note = 2'-O-methyluridine-3'-phosphorothioate
  modified_base 2: mod_base = OTHER; note = 2'-deoxy-2'-fluoroadenosine-3'-phosphorothioate
  modified_base 3: mod_base = OTHER; note = 2'-O-methylguanosine-3'-phosphate
  modified_base 4: mod_base = OTHER; note = 2'-deoxy-2'-fluorouridine-3'-phosphate
  modified_base 5: mod_base = OTHER; note = 2'-O-methyluridine-3'-phosphate
  modified_base 6: mod_base = OTHER; note = 2'-deoxy-2'-fluorocytidine-3'-phosphate
  modified_base 7: mod_base = OTHER; note = 2'-O-methylcytidine-3'-phosphate
  modified_base 8: mod_base = OTHER; note = 2'-deoxy-2'-fluorocytidine-3'-phosphate
  modified_base 9: mod_base = OTHER; note = 2'-O-methyladenosine-3'-phosphate
  modified_base 10: mod_base = OTHER; note = 2'-deoxy-2'-fluorouridine-3'-phosphate
  modified_base 11: mod_base = OTHER; note = 2'-O-methylguanosine-3'-phosphate
  modified_base 12: mod_base = OTHER; note = 2'-O-methylguanosine-3'-phosphate
  modified_base 13: mod_base = OTHER; note = 2'-O-methyluridine-3'-phosphate
  modified_base 14: mod_base = OTHER; note = 2'-deoxy-2'-fluorocytidine-3'-phosphate
  modified_base 15: mod_base = OTHER; note = 2'-O-methyluridine-3'-phosphate
  modified_base 16: mod_base = OTHER; note = 2'-deoxy-2'-fluoroguanosine-3'-phosphate
  modified_base 17: mod_base = OTHER; note = 2'-O-methyladenosine-3'-phosphate
  modified_base 18: mod_base = OTHER; note = 2'-deoxy-2'-fluorocytidine-3'-phosphate
  modified_base 19: mod_base = OTHER; note = 2'-O-methyladenosine-3'-phosphate
  modified_base 20: mod_base = OTHER; note = 2'-deoxy-2'-fluoroguanosine-3'-phosphate
  modified_base 21: mod_base = OTHER; note = 2'-O-methylguanosine-3'-phosphorothioate
  modified_base 22: mod_base = OTHER; note = 2'-O-methylcytidine-3'-phosphorothioate
  modified_base 23: mod_base = OTHER; note = 2'-O-methyluridine
tagttcccatggtctgacaggct

SEQ ID NO: 129 - RNA, 23 nt, synthetic construct
  source 1..23: mol_type = other RNA
  modified_base 1: mod_base = OTHER; note = 2'-O-methyluridine-3'-phosphorothioate
  modified_base 2: mod_base = OTHER; note = 2'-deoxy-2'-fluoroadenosine-3'-phosphorothioate
  modified_base 3: mod_base = OTHER; note = 2'-O-methyluridine-3'-phosphate
  modified_base 4: mod_base = OTHER; note = 2'-deoxy-2'-fluorocytidine-3'-phosphate
  modified_base 5: mod_base = OTHER; note = 2'-O-methylcytidine-3'-phosphate
  modified_base 6: mod_base = OTHER; note = 2'-deoxy-2'-fluorocytidine-3'-phosphate
  modified_base 7: mod_base = OTHER; note = 2'-O-methyladenosine-3'-phosphate
  modified_base 8: mod_base = OTHER; note = 2'-deoxy-2'-fluorouridine-3'-phosphate
  modified_base 9: mod_base = OTHER; note = 2'-O-methylcytidine-3'-phosphate
  modified_base 10: mod_base = OTHER; note = 2'-deoxy-2'-fluorocytidine-3'-phosphate
  modified_base 11: mod_base = OTHER; note = 2'-O-methyladenosine-3'-phosphate
  modified_base 12: mod_base = OTHER; note = 2'-O-methylcytidine-3'-phosphate
  modified_base 13: mod_base = OTHER; note = 2'-O-methyladenosine-3'-phosphate
  modified_base 14: mod_base = OTHER; note = 2'-deoxy-2'-fluorocytidine-3'-phosphate
  modified_base 15: mod_base = OTHER; note = 2'-O-methylcytidine-3'-phosphate
  modified_base 16: mod_base = OTHER; note = 2'-deoxy-2'-fluoroadenosine-3'-phosphate
  modified_base 17: mod_base = OTHER; note = 2'-O-methyluridine-3'-phosphate
  modified_base 18: mod_base = OTHER; note = 2'-deoxy-2'-fluoroguanosine-3'-phosphate
  modified_base 19: mod_base = OTHER; note = 2'-O-methyluridine-3'-phosphate
  modified_base 20: mod_base = OTHER; note = 2'-deoxy-2'-fluorouridine-3'-phosphate
  modified_base 21: mod_base = OTHER; note = 2'-O-methyluridine-3'-phosphorothioate
  modified_base 22: mod_base = OTHER; note = 2'-O-methyladenosine-3'-phosphorothioate
  modified_base 23: mod_base = OTHER; note = 2'-O-methyladenosine
tatcccatccacaccatgtttaa

SEQ ID NO: 130 - RNA, 23 nt, synthetic construct
  source 1..23: mol_type = other RNA
  modified_base 1: mod_base = OTHER; note = 2'-O-methyluridine-3'-phosphorothioate
  modified_base 2: mod_base = OTHER; note = 2'-deoxy-2'-fluorouridine-3'-phosphorothioate
  modified_base 3: mod_base = OTHER; note = 2'-O-methylcytidine-3'-phosphate
  modified_base 4: mod_base = OTHER; note = 2'-deoxy-2'-fluoroadenosine-3'-phosphate
  modified_base 5: mod_base = OTHER; note = 2'-O-methyladenosine-3'-phosphate
  modified_base 6: mod_base = OTHER; note = 2'-deoxy-2'-fluoroadenosine-3'-phosphate
  modified_base 7: mod_base = OTHER; note = 2'-O-methyladenosine-3'-phosphate
  modified_base 8: mod_base = OTHER; note = 2'-deoxy-2'-fluorouridine-3'-phosphate
  modified_base 9: mod_base = OTHER; note = 2'-O-methyluridine-3'-phosphate
  modified_base 10: mod_base = OTHER; note = 2'-deoxy-2'-fluorouridine-3'-phosphate
  modified_base 11: mod_base = OTHER; note = 2'-O-methyluridine-3'-phosphate
  modified_base 12: mod_base = OTHER; note = 2'-O-methyluridine-3'-phosphate
  modified_base 13: mod_base = OTHER; note = 2'-O-methylcytidine-3'-phosphate
  modified_base 14: mod_base = OTHER; note = 2'-deoxy-2'-fluoroadenosine-3'-phosphate
  modified_base 15: mod_base = OTHER; note = 2'-O-methyluridine-3'-phosphate
  modified_base 16: mod_base = OTHER; note = 2'-deoxy-2'-fluorocytidine-3'-phosphate
  modified_base 17: mod_base = OTHER; note = 2'-O-methylcytidine-3'-phosphate
  modified_base 18: mod_base = OTHER; note = 2'-deoxy-2'-fluorouridine-3'-phosphate
  modified_base 19: mod_base = OTHER; note = 2'-O-methylguanosine-3'-phosphate
  modified_base 20: mod_base = OTHER; note = 2'-deoxy-2'-fluoroadenosine-3'-phosphate
  modified_base 21: mod_base = OTHER; note = 2'-O-methylguanosine-3'-phosphorothioate
  modified_base 22: mod_base = OTHER; note = 2'-O-methyluridine-3'-phosphorothioate
  modified_base 23: mod_base = OTHER; note = 2'-O-methyluridine
ttcaaaatttttcatcctgagtt

SEQ ID NO: 131 - RNA, 23 nt, synthetic construct
  source 1..23: mol_type = other RNA
  modified_base 1: mod_base = OTHER; note = 2'-O-methyluridine-3'-phosphorothioate
  modified_base 2: mod_base = OTHER; note = 2'-deoxy-2'-fluorouridine-3'-phosphorothioate
  modified_base 3: mod_base = OTHER; note = 2'-O-methyluridine-3'-phosphate
  modified_base 4: mod_base = OTHER; note = 2'-deoxy-2'-fluoroguanosine-3'-phosphate
  modified_base 5: mod_base = OTHER; note = 2'-O-methyluridine-3'-phosphate
  modified_base 6: mod_base = OTHER; note = 2'-deoxy-2'-fluorocytidine-3'-phosphate
  modified_base 7: mod_base = OTHER; note = 2'-O-methyladenosine-3'-phosphate
  modified_base 8: mod_base = OTHER; note = 2'-deoxy-2'-fluoroadenosine-3'-phosphate
  modified_base 9: mod_base = OTHER; note = 2'-O-methylguanosine-3'-phosphate
  modified_base 10: mod_base = OTHER; note = 2'-deoxy-2'-fluorouridine-3'-phosphate
  modified_base 11: mod_base = OTHER; note = 2'-O-methyladenosine-3'-phosphate
  modified_base 12: mod_base = OTHER; note = 2'-O-methyladenosine-3'-phosphate
  modified_base 13: mod_base = OTHER; note = 2'-O-methyluridine-3'-phosphate
  modified_base 14: mod_base = OTHER; note = 2'-deoxy-2'-fluoroadenosine-3'-phosphate
  modified_base 15: mod_base = OTHER; note = 2'-O-methylcytidine-3'-phosphate
  modified_base 16: mod_base = OTHER; note = 2'-deoxy-2'-fluoroadenosine-3'-phosphate
  modified_base 17: mod_base = OTHER; note = 2'-O-methyluridine-3'-phosphate
  modified_base 18: mod_base = OTHER; note = 2'-deoxy-2'-fluoroguanosine-3'-phosphate
  modified_base 19: mod_base = OTHER; note = 2'-O-methylcytidine-3'-phosphate
  modified_base 20: mod_base = OTHER; note = 2'-deoxy-2'-fluorouridine-3'-phosphate
  modified_base 21: mod_base = OTHER; note = 2'-O-methylguanosine-3'-phosphorothioate
  modified_base 22: mod_base = OTHER; note = 2'-O-methyladenosine-3'-phosphorothioate
  modified_base 23: mod_base = OTHER; note = 2'-O-methyladenosine
tttgtcaagtaatacatgctgaa

SEQ ID NO: 132 - RNA, 23 nt, synthetic construct
  source 1..23: mol_type = other RNA
  modified_base 1: mod_base = OTHER; note = 2'-O-methyluridine-3'-phosphorothioate
  modified_base 2: mod_base = OTHER; note = 2'-deoxy-2'-fluoroguanosine-3'-phosphorothioate
  modified_base 3: mod_base = OTHER; note = 2'-O-methyladenosine-3'-phosphate
  modified_base 4: mod_base = OTHER; note = 2'-deoxy-2'-fluorouridine-3'-phosphate
  modified_base 5: mod_base = OTHER; note = 2'-O-methyluridine-3'-phosphate
  modified_base 6: mod_base = OTHER; note = 2'-deoxy-2'-fluorouridine-3'-phosphate
  modified_base 7: mod_base = OTHER; note = 2'-O-methyladenosine-3'-phosphate
  modified_base 8: mod_base = OTHER; note = 2'-deoxy-2'-fluoroguanosine-3'-phosphate
  modified_base 9: mod_base = OTHER; note = 2'-O-methylcytidine-3'-phosphate
  modified_base 10: mod_base = OTHER; note = 2'-deoxy-2'-fluoroadenosine-3'-phosphate
  modified_base 11: mod_base = OTHER; note = 2'-O-methyluridine-3'-phosphate
  modified_base 12: mod_base = OTHER; note = 2'-O-methylguanosine-3'-phosphate
  modified_base 13: mod_base = OTHER; note = 2'-O-methyluridine-3'-phosphate
  modified_base 14: mod_base = OTHER; note = 2'-deoxy-2'-fluorouridine-3'-phosphate
  modified_base 15: mod_base = OTHER; note = 2'-O-methylguanosine-3'-phosphate
  modified_base 16: mod_base = OTHER; note = 2'-deoxy-2'-fluorouridine-3'-phosphate
  modified_base 17: mod_base = OTHER; note = 2'-O-methyluridine-3'-phosphate
  modified_base 18: mod_base = OTHER; note = 2'-deoxy-2'-fluorocytidine-3'-phosphate
  modified_base 19: mod_base = OTHER; note = 2'-O-methyladenosine-3'-phosphate
  modified_base 20: mod_base = OTHER; note = 2'-deoxy-2'-fluorouridine-3'-phosphate
  modified_base 21: mod_base = OTHER; note = 2'-O-methyladenosine-3'-phosphorothioate
  modified_base 22: mod_base = OTHER; note = 2'-O-methyladenosine-3'-phosphorothioate
  modified_base 23: mod_base = OTHER; note = 2'-O-methyluridine
tgatttagcatgttgttcataat

SEQ ID NO: 133 - RNA, 23 nt, synthetic construct
  source 1..23: mol_type = other RNA
  modified_base 1: mod_base = OTHER; note = 2'-O-methyluridine-3'-phosphorothioate
  modified_base 2: mod_base = OTHER; note = 2'-deoxy-2'-fluorocytidine-3'-phosphorothioate
  modified_base 3: mod_base = OTHER; note = 2'-O-methylcytidine-3'-phosphate
  modified_base 4: mod_base = OTHER; note = 2'-deoxy-2'-fluorouridine-3'-phosphate
  modified_base 5: mod_base = OTHER; note = 2'-O-methyladenosine-3'-phosphate
  modified_base 6: mod_base = OTHER; note = 2'-deoxy-2'-fluoroadenosine-3'-phosphate
  modified_base 7: mod_base = OTHER; note = 2'-O-methyladenosine-3'-phosphate
  modified_base 8: mod_base = OTHER; note = 2'-deoxy-2'-fluoroadenosine-3'-phosphate
  modified_base 9: mod_base = OTHER; note = 2'-O-methylcytidine-3'-phosphate
  modified_base 10: mod_base = OTHER; note = 2'-deoxy-2'-fluoroadenosine-3'-phosphate
  modified_base 11: mod_base = OTHER; note = 2'-O-methyluridine-3'-phosphate
  modified_base 12: mod_base = OTHER; note = 2'-O-methyluridine-3'-phosphate
  modified_base 13: mod_base = OTHER; note = 2'-O-methyluridine-3'-phosphate
  modified_base 14: mod_base = OTHER; note = 2'-deoxy-2'-fluoroguanosine-3'-phosphate
  modified_base 15: mod_base = OTHER; note = 2'-O-methylguanosine-3'-phosphate
  modified_base 16: mod_base = OTHER; note = 2'-deoxy-2'-fluoroadenosine-3'-phosphate
  modified_base 17: mod_base = OTHER; note = 2'-O-methyluridine-3'-phosphate
  modified_base 18: mod_base = OTHER; note = 2'-deoxy-2'-fluoroadenosine-3'-phosphate
  modified_base 19: mod_base = OTHER; note = 2'-O-methyluridine-3'-phosphate
  modified_base 20: mod_base = OTHER; note = 2'-deoxy-2'-fluoroadenosine-3'-phosphate
  modified_base 21: mod_base = OTHER; note = 2'-O-methyluridine-3'-phosphorothioate
  modified_base 22: mod_base = OTHER; note = 2'-O-methyluridine-3'-phosphorothioate
  modified_base 23: mod_base = OTHER; note = 2'-O-methylcytidine
tcctaaaacatttggatatattc

SEQ ID NO: 134 - RNA, 23 nt, synthetic construct
  source 1..23: mol_type = other RNA
  modified_base 1: mod_base = OTHER; note = 2'-O-methyluridine-3'-phosphorothioate
  modified_base 2: mod_base = OTHER; note = 2'-deoxy-2'-fluorouridine-3'-phosphorothioate
  modified_base 3: mod_base = OTHER; note = 2'-O-methylguanosine-3'-phosphate
  modified_base 4: mod_base = OTHER; note = 2'-deoxy-2'-fluoroguanosine-3'-phosphate
  modified_base 5: mod_base = OTHER; note = 2'-O-methyladenosine-3'-phosphate
  modified_base 6: mod_base = OTHER; note = 2'-deoxy-2'-fluorouridine-3'-phosphate
  modified_base 7: mod_base = OTHER; note = 2'-O-methyladenosine-3'-phosphate
  modified_base 8: mod_base = OTHER; note = 2'-deoxy-2'-fluorocytidine-3'-phosphate
  modified_base 9: mod_base = OTHER; note = 2'-O-methyladenosine-3'-phosphate
  modified_base 10: mod_base = OTHER; note = 2'-deoxy-2'-fluoroguanosine-3'-phosphate
  modified_base 11: mod_base = OTHER; note = 2'-O-methylcytidine-3'-phosphate
  modified_base 12: mod_base = OTHER; note = 2'-O-methyluridine-3'-phosphate
  modified_base 13: mod_base = OTHER; note = 2'-O-methyluridine-3'-phosphate
  modified_base 14: mod_base = OTHER; note = 2'-deoxy-2'-fluorocytidine-3'-phosphate
  modified_base 15: mod_base = OTHER; note = 2'-O-methylcytidine-3'-phosphate
  modified_base 16: mod_base = OTHER; note = 2'-deoxy-2'-fluoroadenosine-3'-phosphate
  modified_base 17: mod_base = OTHER; note = 2'-O-methyluridine-3'-phosphate
  modified_base 18: mod_base = OTHER; note = 2'-deoxy-2'-fluorocytidine-3'-phosphate
  modified_base 19: mod_base = OTHER; note = 2'-O-methyluridine-3'-phosphate
  modified_base 20: mod_base = OTHER; note = 2'-deoxy-2'-fluoroguanosine-3'-phosphate
  modified_base 21: mod_base = OTHER; note = 2'-O-methylguanosine-3'-phosphorothioate
  modified_base 22: mod_base = OTHER; note = 2'-O-methyladenosine-3'-phosphorothioate
  modified_base 23: mod_base = OTHER; note = 2'-O-methyladenosine
ttggatacagcttccatctggaa

SEQ ID NO: 135 - RNA, 23 nt, synthetic construct
  source 1..23: mol_type = other RNA
  modified_base 1: mod_base = OTHER; note = 2'-O-methyluridine-3'-phosphorothioate
  modified_base 2: mod_base = OTHER; note = 2'-deoxy-2'-fluoroadenosine-3'-phosphorothioate
  modified_base 3: mod_base = OTHER; note = 2'-O-methyluridine-3'-phosphate
  modified_base 4: mod_base = OTHER; note = 2'-deoxy-2'-fluoroadenosine-3'-phosphate
  modified_base 5: mod_base = OTHER; note = 2'-O-methyluridine-3'-phosphate
  modified_base 6: mod_base = OTHER; note = 2'-deoxy-2'-fluorouridine-3'-phosphate
  modified_base 7: mod_base = OTHER; note = 2'-O-methyluridine-3'-phosphate
  modified_base 8: mod_base = OTHER; note = 2'-deoxy-2'-fluorocytidine-3'-phosphate
  modified_base 9: mod_base = OTHER; note = 2'-O-methylcytidine-3'-phosphate
  modified_base 10: mod_base = OTHER; note = 2'-deoxy-2'-fluoroadenosine-3'-phosphate
  modified_base 11: mod_base = OTHER; note = 2'-O-methylguanosine-3'-phosphate
  modified_base 12: mod_base = OTHER; note = 2'-O-methylguanosine-3'-phosphate
  modified_base 13: mod_base = OTHER; note = 2'-O-methyladenosine-3'-phosphate
  modified_base 14: mod_base = OTHER; note = 2'-deoxy-2'-fluorouridine-3'-phosphate
  modified_base 15: mod_base = OTHER; note = 2'-O-methylguanosine-3'-phosphate
  modified_base 16: mod_base = OTHER; note = 2'-deoxy-2'-fluoroadenosine-3'-phosphate
  modified_base 17: mod_base = OTHER; note = 2'-O-methyladenosine-3'-phosphate
  modified_base 18: mod_base = OTHER; note = 2'-deoxy-2'-fluoroadenosine-3'-phosphate
  modified_base 19: mod_base = OTHER; note = 2'-O-methylguanosine-3'-phosphate
  modified_base 20: mod_base = OTHER; note = 2'-deoxy-2'-fluorouridine-3'-phosphate
  modified_base 21: mod_base = OTHER; note = 2'-O-methylcytidine-3'-phosphorothioate
  modified_base 22: mod_base = OTHER; note = 2'-O-methylcytidine-3'-phosphorothioate
  modified_base 23: mod_base = OTHER; note = 2'-O-methyladenosine
tatatttccaggatgaaagtcca

SEQ ID NO: 136 - RNA, 23 nt, synthetic construct
  source 1..23: mol_type = other RNA
  modified_base 1: mod_base = OTHER; note = 2'-O-methyladenosine-3'-phosphorothioate
  modified_base 2: mod_base = OTHER; note = 2'-deoxy-2'-fluorouridine-3'-phosphorothioate
  modified_base 3: mod_base = OTHER; note = 2'-O-methyluridine-3'-phosphate
  modified_base 4: mod_base = OTHER; note = 2'-deoxy-2'-fluoroguanosine-3'-phosphate
  modified_base 5: mod_base = OTHER; note = 2'-O-methyladenosine-3'-phosphate
  modified_base 6: mod_base = OTHER; note = 2'-deoxy-2'-fluorouridine-3'-phosphate
  modified_base 7: mod_base = OTHER; note = 2'-O-methyladenosine-3'-phosphate
  modified_base 8: mod_base = OTHER; note = 2'-deoxy-2'-fluorocytidine-3'-phosphate
  modified_base 9: mod_base = OTHER; note = 2'-O-methyladenosine-3'-phosphate
  modified_base 10: mod_base = OTHER; note = 2'-deoxy-2'-fluoroadenosine-3'-phosphate
  modified_base 11: mod_base = OTHER; note = 2'-O-methyladenosine-3'-phosphate
  modified_base 12: mod_base = OTHER; note = 2'-O-methyluridine-3'-phosphate
  modified_base 13: mod_base = OTHER; note = 2'-O-methyluridine-3'-phosphate
  modified_base 14: mod_base = OTHER; note = 2'-deoxy-2'-fluoroadenosine-3'-phosphate
  modified_base 15: mod_base = OTHER; note = 2'-O-methylguanosine-3'-phosphate
  modified_base 16: mod_base = OTHER; note = 2'-deoxy-2'-fluorocytidine-3'-phosphate
  modified_base 17: mod_base = OTHER; note = 2'-O-methylcytidine-3'-phosphate
  modified_base 18: mod_base = OTHER; note = 2'-deoxy-2'-fluoroguanosine-3'-phosphate
  modified_base 19: mod_base = OTHER; note = 2'-O-methylguanosine-3'-phosphate
  modified_base 20: mod_base = OTHER; note = 2'-deoxy-2'-fluoroguanosine-3'-phosphate
  modified_base 21: mod_base = OTHER; note = 2'-O-methylguanosine-3'-phosphorothioate
  modified_base 22: mod_base = OTHER; note = 2'-O-methylguanosine-3'-phosphorothioate
  modified_base 23: mod_base = OTHER; note = 2'-O-methyladenosine
attgatacaaattagccggggga

SEQ ID NO: 137 - RNA, 23 nt, synthetic construct
  source 1..23: mol_type = other RNA
  modified_base 1: mod_base = OTHER; note = 2'-O-methyluridine-3'-phosphorothioate
  modified_base 2: mod_base = OTHER; note = 2'-deoxy-2'-fluorocytidine-3'-phosphorothioate
  modified_base 3: mod_base = OTHER; note = 2'-O-methylcytidine-3'-phosphate
  modified_base 4: mod_base = OTHER; note = 2'-deoxy-2'-fluorocytidine-3'-phosphate
  modified_base 5: mod_base = OTHER; note = 2'-O-methyladenosine-3'-phosphate
  modified_base 6: mod_base = OTHER; note = 2'-deoxy-2'-fluorouridine-3'-phosphate
  modified_base 7: mod_base = OTHER; note = 2'-O-methyluridine-3'-phosphate
  modified_base 8: mod_base = OTHER; note = 2'-deoxy-2'-fluorocytidine-3'-phosphate
  modified_base 9: mod_base = OTHER; note = 2'-O-methyladenosine-3'-phosphate
  modified_base 10: mod_base = OTHER; note = 2'-deoxy-2'-fluoroadenosine-3'-phosphate
  modified_base 11: mod_base = OTHER; note = 2'-O-methylguanosine-3'-phosphate
  modified_base 12: mod_base = OTHER; note = 2'-O-methylcytidine-3'-phosphate
  modified_base 13: mod_base = OTHER; note = 2'-O-methylcytidine-3'-phosphate
  modified_base 14: mod_base = OTHER; note = 2'-deoxy-2'-fluoroadenosine-3'-phosphate
  modified_base 15: mod_base = OTHER; note = 2'-O-methyluridine-3'-phosphate
  modified_base 16: mod_base = OTHER; note = 2'-deoxy-2'-fluoroguanosine-3'-phosphate
  modified_base 17: mod_base = OTHER; note = 2'-O-methyluridine-3'-phosphate
  modified_base 18: mod_base = OTHER; note = 2'-deoxy-2'-fluorouridine-3'-phosphate
  modified_base 19: mod_base = OTHER; note = 2'-O-methyluridine-3'-phosphate
  modified_base 20: mod_base = OTHER; note = 2'-deoxy-2'-fluoroadenosine-3'-phosphate
  modified_base 21: mod_base = OTHER; note = 2'-O-methyladenosine-3'-phosphorothioate
  modified_base 22: mod_base = OTHER; note = 2'-O-methylcytidine-3'-phosphorothioate
  modified_base 23: mod_base = OTHER; note = 2'-O-methyladenosine
tcccattcaagccatgtttaaca

SEQ ID NO: 138 - RNA, 23 nt, synthetic construct
  source 1..23: mol_type = other RNA
  modified_base 1: mod_base = OTHER; note = 2'-O-methyladenosine-3'-phosphorothioate
  modified_base 2: mod_base = OTHER; note = 2'-deoxy-2'-fluorouridine-3'-phosphorothioate
  modified_base 3: mod_base = OTHER; note = 2'-O-methylguanosine-3'-phosphate
  modified_base 4: mod_base = OTHER; note = 2'-deoxy-2'-fluoroadenosine-3'-phosphate
  modified_base 5: mod_base = OTHER; note = 2'-O-methylcytidine-3'-phosphate
  modified_base 6: mod_base = OTHER; note = 2'-deoxy-2'-fluoroguanosine-3'-phosphate
  modified_base 7: mod_base = OTHER; note = 2'-O-methyluridine-3'-phosphate
  modified_base 8: mod_base = OTHER; note = 2'-deoxy-2'-fluorouridine-3'-phosphate
  modified_base 9: mod_base = OTHER; note = 2'-O-methylguanosine-3'-phosphate
  modified_base 10: mod_base = OTHER; note = 2'-deoxy-2'-fluorouridine-3'-phosphate
  modified_base 11: mod_base = OTHER; note = 2'-O-methylcytidine-3'-phosphate
  modified_base 12: mod_base = OTHER; note = 2'-O-methyluridine-3'-phosphate
  modified_base 13: mod_base = OTHER; note = 2'-O-methyladenosine-3'-phosphate
  modified_base 14: mod_base = OTHER; note = 2'-deoxy-2'-fluoroadenosine-3'-phosphate
  modified_base 15: mod_base = OTHER; note = 2'-O-methyladenosine-3'-phosphate
  modified_base 16: mod_base = OTHER; note = 2'-deoxy-2'-fluorocytidine-3'-phosphate
  modified_base 17: mod_base = OTHER; note = 2'-O-methyladenosine-3'-phosphate
  modified_base 18: mod_base = OTHER; note = 2'-deoxy-2'-fluorocytidine-3'-phosphate
  modified_base 19: mod_base = OTHER; note = 2'-O-methyladenosine-3'-phosphate
  modified_base 20: mod_base = OTHER; note = 2'-deoxy-2'-fluorouridine-3'-phosphate
  modified_base 21: mod_base = OTHER; note = 2'-O-methyluridine-3'-phosphorothioate
  modified_base 22: mod_base = OTHER; note = 2'-O-methyluridine-3'-phosphorothioate
  modified_base 23: mod_base = OTHER; note = 2'-O-methyluridine
atgacgttgtctaaacacatttt

SEQ ID NO: 139 - RNA, 23 nt, synthetic construct
  source 1..23: mol_type = other RNA
  modified_base 1: mod_base = OTHER; note = 2'-O-methyladenosine-3'-phosphorothioate
  modified_base 2: mod_base = OTHER; note = 2'-deoxy-2'-fluoroadenosine-3'-phosphorothioate
  modified_base 3: mod_base = OTHER; note = 2'-O-methylcytidine-3'-phosphate
  modified_base 4: mod_base = OTHER; note = 2'-deoxy-2'-fluorocytidine-3'-phosphate
  modified_base 5: mod_base = OTHER; note = 2'-O-methylguanosine-3'-phosphate
  modified_base 6: mod_base = OTHER; note = 2'-deoxy-2'-fluoroguanosine-3'-phosphate
  modified_base 7: mod_base = OTHER; note = 2'-O-methyladenosine-3'-phosphate
  modified_base 8: mod_base = OTHER; note = 2'-deoxy-2'-fluoroadenosine-3'-phosphate
  modified_base 9: mod_base = OTHER; note = 2'-O-methyluridine-3'-phosphate
  modified_base 10: mod_base = OTHER; note = 2'-deoxy-2'-fluorouridine-3'-phosphate
  modified_base 11: mod_base = OTHER; note = 2'-O-methylcytidine-3'-phosphate
  modified_base 12: mod_base = OTHER; note = 2'-O-methyluridine-3'-phosphate
  modified_base 13: mod_base = OTHER; note = 2'-O-methyluridine-3'-phosphate
  modified_base 14: mod_base = OTHER; note = 2'-deoxy-2'-fluorocytidine-3'-phosphate
  modified_base 15: mod_base = OTHER; note = 2'-O-methylcytidine-3'-phosphate
  modified_base 16: mod_base = OTHER; note = 2'-deoxy-2'-fluorouridine-3'-phosphate
  modified_base 17: mod_base = OTHER; note = 2'-O-methyluridine-3'-phosphate
  modified_base 18: mod_base = OTHER; note = 2'-deoxy-2'-fluorouridine-3'-phosphate
  modified_base 19: mod_base = OTHER; note = 2'-O-methyladenosine-3'-phosphate
  modified_base 20: mod_base = OTHER; note = 2'-deoxy-2'-fluoroguanosine-3'-phosphate
  modified_base 21: mod_base = OTHER; note = 2'-O-methyluridine-3'-phosphorothioate
  modified_base 22: mod_base = OTHER; note = 2'-O-methyladenosine-3'-phosphorothioate
  modified_base 23: mod_base = OTHER; note = 2'-O-methyluridine
aaccggaattcttcctttagtat

SEQ ID NO: 140 - RNA, 23 nt, synthetic construct
  source 1..23: mol_type = other RNA
  modified_base 1: mod_base = OTHER; note = 2'-O-methyladenosine-3'-phosphorothioate
  modified_base 2: mod_base = OTHER; note = 2'-deoxy-2'-fluorouridine-3'-phosphorothioate
  modified_base 3: mod_base = OTHER; note = 2'-O-methylcytidine-3'-phosphate
  modified_base 4: mod_base = OTHER; note = 2'-deoxy-2'-fluorocytidine-3'-phosphate
  modified_base 5: mod_base = OTHER; note = 2'-O-methyluridine-3'-phosphate
  modified_base 6: mod_base = OTHER; note = 2'-deoxy-2'-fluoroadenosine-3'-phosphate
  modified_base 7: mod_base = OTHER; note = 2'-O-methyladenosine-3'-phosphate
  modified_base 8: mod_base = OTHER; note = 2'-deoxy-2'-fluoroadenosine-3'-phosphate
  modified_base 9: mod_base = OTHER; note = 2'-O-methyladenosine-3'-phosphate
  modified_base 10: mod_base = OTHER; note = 2'-deoxy-2'-fluorocytidine-3'-phosphate
  modified_base 11: mod_base = OTHER; note = 2'-O-methyladenosine-3'-phosphate
  modified_base 12: mod_base = OTHER; note = 2'-O-methyluridine-3'-phosphate
  modified_base 13: mod_base = OTHER; note = 2'-O-methyluridine-3'-phosphate
  modified_base 14: mod_base = OTHER; note = 2'-deoxy-2'-fluorouridine-3'-phosphate
  modified_base 15: mod_base = OTHER; note = 2'-O-methylguanosine-3'-phosphate
  modified_base 16: mod_base = OTHER; note = 2'-deoxy-2'-fluoroguanosine-3'-phosphate
  modified_base 17: mod_base = OTHER; note = 2'-O-methyladenosine-3'-phosphate
  modified_base 18: mod_base = OTHER; note = 2'-deoxy-2'-fluorouridine-3'-phosphate
  modified_base 19: mod_base = OTHER; note = 2'-O-methyladenosine-3'-phosphate
  modified_base 20: mod_base = OTHER; note = 2'-deoxy-2'-fluorouridine-3'-phosphate
  modified_base 21: mod_base = OTHER; note = 2'-O-methyladenosine-3'-phosphorothioate
  modified_base 22: mod_base = OTHER; note = 2'-O-methyluridine-3'-phosphorothioate
  modified_base 23: mod_base = OTHER; note = 2'-O-methyluridine
atcctaaaacatttggatatatt

SEQ ID NO: 141 - RNA, 23 nt, synthetic construct
  source 1..23: mol_type = other RNA
  modified_base 1: mod_base = OTHER; note = 2'-O-methyladenosine-3'-phosphorothioate
  modified_base 2: mod_base = OTHER; note = 2'-deoxy-2'-fluoroadenosine-3'-phosphorothioate
  modified_base 3: mod_base = OTHER; note = 2'-O-methylcytidine-3'-phosphate
  modified_base 4: mod_base = OTHER; note = 2'-deoxy-2'-fluoroadenosine-3'-phosphate
  modified_base 5: mod_base = OTHER; note = 2'-O-methyluridine-3'-phosphate
  modified_base 6: mod_base = OTHER; note = 2'-deoxy-2'-fluorocytidine-3'-phosphate
  modified_base 7: mod_base = OTHER; note = 2'-O-methyladenosine-3'-phosphate
  modified_base 8: mod_base = OTHER; note = 2'-deoxy-2'-fluoroguanosine-3'-phosphate
  modified_base 9: mod_base = OTHER; note = 2'-O-methyluridine-3'-phosphate
  modified_base 10: mod_base = OTHER; note = 2'-deoxy-2'-fluoroguanosine-3'-phosphate
  modified_base 11: mod_base = OTHER; note = 2'-O-methylcytidine-3'-phosphate
  modified_base 12: mod_base = OTHER; note = 2'-O-methylcytidine-3'-phosphate
  modified_base 13: mod_base = OTHER; note = 2'-O-methyluridine-3'-phosphate
  modified_base 14: mod_base = OTHER; note = 2'-deoxy-2'-fluorouridine-3'-phosphate
  modified_base 15: mod_base = OTHER; note = 2'-O-methyluridine-3'-phosphate
  modified_base 16: mod_base = OTHER; note = 2'-deoxy-2'-fluorocytidine-3'-phosphate
  modified_base 17: mod_base = OTHER; note = 2'-O-methylcytidine-3'-phosphate
  modified_base 18: mod_base = OTHER; note = 2'-deoxy-2'-fluoroguanosine-3'-phosphate
  modified_base 19: mod_base = OTHER; note = 2'-O-methylcytidine-3'-phosphate
  modified_base 20: mod_base = OTHER; note = 2'-deoxy-2'-fluoroadenosine-3'-phosphate
  modified_base 21: mod_base = OTHER; note = 2'-O-methylcytidine-3'-phosphorothioate
  modified_base 22: mod_base = OTHER; note = 2'-O-methyladenosine-3'-phosphorothioate
  modified_base 23: mod_base = OTHER; note = 2'-O-methylcytidine
aacatcagtgcctttccgcacac

SEQ ID NO: 142 - RNA, 23 nt, synthetic construct
  source 1..23: mol_type = other RNA
  modified_base 1: mod_base = OTHER; note = 2'-O-methyladenosine-3'-phosphorothioate
  modified_base 2: mod_base = OTHER; note = 2'-deoxy-2'-fluoroadenosine-3'-phosphorothioate
  modified_base 3: mod_base = OTHER; note = 2'-O-methyluridine-3'-phosphate
  modified_base 4: mod_base = OTHER; note = 2'-deoxy-2'-fluorouridine-3'-phosphate
  modified_base 5: mod_base = OTHER; note = 2'-O-methyluridine-3'-phosphate
  modified_base 6: mod_base = OTHER; note = 2'-deoxy-2'-fluoroadenosine-3'-phosphate
  modified_base 7: mod_base = OTHER; note = 2'-O-methyladenosine-3'-phosphate
  modified_base 8: mod_base = OTHER; note = 2'-deoxy-2'-fluoroguanosine-3'-phosphate
  modified_base 9: mod_base = OTHER; note = 2'-O-methyladenosine-3'-phosphate
  modified_base 10: mod_base = OTHER; note = 2'-deoxy-2'-fluoroadenosine-3'-phosphate
  modified_base 11: mod_base = OTHER; note = 2'-O-methylcytidine-3'-phosphate
  modified_base 12: mod_base = OTHER; note = 2'-O-methylcytidine-3'-phosphate
  modified_base 13: mod_base = OTHER; note = 2'-O-methyladenosine-3'-phosphate
  modified_base 14: mod_base = OTHER; note = 2'-deoxy-2'-fluorocytidine-3'-phosphate
  modified_base 15: mod_base = OTHER; note = 2'-O-methyluridine-3'-phosphate
  modified_base 16: mod_base = OTHER; note = 2'-deoxy-2'-fluoroguanosine-3'-phosphate
  modified_base 17: mod_base = OTHER; note = 2'-O-methyluridine-3'-phosphate
  modified_base 18: mod_base = OTHER; note = 2'-deoxy-2'-fluorouridine-3'-phosphate
  modified_base 19: mod_base = OTHER; note = 2'-O-methyluridine-3'-phosphate
  modified_base 20: mod_base = OTHER; note = 2'-deoxy-2'-fluorouridine-3'-phosphate
  modified_base 21: mod_base = OTHER; note = 2'-O-methyladenosine-3'-phosphorothioate
  modified_base 22: mod_base = OTHER; note = 2'-O-methyladenosine-3'-phosphorothioate
  modified_base 23: mod_base = OTHER; note = 2'-O-methyladenosine
aatttaagaaccactgttttaaa

SEQ ID NO: 143 - RNA, 23 nt, synthetic construct
  source 1..23: mol_type = other RNA
  modified_base 1: mod_base = OTHER; note = 2'-O-methyladenosine-3'-phosphorothioate
  modified_base 2: mod_base = OTHER; note = 2'-deoxy-2'-fluorocytidine-3'-phosphorothioate
  modified_base 3: mod_base = OTHER; note = 2'-O-methyluridine-3'-phosphate
  modified_base 4: mod_base = OTHER; note = 2'-deoxy-2'-fluoroguanosine-3'-phosphate
  modified_base 5: mod_base = OTHER; note = 2'-O-methylguanosine-3'-phosphate
  modified_base 6: mod_base = OTHER; note = 2'-deoxy-2'-fluorouridine-3'-phosphate
  modified_base 7: mod_base = OTHER; note = 2'-O-methyluridine-3'-phosphate
  modified_base 8: mod_base = OTHER; note = 2'-deoxy-2'-fluorouridine-3'-phosphate
  modified_base 9: mod_base = OTHER; note = 2'-O-methylcytidine-3'-phosphate
  modified_base 10: mod_base = OTHER; note = 2'-deoxy-2'-fluoroadenosine-3'-phosphate
  modified_base 11: mod_base = OTHER; note = 2'-O-methyladenosine-3'-phosphate
  modified_base 12: mod_base = OTHER; note = 2'-O-methyladenosine-3'-phosphate
  modified_base 13: mod_base = OTHER; note = 2'-O-methyladenosine-3'-phosphate
  modified_base 14: mod_base = OTHER; note = 2'-deoxy-2'-fluorouridine-3'-phosphate
  modified_base 15: mod_base = OTHER; note = 2'-O-methyluridine-3'-phosphate
  modified_base 16: mod_base = OTHER; note = 2'-deoxy-2'-fluorouridine-3'-phosphate
  modified_base 17: mod_base = OTHER; note = 2'-O-methyluridine-3'-phosphate
  modified_base 18: mod_base = OTHER; note = 2'-deoxy-2'-fluorouridine-3'-phosphate
  modified_base 19: mod_base = OTHER; note = 2'-O-methylcytidine-3'-phosphate
  modified_base 20: mod_base = OTHER; note = 2'-deoxy-2'-fluoroadenosine-3'-phosphate
  modified_base 21: mod_base = OTHER; note = 2'-O-methyluridine-3'-phosphorothioate
  modified_base 22: mod_base = OTHER; note = 2'-O-methylcytidine-3'-phosphorothioate
  modified_base 23: mod_base = OTHER; note = 2'-O-methylcytidine
actggtttcaaaatttttcatcc

SEQ ID NO: 144 - RNA, 23 nt, synthetic construct
  source 1..23: mol_type = other RNA
  modified_base 1: mod_base = OTHER; note = 2'-O-methyladenosine-3'-phosphorothioate
  modified_base 2: mod_base = OTHER; note = 2'-deoxy-2'-fluoroadenosine-3'-phosphorothioate
  modified_base 3: mod_base = OTHER; note = 2'-O-methyladenosine-3'-phosphate
  modified_base 4: mod_base = OTHER; note = 2'-deoxy-2'-fluoroadenosine-3'-phosphate
  modified_base 5: mod_base = OTHER; note = 2'-O-methylguanosine-3'-phosphate
  modified_base 6: mod_base = OTHER; note = 2'-deoxy-2'-fluoroguanosine-3'-phosphate
  modified_base 7: mod_base = OTHER; note = 2'-O-methylguanosine-3'-phosphate
  modified_base 8: mod_base = OTHER; note = 2'-deoxy-2'-fluoroadenosine-3'-phosphate
  modified_base 9: mod_base = OTHER; note = 2'-O-methyluridine-3'-phosphate
  modified_base 10: mod_base = OTHER; note = 2'-deoxy-2'-fluorouridine-3'-phosphate
  modified_base 11: mod_base = OTHER; note = 2'-O-methylguanosine-3'-phosphate
  modified_base 12: mod_base = OTHER; note = 2'-O-methylcytidine-3'-phosphate
  modified_base 13: mod_base = OTHER; note = 2'-O-methyluridine-3'-phosphate
  modified_base 14: mod_base = OTHER; note = 2'-deoxy-2'-fluoroadenosine-3'-phosphate
  modified_base 15: mod_base = OTHER; note = 2'-O-methyluridine-3'-phosphate
  modified_base 16: mod_base = OTHER; note = 2'-deoxy-2'-fluorouridine-3'-phosphate
  modified_base 17: mod_base = OTHER; note = 2'-O-methyluridine-3'-phosphate
  modified_base 18: mod_base = OTHER; note = 2'-deoxy-2'-fluorouridine-3'-phosphate
  modified_base 19: mod_base = OTHER; note = 2'-O-methylguanosine-3'-phosphate
  modified_base 20: mod_base = OTHER; note = 2'-deoxy-2'-fluorouridine-3'-phosphate
  modified_base 21: mod_base = OTHER; note = 2'-O-methyluridine-3'-phosphorothioate
  modified_base 22: mod_base = OTHER; note = 2'-O-methylguanosine-3'-phosphorothioate
  modified_base 23: mod_base = OTHER; note = 2'-O-methylguanosine
aaaagggattgctattttgttgg

SEQ ID NO: 145 - RNA, 23 nt, synthetic construct
  source 1..23: mol_type = other RNA
  modified_base 1: mod_base = OTHER; note = 2'-O-methyladenosine-3'-phosphorothioate
  modified_base 2: mod_base = OTHER; note = 2'-deoxy-2'-fluoroadenosine-3'-phosphorothioate
  modified_base 3: mod_base = OTHER; note = 2'-O-methylguanosine-3'-phosphate
  modified_base 4: mod_base = OTHER; note = 2'-deoxy-2'-fluorouridine-3'-phosphate
  modified_base 5: mod_base = OTHER; note = 2'-O-methylcytidine-3'-phosphate
  modified_base 6: mod_base = OTHER; note = 2'-deoxy-2'-fluoroguanosine-3'-phosphate
  modified_base 7: mod_base = OTHER; note = 2'-O-methyladenosine-3'-phosphate
  modified_base 8: mod_base = OTHER; note = 2'-deoxy-2'-fluorocytidine-3'-phosphate
  modified_base 9: mod_base = OTHER; note = 2'-O-methyladenosine-3'-phosphate
  modified_base 10: mod_base = OTHER; note = 2'-deoxy-2'-fluoroguanosine-3'-phosphate
  modified_base 11: mod_base = OTHER; note = 2'-O-methyladenosine-3'-phosphate
  modified_base 12: mod_base = OTHER; note = 2'-O-methyluridine-3'-phosphate
  modified_base 13: mod_base = OTHER; note = 2'-O-methylcytidine-3'-phosphate
  modified_base 14: mod_base = OTHER; note = 2'-deoxy-2'-fluorouridine-3'-phosphate
  modified_base 15: mod_base = OTHER; note = 2'-O-methylguanosine-3'-phosphate
  modified_base 16: mod_base = OTHER; note = 2'-deoxy-2'-fluorouridine-3'-phosphate
  modified_base 17: mod_base = OTHER; note = 2'-O-methyluridine-3'-phosphate
  modified_base 18: mod_base = OTHER; note = 2'-deoxy-2'-fluorouridine-3'-phosphate
  modified_base 19: mod_base = OTHER; note = 2'-O-methylcytidine-3'-phosphate
  modified_base 20: mod_base = OTHER; note = 2'-deoxy-2'-fluoroadenosine-3'-phosphate
  modified_base 21: mod_base = OTHER; note = 2'-O-methylguanosine-3'-phosphorothioate
  modified_base 22: mod_base = OTHER; note = 2'-O-methylcytidine-3'-phosphorothioate
  modified_base 23: mod_base = OTHER; note = 2'-O-methyladenosine
aagtcgacagatctgtttcagca

SEQ ID NO: 146 - RNA, 23 nt, synthetic construct
  source 1..23: mol_type = other RNA
  modified_base 1: mod_base = OTHER; note = 2'-O-methyluridine-3'-phosphorothioate
  modified_base 2: mod_base = OTHER; note = 2'-deoxy-2'-fluorocytidine-3'-phosphorothioate
  modified_base 3: mod_base = OTHER; note = 2'-O-methyladenosine-3'-phosphate
  modified_base 4: mod_base = OTHER; note = 2'-deoxy-2'-fluoroadenosine-3'-phosphate
  modified_base 5: mod_base = OTHER; note = 2'-O-methyladenosine-3'-phosphate
  modified_base 6: mod_base = OTHER; note = 2'-deoxy-2'-fluoroadenosine-3'-phosphate
  modified_base 7: mod_base = OTHER; note = 2'-O-methyluridine-3'-phosphate
  modified_base 8: mod_base = OTHER; note = 2'-deoxy-2'-fluoroguanosine-3'-phosphate
  modified_base 9: mod_base = OTHER; note = 2'-O-methylcytidine-3'-phosphate
  modified_base 10: mod_base = OTHER; note = 2'-deoxy-2'-fluorocytidine-3'-phosphate
  modified_base 11: mod_base = OTHER; note = 2'-O-methylcytidine-3'-phosphate
  modified_base 12: mod_base = OTHER; note = 2'-O-methyluridine-3'-phosphate
  modified_base 13: mod_base = OTHER; note = 2'-O-methyluridine-3'-phosphate
  modified_base 14: mod_base = OTHER; note = 2'-deoxy-2'-fluorouridine-3'-phosphate
  modified_base 15: mod_base = OTHER; note = 2'-O-methylguanosine-3'-phosphate
  modified_base 16: mod_base = OTHER; note = 2'-deoxy-2'-fluorocytidine-3'-phosphate
  modified_base 17: mod_base = OTHER; note = 2'-O-methyladenosine-3'-phosphate
  modified_base 18: mod_base = OTHER; note = 2'-deoxy-2'-fluoroadenosine-3'-phosphate
  modified_base 19: mod_base = OTHER; note = 2'-O-methylcytidine-3'-phosphate
  modified_base 20: mod_base = OTHER; note = 2'-deoxy-2'-fluoroadenosine-3'-phosphate
  modified_base 21: mod_base = OTHER; note = 2'-O-methyladenosine-3'-phosphorothioate
  modified_base 22: mod_base = OTHER; note = 2'-O-methyluridine-3'-phosphorothioate
  modified_base 23: mod_base = OTHER; note = 2'-O-methyluridine
tcaaaatgccctttgcaacaatt

SEQ ID NO: 147 - RNA, 23 nt, synthetic construct
  source 1..23: mol_type = other RNA
  modified_base 1: mod_base = OTHER; note = 2'-O-methyluridine-3'-phosphorothioate
  modified_base 2: mod_base = OTHER; note = 2'-deoxy-2'-fluoroadenosine-3'-phosphorothioate
  modified_base 3: mod_base = OTHER; note = 2'-O-methylcytidine-3'-phosphate
  modified_base 4: mod_base = OTHER; note = 2'-deoxy-2'-fluoroadenosine-3'-phosphate
  modified_base 5: mod_base = OTHER; note = 2'-O-methylguanosine-3'-phosphate
  modified_base 6: mod_base = OTHER; note = 2'-deoxy-2'-fluoroguanosine-3'-phosphate
  modified_base 7: mod_base = OTHER; note = 2'-O-methyluridine-3'-phosphate
  modified_base 8: mod_base = OTHER; note = 2'-deoxy-2'-fluorouridine-3'-phosphate
  modified_base 9: mod_base = OTHER; note = 2'-O-methyladenosine-3'-phosphate
  modified_base 10: mod_base = OTHER; note = 2'-deoxy-2'-fluoroadenosine-3'-phosphate
  modified_base 11: mod_base = OTHER; note = 2'-O-methyluridine-3'-phosphate
  modified_base 12: mod_base = OTHER; note = 2'-O-methyladenosine-3'-phosphate
  modified_base 13: mod_base = OTHER; note = 2'-O-methyladenosine-3'-phosphate
  modified_base 14: mod_base = OTHER; note = 2'-deoxy-2'-fluoroadenosine-3'-phosphate
  modified_base 15: mod_base = OTHER; note = 2'-O-methylcytidine-3'-phosphate
  modified_base 16: mod_base = OTHER; note = 2'-deoxy-2'-fluoroadenosine-3'-phosphate
  modified_base 17: mod_base = OTHER; note = 2'-O-methyladenosine-3'-phosphate
  modified_base 18: mod_base = OTHER; note = 2'-deoxy-2'-fluorouridine-3'-phosphate
  modified_base 19: mod_base = OTHER; note = 2'-O-methylguanosine-3'-phosphate
  modified_base 20: mod_base = OTHER; note = 2'-deoxy-2'-fluoroadenosine-3'-phosphate
  modified_base 21: mod_base = OTHER; note = 2'-O-methylguanosine-3'-phosphorothioate
  modified_base 22: mod_base = OTHER; note = 2'-O-methyladenosine-3'-phosphorothioate
  modified_base 23: mod_base = OTHER; note = 2'-O-methyluridine
tacaggttaataaacaatgagat

SEQ ID NO: 148 - RNA, 23 nt, synthetic construct
  source 1..23: mol_type = other RNA
  modified_base 1: mod_base = OTHER; note = 2'-O-methyladenosine-3'-phosphorothioate
  modified_base 2: mod_base = OTHER; note = 2'-deoxy-2'-fluoroadenosine-3'-phosphorothioate
  modified_base 3: mod_base = OTHER; note = 2'-O-methyladenosine-3'-phosphate
  modified_base 4: mod_base = OTHER; note = 2'-deoxy-2'-fluoroguanosine-3'-phosphate
  modified_base 5: mod_base = OTHER; note = 2'-O-methylguanosine-3'-phosphate
  modified_base 6: mod_base = OTHER; note = 2'-deoxy-2'-fluoroguanosine-3'-phosphate
  modified_base 7: mod_base = OTHER; note = 2'-O-methyladenosine-3'-phosphate
  modified_base 8: mod_base = OTHER; note = 2'-deoxy-2'-fluorouridine-3'-phosphate
  modified_base 9: mod_base = OTHER; note = 2'-O-methyluridine-3'-phosphate
  modified_base 10: mod_base = OTHER; note = 2'-deoxy-2'-fluoroguanosine-3'-phosphate
  modified_base 11: mod_base = OTHER; note = 2'-O-methylcytidine-3'-phosphate
  modified_base 12: mod_base = OTHER; note = 2'-O-methyluridine-3'-phosphate
  modified_base 13: mod_base = OTHER; note = 2'-O-methyladenosine-3'-phosphate
  modified_base 14: mod_base = OTHER; note = 2'-deoxy-2'-fluorouridine-3'-phosphate
  modified_base 15: mod_base = OTHER; note = 2'-O-methyluridine-3'-phosphate
  modified_base 16: mod_base = OTHER; note = 2'-deoxy-2'-fluorouridine-3'-phosphate
  modified_base 17: mod_base = OTHER; note = 2'-O-methyluridine-3'-phosphate
  modified_base 18: mod_base = OTHER; note = 2'-deoxy-2'-fluoroguanosine-3'-phosphate
  modified_base 19: mod_base = OTHER; note = 2'-O-methyluridine-3'-phosphate
  modified_base 20: mod_base = OTHER; note = 2'-deoxy-2'-fluorouridine-3'-phosphate
  modified_base 21: mod_base = OTHER; note = 2'-O-methylguanosine-3'-phosphorothioate
  modified_base 22: mod_base = OTHER; note = 2'-O-methylguanosine-3'-phosphorothioate
  modified_base 23: mod_base = OTHER; note = 2'-O-methyladenosine
aaagggattgctattttgttgga

SEQ ID NO: 149 - RNA, 23 nt, synthetic construct
  source 1..23: mol_type = other RNA
  modified_base 1: mod_base = OTHER; note = 2'-O-methyladenosine-3'-phosphorothioate
  modified_base 2: mod_base = OTHER; note = 2'-deoxy-2'-fluoroadenosine-3'-phosphorothioate
  modified_base 3: mod_base = OTHER; note = 2'-O-methyluridine-3'-phosphate
  modified_base 4: mod_base = OTHER; note = 2'-deoxy-2'-fluoroadenosine-3'-phosphate
  modified_base 5: mod_base = OTHER; note = 2'-O-methylcytidine-3'-phosphate
  modified_base 6: mod_base = OTHER; note = 2'-deoxy-2'-fluoroadenosine-3'-phosphate
  modified_base 7: mod_base = OTHER; note = 2'-O-methylguanosine-3'-phosphate
  modified_base 8: mod_base = OTHER; note = 2'-deoxy-2'-fluoroguanosine-3'-phosphate
  modified_base 9: mod_base = OTHER; note = 2'-O-methyluridine-3'-phosphate
  modified_base 10: mod_base = OTHER; note = 2'-deoxy-2'-fluorouridine-3'-phosphate
  modified_base 11: mod_base = OTHER; note = 2'-O-methyladenosine-3'-phosphate
  modified_base 12: mod_base = OTHER; note = 2'-O-methyladenosine-3'-phosphate
  modified_base 13: mod_base = OTHER; note = 2'-O-methyluridine-3'-phosphate
  modified_base 14: mod_base = OTHER; note = 2'-deoxy-2'-fluoroadenosine-3'-phosphate
  modified_base 15: mod_base = OTHER; note = 2'-O-methyladenosine-3'-phosphate
  modified_base 16: mod_base = OTHER; note = 2'-deoxy-2'-fluoroadenosine-3'-phosphate
  modified_base 17: mod_base = OTHER; note = 2'-O-methylcytidine-3'-phosphate
  modified_base 18: mod_base = OTHER; note = 2'-deoxy-2'-fluoroadenosine-3'-phosphate
  modified_base 19: mod_base = OTHER; note = 2'-O-methyladenosine-3'-phosphate
  modified_base 20: mod_base = OTHER; note = 2'-deoxy-2'-fluorouridine-3'-phosphate
  modified_base 21: mod_base = OTHER; note = 2'-O-methylguanosine-3'-phosphorothioate
  modified_base 22: mod_base = OTHER; note = 2'-O-methyladenosine-3'-phosphorothioate
  modified_base 23: mod_base = OTHER; note = 2'-O-methylguanosine
aatacaggttaataaacaatgag

SEQ ID NO: 150 - RNA, 23 nt, synthetic construct
  source 1..23: mol_type = other RNA
  modified_base 1: mod_base = OTHER; note = 2'-O-methyluridine-3'-phosphorothioate
  modified_base 2: mod_base = OTHER; note = 2'-deoxy-2'-fluorouridine-3'-phosphorothioate
  modified_base 3: mod_base = OTHER; note = 2'-O-methylguanosine-3'-phosphate
  modified_base 4: mod_base = OTHER; note = 2'-deoxy-2'-fluoroadenosine-3'-phosphate
  modified_base 5: mod_base = OTHER; note = 2'-O-methyluridine-3'-phosphate
  modified_base 6: mod_base = OTHER; note = 2'-deoxy-2'-fluoroadenosine-3'-phosphate
  modified_base 7: mod_base = OTHER; note = 2'-O-methyluridine-3'-phosphate
  modified_base 8: mod_base = OTHER; note = 2'-deoxy-2'-fluorocytidine-3'-phosphate
  modified_base 9: mod_base = OTHER; note = 2'-O-methyluridine-3'-phosphate
  modified_base 10: mod_base = OTHER; note = 2'-deoxy-2'-fluorouridine-3'-phosphate
  modified_base 11: mod_base = OTHER; note = 2'-O-methylcytidine-3'-phosphate
  modified_base 12: mod_base = OTHER; note = 2'-O-methylcytidine-3'-phosphate
  modified_base 13: mod_base = OTHER; note = 2'-O-methylcytidine-3'-phosphate
  modified_base 14: mod_base = OTHER; note = 2'-deoxy-2'-fluoroadenosine-3'-phosphate
  modified_base 15: mod_base = OTHER; note = 2'-O-methylguanosine-3'-phosphate
  modified_base 16: mod_base = OTHER; note = 2'-deoxy-2'-fluorocytidine-3'-phosphate
  modified_base 17: mod_base = OTHER; note = 2'-O-methyluridine-3'-phosphate
  modified_base 18: mod_base = OTHER; note = 2'-deoxy-2'-fluoroguanosine-3'-phosphate
  modified_base 19: mod_base = OTHER; note = 2'-O-methyladenosine-3'-phosphate
  modified_base 20: mod_base = OTHER; note = 2'-deoxy-2'-fluorouridine-3'-phosphate
  modified_base 21: mod_base = OTHER; note = 2'-O-methyladenosine-3'-phosphorothioate
  modified_base 22: mod_base = OTHER; note = 2'-O-methylguanosine-3'-phosphorothioate
  modified_base 23: mod_base = OTHER; note = 2'-O-methyladenosine
ttgatatcttcccagctgataga

SEQ ID NO: 151 - RNA, 23 nt, synthetic construct
  source 1..23: mol_type = other RNA
  modified_base 1: mod_base = OTHER; note = 2'-O-methyluridine-3'-phosphorothioate
  modified_base 2: mod_base = OTHER; note = 2'-deoxy-2'-fluorouridine-3'-phosphorothioate
  modified_base 3: mod_base = OTHER; note = 2'-O-methylcytidine-3'-phosphate
  modified_base 4: mod_base = OTHER; note = 2'-deoxy-2'-fluorouridine-3'-phosphate
  modified_base 5: mod_base = OTHER; note = 2'-O-methyladenosine-3'-phosphate
  modified_base 6: mod_base = OTHER; note = 2'-deoxy-2'-fluoroadenosine-3'-phosphate
  modified_base 7: mod_base = OTHER; note = 2'-O-methyladenosine-3'-phosphate
  modified_base 8: mod_base = OTHER; note = 2'-deoxy-2'-fluoroadenosine-3'-phosphate
  modified_base 9: mod_base = OTHER; note = 2'-O-methylguanosine-3'-phosphate
  modified_base 10: mod_base = OTHER; note = 2'-deoxy-2'-fluoroguanosine-3'-phosphate
  modified_base 11: mod_base = OTHER; note = 2'-O-methyluridine-3'-phosphate
  modified_base 12: mod_base = OTHER; note = 2'-O-methyluridine-3'-phosphate
  modified_base 13: mod_base = OTHER; note = 2'-O-methylcytidine-3'-phosphate
  modified_base 14: mod_base = OTHER; note = 2'-deoxy-2'-fluorocytidine-3'-phosphate
  modified_base 15: mod_base = OTHER; note = 2'-O-methyluridine-3'-phosphate
  modified_base 16: mod_base = OTHER; note = 2'-deoxy-2'-fluoroadenosine-3'-phosphate
  modified_base 17: mod_base = OTHER; note = 2'-O-methylguanosine-3'-phosphate
  modified_base 18: mod_base = OTHER; note = 2'-deoxy-2'-fluoroguanosine-3'-phosphate
  modified_base 19: mod_base = OTHER; note = 2'-O-methyladenosine-3'-phosphate
  modified_base 20: mod_base = OTHER; note = 2'-deoxy-2'-fluorocytidine-3'-phosphate
  modified_base 21: mod_base = OTHER; note = 2'-O-methyladenosine-3'-phosphorothioate
  modified_base 22: mod_base = OTHER; note = 2'-O-methylcytidine-3'-phosphorothioate
  modified_base 23: mod_base = OTHER; note = 2'-O-methylcytidine
ttctaaaaggttcctaggacacc

SEQ ID NO: 152 - RNA, 23 nt, synthetic construct
  source 1..23: mol_type = other RNA
  modified_base 1: mod_base = OTHER; note = 2'-O-methyladenosine-3'-phosphorothioate
  modified_base 2: mod_base = OTHER; note = 2'-deoxy-2'-fluoroguanosine-3'-phosphorothioate
  modified_base 3: mod_base = OTHER; note = 2'-O-methylguanosine-3'-phosphate
  modified_base 4: mod_base = OTHER; note = 2'-deoxy-2'-fluoroguanosine-3'-phosphate
  modified_base 5: mod_base = OTHER; note = 2'-O-methyladenosine-3'-phosphate
  modified_base 6: mod_base = OTHER; note = 2'-deoxy-2'-fluorouridine-3'-phosphate
  modified_base 7: mod_base = OTHER; note = 2'-O-methyluridine-3'-phosphate
  modified_base 8: mod_base = OTHER; note = 2'-deoxy-2'-fluoroguanosine-3'-phosphate
  modified_base 9: mod_base = OTHER; note = 2'-O-methylcytidine-3'-phosphate
  modified_base 10: mod_base = OTHER; note = 2'-deoxy-2'-fluorouridine-3'-phosphate
  modified_base 11: mod_base = OTHER; note = 2'-O-methyladenosine-3'-phosphate
  modified_base 12: mod_base = OTHER; note = 2'-O-methyluridine-3'-phosphate
  modified_base 13: mod_base = OTHER; note = 2'-O-methyluridine-3'-phosphate
  modified_base 14: mod_base = OTHER; note = 2'-deoxy-2'-fluorouridine-3'-phosphate
  modified_base 15: mod_base = OTHER; note = 2'-O-methyluridine-3'-phosphate
  modified_base 16: mod_base = OTHER; note = 2'-deoxy-2'-fluoroguanosine-3'-phosphate
  modified_base 17: mod_base = OTHER; note = 2'-O-methyluridine-3'-phosphate
  modified_base 18: mod_base = OTHER; note = 2'-deoxy-2'-fluorouridine-3'-phosphate
  modified_base 19: mod_base = OTHER; note = 2'-O-methylguanosine-3'-phosphate
  modified_base 20: mod_base = OTHER; note = 2'-deoxy-2'-fluoroguanosine-3'-phosphate
  modified_base 21: mod_base = OTHER; note = 2'-O-methyladenosine-3'-phosphorothioate
  modified_base 22: mod_base = OTHER; note = 2'-O-methyladenosine-3'-phosphorothioate
  modified_base 23: mod_base = OTHER; note = 2'-O-methyladenosine
agggattgctattttgttggaaa

SEQ ID NO: 153 - RNA, 23 nt, synthetic construct
  source 1..23: mol_type = other RNA
  modified_base 1: mod_base = OTHER; note = 2'-O-methyladenosine-3'-phosphorothioate
  modified_base 2: mod_base = OTHER; note = 2'-deoxy-2'-fluorouridine-3'-phosphorothioate
  modified_base 3: mod_base = OTHER; note = 2'-O-methylcytidine-3'-phosphate
  modified_base 4: mod_base = OTHER; note = 2'-deoxy-2'-fluoroadenosine-3'-phosphate
  modified_base 5: mod_base = OTHER; note = 2'-O-methylguanosine-3'-phosphate
  modified_base 6: mod_base = OTHER; note = 2'-deoxy-2'-fluorouridine-3'-phosphate
  modified_base 7: mod_base = OTHER; note = 2'-O-methylguanosine-3'-phosphate
  modified_base 8: mod_base = OTHER; note = 2'-deoxy-2'-fluorocytidine-3'-phosphate
  modified_base 9: mod_base = OTHER; note = 2'-O-methylcytidine-3'-phosphate
  modified_base 10: mod_base = OTHER; note = 2'-deoxy-2'-fluorouridine-3'-phosphate
  modified_base 11: mod_base = OTHER; note = 2'-O-methyluridine-3'-phosphate
  modified_base 12: mod_base = OTHER; note = 2'-O-methyluridine-3'-phosphate
  modified_base 13: mod_base = OTHER; note = 2'-O-methylcytidine-3'-phosphate
  modified_base 14: mod_base = OTHER; note = 2'-deoxy-2'-fluorocytidine-3'-phosphate
  modified_base 15: mod_base = OTHER; note = 2'-O-methylguanosine-3'-phosphate
  modified_base 16: mod_base = OTHER; note = 2'-deoxy-2'-fluorocytidine-3'-phosphate
  modified_base 17: mod_base = OTHER; note = 2'-O-methyladenosine-3'-phosphate
  modified_base 18: mod_base = OTHER; note = 2'-deoxy-2'-fluorocytidine-3'-phosphate
  modified_base 19: mod_base = OTHER; note = 2'-O-methyladenosine-3'-phosphate
  modified_base 20: mod_base = OTHER; note = 2'-deoxy-2'-fluorocytidine-3'-phosphate
  modified_base 21: mod_base = OTHER; note = 2'-O-methylcytidine-3'-phosphorothioate
  modified_base 22: mod_base = OTHER; note = 2'-O-methylcytidine-3'-phosphorothioate
  modified_base 23: mod_base = OTHER; note = 2'-O-methylcytidine
atcagtgcctttccgcacacccc

SEQ ID NO: 154 - RNA, 23 nt, synthetic construct
  source 1..23: mol_type = other RNA
  modified_base 1: mod_base = OTHER; note = 2'-O-methyladenosine-3'-phosphorothioate
  modified_base 2: mod_base = OTHER; note = 2'-deoxy-2'-fluorouridine-3'-phosphorothioate
  modified_base 3: mod_base = OTHER; note = 2'-O-methylguanosine-3'-phosphate
  modified_base 4: mod_base = OTHER; note = 2'-deoxy-2'-fluoroadenosine-3'-phosphate
  modified_base 5: mod_base = OTHER; note = 2'-O-methyluridine-3'-phosphate
  modified_base 6: mod_base = OTHER; note = 2'-deoxy-2'-fluoroadenosine-3'-phosphate
  modified_base 7: mod_base = OTHER; note = 2'-O-methyladenosine-3'-phosphate
  modified_base 8: mod_base = OTHER; note = 2'-deoxy-2'-fluoroadenosine-3'-phosphate
  modified_base 9: mod_base = OTHER; note = 2'-O-methylguanosine-3'-phosphate
  modified_base 10: mod_base = OTHER; note = 2'-deoxy-2'-fluorouridine-3'-phosphate
  modified_base 11: mod_base = OTHER; note = 2'-O-methyladenosine-3'-phosphate
  modified_base 12: mod_base = OTHER; note = 2'-O-methylcytidine-3'-phosphate
  modified_base 13: mod_base = OTHER; note = 2'-O-methyluridine-3'-phosphate
  modified_base 14: mod_base = OTHER; note = 2'-deoxy-2'-fluoroguanosine-3'-phosphate
  modified_base 15: mod_base = OTHER; note = 2'-O-methylguanosine-3'-phosphate
  modified_base 16: mod_base = OTHER; note = 2'-deoxy-2'-fluorouridine-3'-phosphate
  modified_base 17: mod_base = OTHER; note = 2'-O-methyluridine-3'-phosphate
  modified_base 18: mod_base = OTHER; note = 2'-deoxy-2'-fluorouridine-3'-phosphate
  modified_base 19: mod_base = OTHER; note = 2'-O-methylcytidine-3'-phosphate
  modified_base 20: mod_base = OTHER; note = 2'-deoxy-2'-fluoroadenosine-3'-phosphate
  modified_base 21: mod_base = OTHER; note = 2'-O-methyladenosine-3'-phosphorothioate
  modified_base 22: mod_base = OTHER; note = 2'-O-methyladenosine-3'-phosphorothioate
  modified_base 23: mod_base = OTHER; note = 2'-O-methyladenosine
atgataaagtactggtttcaaaa

SEQ ID NO: 155 - RNA, 23 nt, synthetic construct
  source 1..23: mol_type = other RNA
  modified_base 1: mod_base = OTHER; note = 2'-O-methyluridine-3'-phosphorothioate
  modified_base 2: mod_base = OTHER; note = 2'-deoxy-2'-fluoroadenosine-3'-phosphorothioate
  modified_base 3: mod_base = OTHER; note = 2'-O-methyluridine-3'-phosphate
  modified_base 4: mod_base = OTHER; note = 2'-deoxy-2'-fluoroadenosine-3'-phosphate
  modified_base 5: mod_base = OTHER; note = 2'-O-methyluridine-3'-phosphate
  modified_base 6: mod_base = OTHER; note = 2'-deoxy-2'-fluoroadenosine-3'-phosphate
  modified_base 7: mod_base = OTHER; note = 2'-O-methyluridine-3'-phosphate
  modified_base 8: mod_base = OTHER; note = 2'-deoxy-2'-fluoroadenosine-3'-phosphate
  modified_base 9: mod_base = OTHER; note = 2'-O-methylguanosine-3'-phosphate
  modified_base 10: mod_base = OTHER; note = 2'-deoxy-2'-fluoroadenosine-3'-phosphate
  modified_base 11: mod_base = OTHER; note = 2'-O-methylcytidine-3'-phosphate
  modified_base 12: mod_base = OTHER; note = 2'-O-methyluridine-3'-phosphate
  modified_base 13: mod_base = OTHER; note = 2'-O-methyluridine-3'-phosphate
  modified_base 14: mod_base = OTHER; note = 2'-deoxy-2'-fluorouridine-3'-phosphate
  modified_base 15: mod_base = OTHER; note = 2'-O-methylguanosine-3'-phosphate
  modified_base 16: mod_base = OTHER; note = 2'-deoxy-2'-fluoroguanosine-3'-phosphate
  modified_base 17: mod_base = OTHER; note = 2'-O-methyladenosine-3'-phosphate
  modified_base 18: mod_base = OTHER; note = 2'-deoxy-2'-fluoroadenosine-3'-phosphate
  modified_base 19: mod_base = OTHER; note = 2'-O-methylguanosine-3'-phosphate
  modified_base 20: mod_base = OTHER; note = 2'-deoxy-2'-fluorouridine-3'-phosphate
  modified_base 21: mod_base = OTHER; note = 2'-O-methyladenosine-3'-phosphorothioate
  modified_base 22: mod_base = OTHER; note = 2'-O-methylcytidine-3'-phosphorothioate
  modified_base 23: mod_base = OTHER; note = 2'-O-methyluridine
tatatatagactttggaagtact

SEQ ID NO: 156 - RNA, 23 nt, synthetic construct
  source 1..23: mol_type = other RNA
  modified_base 1: mod_base = OTHER; note = 2'-O-methyladenosine-3'-phosphorothioate
  modified_base 2: mod_base = OTHER; note = 2'-deoxy-2'-fluorouridine-3'-phosphorothioate
  modified_base 3: mod_base = OTHER; note = 2'-O-methyluridine-3'-phosphate
  modified_base 4: mod_base = OTHER; note = 2'-deoxy-2'-fluorouridine-3'-phosphate
  modified_base 5: mod_base = OTHER; note = 2'-O-methylcytidine-3'-phosphate
  modified_base 6: mod_base = OTHER; note = 2'-deoxy-2'-fluorouridine-3'-phosphate
  modified_base 7: mod_base = OTHER; note = 2'-O-methyladenosine-3'-phosphate
  modified_base 8: mod_base = OTHER; note = 2'-deoxy-2'-fluoroadenosine-3'-phosphate
  modified_base 9: mod_base = OTHER; note = 2'-O-methyladenosine-3'-phosphate
  modified_base 10: mod_base = OTHER; note = 2'-deoxy-2'-fluoroadenosine-3'-phosphate
  modified_base 11: mod_base = OTHER; note = 2'-O-methylguanosine-3'-phosphate
  modified_base 12: mod_base = OTHER; note = 2'-O-methylguanosine-3'-phosphate
  modified_base 13: mod_base = OTHER; note = 2'-O-methyluridine-3'-phosphate
  modified_base 14: mod_base = OTHER; note = 2'-deoxy-2'-fluorouridine-3'-phosphate
  modified_base 15: mod_base = OTHER; note = 2'-O-methylcytidine-3'-phosphate
  modified_base 16: mod_base = OTHER; note = 2'-deoxy-2'-fluorocytidine-3'-phosphate
  modified_base 17: mod_base = OTHER; note = 2'-O-methyluridine-3'-phosphate
  modified_base 18: mod_base = OTHER; note = 2'-deoxy-2'-fluoroadenosine-3'-phosphate
  modified_base 19: mod_base = OTHER; note = 2'-O-methylguanosine-3'-phosphate
  modified_base 20: mod_base = OTHER; note = 2'-deoxy-2'-fluoroguanosine-3'-phosphate
  modified_base 21: mod_base = OTHER; note = 2'-O-methyladenosine-3'-phosphorothioate
  modified_base 22: mod_base = OTHER; note = 2'-O-methylcytidine-3'-phosphorothioate
  modified_base 23: mod_base = OTHER; note = 2'-O-methyladenosine
atttctaaaaggttcctaggaca

SEQ ID NO: 157 - RNA, 23 nt, synthetic construct
  source 1..23: mol_type = other RNA
  modified_base 1: mod_base = OTHER; note = 2'-O-methyluridine-3'-phosphorothioate
  modified_base 2: mod_base = OTHER; note = 2'-deoxy-2'-fluorouridine-3'-phosphorothioate
  modified_base 3: mod_base = OTHER; note = 2'-O-methylcytidine-3'-phosphate
  modified_base 4: mod_base = OTHER; note = 2'-deoxy-2'-fluorocytidine-3'-phosphate
  modified_base 5: mod_base = OTHER; note = 2'-O-methyladenosine-3'-phosphate
  modified_base 6: mod_base = OTHER; note = 2'-deoxy-2'-fluoroadenosine-3'-phosphate
  modified_base 7: mod_base = OTHER; note = 2'-O-methyladenosine-3'-phosphate
  modified_base 8: mod_base = OTHER; note = 2'-deoxy-2'-fluoroadenosine-3'-phosphate
  modified_base 9: mod_base = OTHER; note = 2'-O-methyluridine-3'-phosphate
  modified_base 10: mod_base = OTHER; note = 2'-deoxy-2'-fluorouridine-3'-phosphate
  modified_base 11: mod_base = OTHER; note = 2'-O-methyluridine-3'-phosphate
  modified_base 12: mod_base = OTHER; note = 2'-O-methyluridine-3'-phosphate
  modified_base 13: mod_base = OTHER; note = 2'-O-methylcytidine-3'-phosphate
  modified_base 14: mod_base = OTHER; note = 2'-deoxy-2'-fluorocytidine-3'-phosphate
  modified_base 15: mod_base = OTHER; note = 2'-O-methyluridine-3'-phosphate
  modified_base 16: mod_base = OTHER; note = 2'-deoxy-2'-fluorocytidine-3'-phosphate
  modified_base 17: mod_base = OTHER; note = 2'-O-methyladenosine-3'-phosphate
  modified_base 18: mod_base = OTHER; note = 2'-deoxy-2'-fluoroguanosine-3'-phosphate
  modified_base 19: mod_base = OTHER; note = 2'-O-methylguanosine-3'-phosphate
  modified_base 20: mod_base = OTHER; note = 2'-deoxy-2'-fluoroadenosine-3'-phosphate
  modified_base 21: mod_base = OTHER; note = 2'-O-methylguanosine-3'-phosphorothioate
  modified_base 22: mod_base = OTHER; note = 2'-O-methyladenosine-3'-phosphorothioate
  modified_base 23: mod_base = OTHER; note = 2'-O-methyladenosine
ttccaaaattttcctcaggagaa

SEQ ID NO: 158 - RNA, 23 nt, synthetic construct
  source 1..23: mol_type = other RNA
  modified_base 1: mod_base = OTHER; note = 2'-O-methyladenosine-3'-phosphorothioate
  modified_base 2: mod_base = OTHER; note = 2'-deoxy-2'-fluorouridine-3'-phosphorothioate
  modified_base 3: mod_base = OTHER; note = 2'-O-methyluridine-3'-phosphate
  modified_base 4: mod_base = OTHER; note = 2'-deoxy-2'-fluorouridine-3'-phosphate
  modified_base 5: mod_base = OTHER; note = 2'-O-methylcytidine-3'-phosphate
  modified_base 6: mod_base = OTHER; note = 2'-deoxy-2'-fluoroadenosine-3'-phosphate
  modified_base 7: mod_base = OTHER; note = 2'-O-methylguanosine-3'-phosphate
  modified_base 8: mod_base = OTHER; note = 2'-deoxy-2'-fluorocytidine-3'-phosphate
  modified_base 9: mod_base = OTHER; note = 2'-O-methyladenosine-3'-phosphate
  modified_base 10: mod_base = OTHER; note = 2'-deoxy-2'-fluoroadenosine-3'-phosphate
  modified_base 11: mod_base = OTHER; note = 2'-O-methylcytidine-3'-phosphate
  modified_base 12: mod_base = OTHER; note = 2'-O-methyladenosine-3'-phosphate
  modified_base 13: mod_base = OTHER; note = 2'-O-methyluridine-3'-phosphate
  modified_base 14: mod_base = OTHER; note = 2'-deoxy-2'-fluorouridine-3'-phosphate
  modified_base 15: mod_base = OTHER; note = 2'-O-methylcytidine-3'-phosphate
  modified_base 16: mod_base = OTHER; note = 2'-deoxy-2'-fluorocytidine-3'-phosphate
  modified_base 17: mod_base = OTHER; note = 2'-O-methylguanosine-3'-phosphate
  modified_base 18: mod_base = OTHER; note = 2'-deoxy-2'-fluoroguanosine-3'-phosphate
  modified_base 19: mod_base = OTHER; note = 2'-O-methyladenosine-3'-phosphate
  modified_base 20: mod_base = OTHER; note = 2'-deoxy-2'-fluoroguanosine-3'-phosphate
  modified_base 21: mod_base = OTHER; note = 2'-O-methylcytidine-3'-phosphorothioate
  modified_base 22: mod_base = OTHER; note = 2'-O-methyladenosine-3'-phosphorothioate
  modified_base 23: mod_base = OTHER; note = 2'-O-methyluridine
atttcagcaacattccggagcat

SEQ ID NO: 159 - RNA, 23 nt, synthetic construct
  source 1..23: mol_type = other RNA
  modified_base 1: mod_base = OTHER; note = 2'-O-methyluridine-3'-phosphorothioate
  modified_base 2: mod_base = OTHER; note = 2'-deoxy-2'-fluoroadenosine-3'-phosphorothioate
  modified_base 3: mod_base = OTHER; note = 2'-O-methyluridine-3'-phosphate
  modified_base 4: mod_base = OTHER; note = 2'-deoxy-2'-fluorouridine-3'-phosphate
  modified_base 5: mod_base = OTHER; note = 2'-O-methylguanosine-3'-phosphate
  modified_base 6: mod_base = OTHER; note = 2'-deoxy-2'-fluoroguanosine-3'-phosphate
  modified_base 7: mod_base = OTHER; note = 2'-O-methyluridine-3'-phosphate
  modified_base 8: mod_base = OTHER; note = 2'-deoxy-2'-fluorocytidine-3'-phosphate
  modified_base 9: mod_base = OTHER; note = 2'-O-methyluridine-3'-phosphate
  modified_base 10: mod_base = OTHER; note = 2'-deoxy-2'-fluorocytidine-3'-phosphate
  modified_base 11: mod_base = OTHER; note = 2'-O-methylcytidine-3'-phosphate
  modified_base 12: mod_base = OTHER; note = 2'-O-methylcytidine-3'-phosphate
  modified_base 13: mod_base = OTHER; note = 2'-O-methylcytidine-3'-phosphate
  modified_base 14: mod_base = OTHER; note = 2'-deoxy-2'-fluoroadenosine-3'-phosphate
  modified_base 15: mod_base = OTHER; note = 2'-O-methylcytidine-3'-phosphate
  modified_base 16: mod_base = OTHER; note = 2'-deoxy-2'-fluoroadenosine-3'-phosphate
  modified_base 17: mod_base = OTHER; note = 2'-O-methyladenosine-3'-phosphate
  modified_base 18: mod_base = OTHER; note = 2'-deoxy-2'-fluoroadenosine-3'-phosphate
  modified_base 19: mod_base = OTHER; note = 2'-O-methylcytidine-3'-phosphate
  modified_base 20: mod_base = OTHER; note = 2'-deoxy-2'-fluoroadenosine-3'-phosphate
  modified_base 21: mod_base = OTHER; note = 2'-O-methylcytidine-3'-phosphorothioate
  modified_base 22: mod_base = OTHER; note = 2'-O-methyladenosine-3'-phosphorothioate
  modified_base 23: mod_base = OTHER; note = 2'-O-methylguanosine
tattggtctccccacaaacacag

SEQ ID NO: 160 - RNA, 21 nt, synthetic construct
  source 1..21: mol_type = other RNA
  modified_base 1: mod_base = OTHER; note = 2'-deoxy-2'-fluoroguanosine-3'-phosphorothioate
  modified_base 2: mod_base = OTHER; note = 2'-O-methyladenosine-3'-phosphorothioate
  modified_base 3: mod_base = OTHER; note = 2'-deoxy-2'-fluoroadenosine-3'-phosphate
  modified_base 4: mod_base = OTHER; note = 2'-O-methyluridine-3'-phosphate
  modified_base 5: mod_base = OTHER; note = 2'-deoxy-2'-fluoroguanosine-3'-phosphate
  modified_base 6: mod_base = OTHER; note = 2'-O-methyluridine-3'-phosphate
  modified_base 7: mod_base = OTHER; note = 2'-deoxy-2'-fluoroguanosine-3'-phosphate
  modified_base 8: mod_base = OTHER; note = 2'-O-methyladenosine-3'-phosphate
  modified_base 9: mod_base = OTHER; note = 2'-deoxy-2'-fluoroadenosine-3'-phosphate
  modified_base 10: mod_base = OTHER; note = 2'-deoxy-2'-fluoroadenosine-3'-phosphate
  modified_base 11: mod_base = OTHER; note = 2'-deoxy-2'-fluoroguanosine-3'-phosphate
  modified_base 12: mod_base = OTHER; note = 2'-O-methyluridine-3'-phosphate
  modified_base 13: mod_base = OTHER; note = 2'-deoxy-2'-fluorocytidine-3'-phosphate
  modified_base 14: mod_base = OTHER; note = 2'-O-methyladenosine-3'-phosphate
  modified_base 15: mod_base = OTHER; note = 2'-deoxy-2'-fluorouridine-3'-phosphate
  modified_base 16: mod_base = OTHER; note = 2'-O-methylcytidine-3'-phosphate
  modified_base 17: mod_base = OTHER; note = 2'-deoxy-2'-fluoroguanosine-3'-phosphate
  modified_base 18: mod_base = OTHER; note = 2'-O-methyladenosine-3'-phosphate
  modified_base 19: mod_base = OTHER; note = 2'-deoxy-2'-fluorocytidine-3'-phosphate
  modified_base 20: mod_base = OTHER; note = 2'-O-methyladenosine-3'-phosphate
  modified_base 21: mod_base = OTHER; note = 2'-deoxy-2'-fluoroadenosine-3'-phosphate ((2S,4R)-1-[29-[[2-(acetylamino)-2-deoxy-beta-D-galactopyra nosyl]oxy]-14,14-bis[[3-[[3-[[5-[[2-(acetylamino)-2-deoxy-b eta-D-galactopyranosyl]oxy]-1-oxopentyl]amino]propyl]amino] -3-oxopropoxy]methyl]-1,12,19,25-tetraoxo-16-oxa-13,20,24-t riazanonacos-1-yl]-4-hydroxy-2-pyrrolidinyl)methyl ester
gaatgtgaaagtcatcgacaa

SEQ ID NO: 161 - RNA, 21 nt, synthetic construct
  source 1..21: mol_type = other RNA
  modified_base 1: mod_base = OTHER; note = 2'-O-methylguanosine-3'-phosphorothioate
  modified_base 2: mod_base = OTHER; note = 2'-O-methyladenosine-3'-phosphorothioate
  modified_base 3: mod_base = OTHER; note = 2'-deoxy-2'-fluoroadenosine-3'-phosphate
  modified_base 4: mod_base = OTHER; note = 2'-O-methyluridine-3'-phosphate
  modified_base 5: mod_base = OTHER; note = 2'-deoxy-2'-fluoroguanosine-3'-phosphate
  modified_base 6: mod_base = OTHER; note = 2'-O-methyluridine-3'-phosphate
  modified_base 7: mod_base = OTHER; note = 2'-deoxy-2'-fluoroguanosine-3'-phosphate
  modified_base 8: mod_base = OTHER; note = 2'-O-methyladenosine-3'-phosphate
  modified_base 9: mod_base = OTHER; note = 2'-deoxy-2'-fluoroadenosine-3'-phosphate
  modified_base 10: mod_base = OTHER; note = 2'-deoxy-2'-fluoroadenosine-3'-phosphate
  modified_base 11: mod_base = OTHER; note = 2'-deoxy-2'-fluoroguanosine-3'-phosphate
  modified_base 12: mod_base = OTHER; note = 2'-O-methyluridine-3'-phosphate
  modified_base 13: mod_base = OTHER; note = 2'-deoxy-2'-fluorocytidine-3'-phosphate
  modified_base 14: mod_base = OTHER; note = 2'-O-methyladenosine-3'-phosphate
  modified_base 15: mod_base = OTHER; note = 2'-deoxy-2'-fluorouridine-3'-phosphate
  modified_base 16: mod_base = OTHER; note = 2'-O-methylcytidine-3'-phosphate
  modified_base 17: mod_base = OTHER; note = 2'-deoxy-2'-fluoroguanosine-3'-phosphate
  modified_base 18: mod_base = OTHER; note = 2'-O-methyladenosine-3'-phosphate
  modified_base 19: mod_base = OTHER; note = 2'-deoxy-2'-fluorocytidine-3'-phosphate
  modified_base 20: mod_base = OTHER; note = 2'-O-methyladenosine-3'-phosphate
  modified_base 21: mod_base = OTHER; note = 2'-deoxy-2'-fluoroadenosine-3'-phosphate ((2S,4R)-1-[29-[[2-(acetylamino)-2-deoxy-beta-D-galactopyra nosyl]oxy]-14,14-bis[[3-[[3-[[5-[[2-(acetylamino)-2-deoxy-b eta-D-galactopyranosyl]oxy]-1-oxopentyl]amino]propyl]amino] -3-oxopropoxy]methyl]-1,12,19,25-tetraoxo-16-oxa-13,20,24-t riazanonacos-1-yl]-4-hydroxy-2-pyrrolidinyl)methyl ester
gaatgtgaaagtcatcgacaa

SEQ ID NO: 162 - RNA, 21 nt, synthetic construct
  source 1..21: mol_type = other RNA
  modified_base 1: mod_base = OTHER; note = 2'-O-methylguanosine-3'-phosphorothioate
  modified_base 2: mod_base = OTHER; note = 2'-O-methyladenosine-3'-phosphorothioate
  modified_base 3: mod_base = OTHER; note = 2'-O-methyladenosine-3'-phosphate
  modified_base 4: mod_base = OTHER; note = 2'-O-methyluridine-3'-phosphate
  modified_base 5: mod_base = OTHER; note = 2'-O-methylguanosine-3'-phosphate
  modified_base 6: mod_base = OTHER; note = 2'-O-methyluridine-3'-phosphate
  modified_base 7: mod_base = OTHER; note = 2'-deoxy-2'-fluoroguanosine-3'-phosphate
  modified_base 8: mod_base = OTHER; note = 2'-O-methyladenosine-3'-phosphate
  modified_base 9: mod_base = OTHER; note = 2'-deoxy-2'-fluoroadenosine-3'-phosphate
  modified_base 10: mod_base = OTHER; note = 2'-deoxy-2'-fluoroadenosine-3'-phosphate
  modified_base 11: mod_base = OTHER; note = 2'-deoxy-2'-fluoroguanosine-3'-phosphate
  modified_base 12: mod_base = OTHER; note = 2'-O-methyluridine-3'-phosphate
  modified_base 13: mod_base = OTHER; note = 2'-O-methylcytidine-3'-phosphate
  modified_base 14: mod_base = OTHER; note = 2'-O-methyladenosine-3'-phosphate
  modified_base 15: mod_base = OTHER; note = 2'-O-methyluridine-3'-phosphate
  modified_base 16: mod_base = OTHER; note = 2'-deoxy-2'-fluorocytidine-3'-phosphate
  modified_base 17: mod_base = OTHER; note = 2'-O-methylguanosine-3'-phosphate
  modified_base 18: mod_base = OTHER; note = 2'-O-methyladenosine-3'-phosphate
  modified_base 19: mod_base = OTHER; note = 2'-O-methylcytidine-3'-phosphate
  modified_base 20: mod_base = OTHER; note = 2'-O-methyladenosine-3'-phosphate
  modified_base 21: mod_base = OTHER; note = 2'-O-methyladenosine-3'-phosphate ((2S,4R)-1-[29-[[2-(acetylamino)-2-deoxy-beta-D-galactopyra nosyl]oxy]-14,14-bis[[3-[[3-[[5-[[2-(acetylamino)-2-deoxy-b eta-D-galactopyranosyl]oxy]-1-oxopentyl]amino]propyl]amino] -3-oxopropoxy]methyl]-1,12,19,25-tetraoxo-16-oxa-13,20,24-t riazanonacos-1-yl]-4-hydroxy-2-pyrrolidinyl)methyl ester
gaatgtgaaagtcatcgacaa

SEQ ID NO: 163 - RNA, 21 nt, synthetic construct
  source 1..21: mol_type = other RNA
  modified_base 1: mod_base = OTHER; note = 2'-O-methylguanosine-3'-phosphorothioate
  modified_base 2: mod_base = OTHER; note = 2'-O-methyladenosine-3'-phosphorothioate
  modified_base 3: mod_base = OTHER; note = 2'-O-methyladenosine-3'-phosphate
  modified_base 4: mod_base = OTHER; note = 2'-O-methyluridine-3'-phosphate
  modified_base 5: mod_base = OTHER; note = 2'-O-methylguanosine-3'-phosphate
  modified_base 6: mod_base = OTHER; note = 2'-O-methyluridine-3'-phosphate
  modified_base 7: mod_base = OTHER; note = 2'-deoxy-2'-fluoroguanosine-3'-phosphate
  modified_base 8: mod_base = OTHER; note = 2'-O-methyladenosine-3'-phosphate
  modified_base 9: mod_base = OTHER; note = 2'-deoxy-2'-fluoroadenosine-3'-phosphate
  modified_base 10: mod_base = OTHER; note = 2'-deoxy-2'-fluoroadenosine-3'-phosphate
  modified_base 11: mod_base = OTHER; note = 2'-deoxy-2'-fluoroguanosine-3'-phosphate
  modified_base 12: mod_base = OTHER; note = 2'-O-methyluridine-3'-phosphate
  modified_base 13: mod_base = OTHER; note = 2'-O-methylcytidine-3'-phosphate
  modified_base 14: mod_base = OTHER; note = 2'-O-methyladenosine-3'-phosphate
  modified_base 15: mod_base = OTHER; note = 2'-O-methyluridine-3'-phosphate
  modified_base 16: mod_base = OTHER; note = 2'-O-methylcytidine-3'-phosphate
  modified_base 17: mod_base = OTHER; note = 2'-O-methylguanosine-3'-phosphate
  modified_base 18: mod_base = OTHER; note = 2'-O-methyladenosine-3'-phosphate
  modified_base 19: mod_base = OTHER; note = 2'-O-methylcytidine-3'-phosphate
  modified_base 20: mod_base = OTHER; note = 2'-O-methyladenosine-3'-phosphate
  modified_base 21: mod_base = OTHER; note = 2'-O-methyladenosine-3'-phosphate ((2S,4R)-1-[29-[[2-(acetylamino)-2-deoxy-beta-D-galactopyra nosyl]oxy]-14,14-bis[[3-[[3-[[5-[[2-(acetylamino)-2-deoxy-b eta-D-galactopyranosyl]oxy]-1-oxopentyl]amino]propyl]amino] -3-oxopropoxy]methyl]-1,12,19,25-tetraoxo-16-oxa-13,20,24-t riazanonacos-1-yl]-4-hydroxy-2-pyrrolidinyl)methyl ester
gaatgtgaaagtcatcgacaa

SEQ ID NO: 164 - RNA, 21 nt, synthetic construct
  source 1..21: mol_type = other RNA
  modified_base 1: mod_base = OTHER; note = 2'-O-methylguanosine-3'-phosphorothioate
  modified_base 2: mod_base = OTHER; note = 2'-O-methyladenosine-3'-phosphorothioate
  modified_base 3: mod_base = OTHER; note = 2'-O-methyladenosine-3'-phosphate
  modified_base 4: mod_base = OTHER; note = 2'-O-methyluridine-3'-phosphate
  modified_base 5: mod_base = OTHER; note = 2'-O-methylguanosine-3'-phosphate
  modified_base 6: mod_base = OTHER; note = 2'-O-methyluridine-3'-phosphate
  modified_base 7: mod_base = OTHER; note = 2'-deoxy-2'-fluoroguanosine-3'-phosphate
  modified_base 8: mod_base = OTHER; note = 2'-O-methyladenosine-3'-phosphate
  modified_base 9: mod_base = OTHER; note = 2'-O-methyladenosine-3'-phosphate
  modified_base 10: mod_base = OTHER; note = 2'-deoxy-2'-fluoroadenosine-3'-phosphate
  modified_base 11: mod_base = OTHER; note = 2'-deoxy-2'-fluoroguanosine-3'-phosphate
  modified_base 12: mod_base = OTHER; note = 2'-O-methyluridine-3'-phosphate
  modified_base 13: mod_base = OTHER; note = 2'-O-methylcytidine-3'-phosphate
  modified_base 14: mod_base = OTHER; note = 2'-O-methyladenosine-3'-phosphate
  modified_base 15: mod_base = OTHER; note = 2'-O-methyluridine-3'-phosphate
  modified_base 16: mod_base = OTHER; note = 2'-O-methylcytidine-3'-phosphate
  modified_base 17: mod_base = OTHER; note = 2'-O-methylguanosine-3'-phosphate
  modified_base 18: mod_base = OTHER; note = 2'-O-methyladenosine-3'-phosphate
  modified_base 19: mod_base = OTHER; note = 2'-O-methylcytidine-3'-phosphate
  modified_base 20: mod_base = OTHER; note = 2'-O-methyladenosine-3'-phosphate
  modified_base 21: mod_base = OTHER; note = 2'-O-methyladenosine-3'-phosphate ((2S,4R)-1-[29-[[2-(acetylamino)-2-deoxy-beta-D-galactopyra nosyl]oxy]-14,14-bis[[3-[[3-[[5-[[2-(acetylamino)-2-deoxy-b eta-D-galactopyranosyl]oxy]-1-oxopentyl]amino]propyl]amino] -3-oxopropoxy]methyl]-1,12,19,25-tetraoxo-16-oxa-13,20,24-t riazanonacos-1-yl]-4-hydroxy-2-pyrrolidinyl)methyl ester
gaatgtgaaagtcatcgacaa

SEQ ID NO: 165 - RNA, 21 nt, synthetic construct
  source 1..21: mol_type = other RNA
  modified_base 1: mod_base = OTHER; note = 2'-O-methylguanosine-3'-phosphorothioate
  modified_base 2: mod_base = OTHER; note = 2'-O-methyladenosine-3'-phosphorothioate
  modified_base 3: mod_base = OTHER; note = 2'-O-methyladenosine-3'-phosphate
  modified_base 4: mod_base = OTHER; note = 2'-O-methyluridine-3'-phosphate
  modified_base 5: mod_base = OTHER; note = 2'-O-methylguanosine-3'-phosphate
  modified_base 6: mod_base = OTHER; note = 2'-O-methyluridine-3'-phosphate
  modified_base 7: mod_base = OTHER; note = 2'-deoxy-2'-fluoroguanosine-3'-phosphate
  modified_base 8: mod_base = OTHER; note = 2'-O-methyladenosine-3'-phosphate
  modified_base 9: mod_base = OTHER; note = 2'-O-methyladenosine-3'-phosphate
  modified_base 10: mod_base = OTHER; note = 2'-O-methyladenosine-3'-phosphate
  modified_base 11: mod_base = OTHER; note = 2'-deoxy-2'-fluoroguanosine-3'-phosphate
  modified_base 12: mod_base = OTHER; note = 2'-O-methyluridine-3'-phosphate
  modified_base 13: mod_base = OTHER; note = 2'-O-methylcytidine-3'-phosphate
  modified_base 14: mod_base = OTHER; note = 2'-O-methyladenosine-3'-phosphate
  modified_base 15: mod_base = OTHER; note = 2'-O-methyluridine-3'-phosphate
  modified_base 16: mod_base = OTHER; note = 2'-O-methylcytidine-3'-phosphate
  modified_base 17: mod_base = OTHER; note = 2'-deoxy-2'-fluoroguanosine-3'-phosphate
  modified_base 18: mod_base = OTHER; note = 2'-O-methyladenosine-3'-phosphate
  modified_base 19: mod_base = OTHER; note = 2'-O-methylcytidine-3'-phosphate
  modified_base 20: mod_base = OTHER; note = 2'-O-methyladenosine-3'-phosphate
  modified_base 21: mod_base = OTHER; note = 2'-O-methyladenosine-3'-phosphate ((2S,4R)-1-[29-[[2-(acetylamino)-2-deoxy-beta-D-galactopyra nosyl]oxy]-14,14-bis[[3-[[3-[[5-[[2-(acetylamino)-2-deoxy-b eta-D-galactopyranosyl]oxy]-1-oxopentyl]amino]propyl]amino] -3-oxopropoxy]methyl]-1,12,19,25-tetraoxo-16-oxa-13,20,24-t riazanonacos-1-yl]-4-hydroxy-2-pyrrolidinyl)methyl ester
gaatgtgaaagtcatcgacaa

SEQ ID NO: 166 - RNA, 21 nt, synthetic construct
  source 1..21: mol_type = other RNA
  modified_base 1: mod_base = OTHER; note = 2'-O-methylguanosine-3'-phosphorothioate
  modified_base 2: mod_base = OTHER; note = 2'-O-methyladenosine-3'-phosphorothioate
  modified_base 3: mod_base = OTHER; note = 2'-O-methyladenosine-3'-phosphate
  modified_base 4: mod_base = OTHER; note = 2'-O-methyluridine-3'-phosphate
  modified_base 5: mod_base = OTHER; note = 2'-O-methylguanosine-3'-phosphate
  modified_base 6: mod_base = OTHER; note = 2'-O-methyluridine-3'-phosphate
  modified_base 7: mod_base = OTHER; note = 2'-O-methylguanosine-3'-phosphate
  modified_base 8: mod_base = OTHER; note = 2'-O-methyladenosine-3'-phosphate
  modified_base 9: mod_base = OTHER; note = 2'-O-methyladenosine-3'-phosphate
  modified_base 10: mod_base = OTHER; note = 2'-O-methyladenosine-3'-phosphate
  modified_base 11: mod_base = OTHER; note = 2'-deoxy-2'-fluoroguanosine-3'-phosphate
  modified_base 12: mod_base = OTHER; note = 2'-O-methyluridine-3'-phosphate
  modified_base 13: mod_base = OTHER; note = 2'-O-methylcytidine-3'-phosphate
  modified_base 14: mod_base = OTHER; note = 2'-O-methyladenosine-3'-phosphate
  modified_base 15: mod_base = OTHER; note = 2'-O-methyluridine-3'-phosphate
  modified_base 16: mod_base = OTHER; note = 2'-O-methylcytidine-3'-phosphate
  modified_base 17: mod_base = OTHER; note = 2'-deoxy-2'-fluoroguanosine-3'-phosphate
  modified_base 18: mod_base = OTHER; note = 2'-O-methyladenosine-3'-phosphate
  modified_base 19: mod_base = OTHER; note = 2'-O-methylcytidine-3'-phosphate
  modified_base 20: mod_base = OTHER; note = 2'-O-methyladenosine-3'-phosphate
  modified_base 21: mod_base = OTHER; note = 2'-O-methyladenosine-3'-phosphate ((2S,4R)-1-[29-[[2-(acetylamino)-2-deoxy-beta-D-galactopyra nosyl]oxy]-14,14-bis[[3-[[3-[[5-[[2-(acetylamino)-2-deoxy-b eta-D-galactopyranosyl]oxy]-1-oxopentyl]amino]propyl]amino] -3-oxopropoxy]methyl]-1,12,19,25-tetraoxo-16-oxa-13,20,24-t riazanonacos-1-yl]-4-hydroxy-2-pyrrolidinyl)methyl ester
gaatgtgaaagtcatcgacaa

SEQ ID NO: 167 - RNA, 21 nt, synthetic construct
  source 1..21: mol_type = other RNA
  modified_base 1: mod_base = OTHER; note = 2'-O-methylguanosine-3'-phosphorothioate
  modified_base 2: mod_base = OTHER; note = 2'-O-methyladenosine-3'-phosphorothioate
  modified_base 3: mod_base = OTHER; note = 2'-O-methyladenosine-3'-phosphate
  modified_base 4: mod_base = OTHER; note = 2'-O-methyluridine-3'-phosphate
  modified_base 5: mod_base = OTHER; note = 2'-O-methylguanosine-3'-phosphate
  modified_base 6: mod_base = OTHER; note = 2'-O-methyluridine-3'-phosphate
  modified_base 7: mod_base = OTHER; note = 2'-deoxy-2'-fluoroguanosine-3'-phosphate
  modified_base 8: mod_base = OTHER; note = 2'-O-methyladenosine-3'-phosphate
  modified_base 9: mod_base = OTHER; note = 2'-O-methyladenosine-3'-phosphate
  modified_base 10: mod_base = OTHER; note = 2'-O-methyladenosine-3'-phosphate
  modified_base 11: mod_base = OTHER; note = 2'-deoxy-2'-fluoroguanosine-3'-phosphate
  modified_base 12: mod_base = OTHER; note = 2'-O-methyluridine-3'-phosphate
  modified_base 13: mod_base = OTHER; note = 2'-O-methylcytidine-3'-phosphate
  modified_base 14: mod_base = OTHER; note = 2'-O-methyladenosine-3'-phosphate
  modified_base 15: mod_base = OTHER; note = 2'-O-methyluridine-3'-phosphate
  modified_base 16: mod_base = OTHER; note = 2'-O-methylcytidine-3'-phosphate
  modified_base 17: mod_base = OTHER; note = 2'-O-methylguanosine-3'-phosphate
  modified_base 18: mod_base = OTHER; note = 2'-O-methyladenosine-3'-phosphate
  modified_base 19: mod_base = OTHER; note = 2'-O-methylcytidine-3'-phosphate
  modified_base 20: mod_base = OTHER; note = 2'-O-methyladenosine-3'-phosphate
  modified_base 21: mod_base = OTHER; note = 2'-O-methyladenosine-3'-phosphate ((2S,4R)-1-[29-[[2-(acetylamino)-2-deoxy-beta-D-galactopyra nosyl]oxy]-14,14-bis[[3-[[3-[[5-[[2-(acetylamino)-2-deoxy-b eta-D-galactopyranosyl]oxy]-1-oxopentyl]amino]propyl]amino] -3-oxopropoxy]methyl]-1,12,19,25-tetraoxo-16-oxa-13,20,24-t riazanonacos-1-yl]-4-hydroxy-2-pyrrolidinyl)methyl ester
gaatgtgaaagtcatcgacaa

SEQ ID NO: 168 - RNA, 19 nt, synthetic construct
  source 1..19: mol_type = other RNA
  modified_base 1: mod_base = OTHER; note = 2'-deoxy-2'-fluoroadenosine-3'-phosphorothioate
  modified_base 2: mod_base = OTHER; note = 2'-O-methyluridine-3'-phosphorothioate
  modified_base 3: mod_base = OTHER; note = 2'-deoxy-2'-fluoroguanosine-3'-phosphate
  modified_base 4: mod_base = OTHER; note = 2'-O-methyluridine-3'-phosphate
  modified_base 5: mod_base = OTHER; note = 2'-deoxy-2'-fluoroguanosine-3'-phosphate
  modified_base 6: mod_base = OTHER; note = 2'-O-methyladenosine-3'-phosphate
  modified_base 7: mod_base = OTHER; note = 2'-deoxy-2'-fluoroadenosine-3'-phosphate
  modified_base 8: mod_base = OTHER; note = 2'-deoxy-2'-fluoroadenosine-3'-phosphate
  modified_base 9: mod_base = OTHER; note = 2'-deoxy-2'-fluoroguanosine-3'-phosphate
  modified_base 10: mod_base = OTHER; note = 2'-O-methyluridine-3'-phosphate
  modified_base 11: mod_base = OTHER; note = 2'-deoxy-2'-fluorocytidine-3'-phosphate
  modified_base 12: mod_base = OTHER; note = 2'-O-methyladenosine-3'-phosphate
  modified_base 13: mod_base = OTHER; note = 2'-deoxy-2'-fluorouridine-3'-phosphate
  modified_base 14: mod_base = OTHER; note = 2'-O-methylcytidine-3'-phosphate
  modified_base 15: mod_base = OTHER; note = 2'-deoxy-2'-fluoroguanosine-3'-phosphate
  modified_base 16: mod_base = OTHER; note = 2'-O-methyladenosine-3'-phosphate
  modified_base 17: mod_base = OTHER; note = 2'-deoxy-2'-fluorocytidine-3'-phosphate
  modified_base 18: mod_base = OTHER; note = 2'-O-methyladenosine-3'-phosphate
  modified_base 19: mod_base = OTHER; note = 2'-deoxy-2'-fluoroadenosine-3'-phosphate ((2S,4R)-1-[29-[[2-(acetylamino)-2-deoxy-beta-D-galactopyra nosyl]oxy]-14,14-bis[[3-[[3-[[5-[[2-(acetylamino)-2-deoxy-b eta-D-galactopyranosyl]oxy]-1-oxopentyl]amino]propyl]amino] -3-oxopropoxy]methyl]-1,12,19,25-tetraoxo-16-oxa-13,20,24-t riazanonacos-1-yl]-4-hydroxy-2-pyrrolidinyl)methyl ester
atgtgaaagtcatcgacaa

SEQ ID NO: 169 - RNA, 19 nt, synthetic construct
  source 1..19: mol_type = other RNA
  modified_base 1: mod_base = OTHER; note = 2'-O-methyladenosine-3'-phosphorothioate
  modified_base 2: mod_base = OTHER; note = 2'-O-methyluridine-3'-phosphorothioate
  modified_base 3: mod_base = OTHER; note = 2'-O-methylguanosine-3'-phosphate
  modified_base 4: mod_base = OTHER; note = 2'-O-methyluridine-3'-phosphate
  modified_base 5: mod_base = OTHER; note = 2'-deoxy-2'-fluoroguanosine-3'-phosphate
  modified_base 6: mod_base = OTHER; note = 2'-O-methyladenosine-3'-phosphate
  modified_base 7: mod_base = OTHER; note = 2'-deoxy-2'-fluoroadenosine-3'-phosphate
  modified_base 8: mod_base = OTHER; note = 2'-deoxy-2'-fluoroadenosine-3'-phosphate
  modified_base 9: mod_base = OTHER; note = 2'-deoxy-2'-fluoroguanosine-3'-phosphate
  modified_base 10: mod_base = OTHER; note = 2'-O-methyluridine-3'-phosphate
  modified_base 11: mod_base = OTHER; note = 2'-O-methylcytidine-3'-phosphate
  modified_base 12: mod_base = OTHER; note = 2'-O-methyladenosine-3'-phosphate
  modified_base 13: mod_base = OTHER; note = 2'-O-methyluridine-3'-phosphate
  modified_base 14: mod_base = OTHER; note = 2'-O-methylcytidine-3'-phosphate
  modified_base 15: mod_base = OTHER; note = 2'-O-methylguanosine-3'-phosphate
  modified_base 16: mod_base = OTHER; note = 2'-O-methyladenosine-3'-phosphate
  modified_base 17: mod_base = OTHER; note = 2'-O-methylcytidine-3'-phosphate
  modified_base 18: mod_base = OTHER; note = 2'-O-methyladenosine-3'-phosphate
  modified_base 19: mod_base = OTHER; note = 2'-O-methyladenosine-3'-phosphate ((2S,4R)-1-[29-[[2-(acetylamino)-2-deoxy-beta-D-galactopyra nosyl]oxy]-14,14-bis[[3-[[3-[[5-[[2-(acetylamino)-2-deoxy-b eta-D-galactopyranosyl]oxy]-1-oxopentyl]amino]propyl]amino] -3-oxopropoxy]methyl]-1,12,19,25-tetraoxo-16-oxa-13,20,24-t riazanonacos-1-yl]-4-hydroxy-2-pyrrolidinyl)methyl ester
atgtgaaagtcatcgacaa

SEQ ID NO: 170 - RNA, 21 nt, synthetic construct
  source 1..21: mol_type = other RNA
  modified_base 1: mod_base = OTHER; note = 2'-deoxy-2'-fluoroguanosine-3'-phosphorothioate
  modified_base 2: mod_base = OTHER; note = 2'-O-methyladenosine-3'-phosphorothioate
  modified_base 3: mod_base = OTHER; note = 2'-deoxy-2'-fluoroadenosine-3'-phosphate
  modified_base 4: mod_base = OTHER; note = 2'-O-methyluridine-3'-phosphate
  modified_base 5: mod_base = OTHER; note = 2'-deoxy-2'-fluoroguanosine-3'-phosphate
  modified_base 6: mod_base = OTHER; note = 2'-O-methyluridine-3'-phosphate
  modified_base 7: mod_base = OTHER; note = 2'-deoxy-2'-fluoroguanosine-3'-phosphate
  modified_base 8: mod_base = OTHER; note = 2'-O-methyladenosine-3'-phosphate
  modified_base 9: mod_base = OTHER; note = 2'-deoxy-2'-fluoroadenosine-3'-phosphate
  modified_base 10: mod_base = OTHER; note = 2'-deoxy-2'-fluoroadenosine-3'-phosphate
  modified_base 11: mod_base = OTHER; note = 2'-deoxy-2'-fluoroguanosine-3'-phosphate
  modified_base 12: mod_base = OTHER; note = 2'-O-methyluridine-3'-phosphate
  modified_base 13: mod_base = OTHER; note = 2'-deoxy-2'-fluorocytidine-3'-phosphate
  modified_base 14: mod_base = OTHER; note = 2'-O-methyladenosine-3'-phosphate
  modified_base 15: mod_base = OTHER; note = 2'-deoxy-2'-fluorouridine-3'-phosphate
  modified_base 16: mod_base = OTHER; note = 2'-O-methylcytidine-3'-phosphate
  modified_base 17: mod_base = OTHER; note = 2'-deoxy-2'-fluoroguanosine-3'-phosphate
  modified_base 18: mod_base = OTHER; note = 2'-O-methyladenosine-3'-phosphate
  modified_base 19: mod_base = OTHER; note = 2'-deoxy-2'-fluorocytidine-3'-phosphate
  modified_base 20: mod_base = OTHER; note = 2'-O-methyladenosine-3'-phosphate
  modified_base 21: mod_base = OTHER; note = 2'-deoxy-2'-fluoroadenosine-3'-phosphate ((2S,4R)-1-[29-[[2-(acetylamino)-2-deoxy-beta-D-galactopyra nosyl]oxy]-14,14-bis[[3-[[3-[[5-[[2-(acetylamino)-2-deoxy-b eta-D-galactopyranosyl]oxy]-1-oxopentyl]amino]propyl]amino] -3-oxopropoxy]methyl]-1,12,19,25-tetraoxo-16-oxa-13,20,24-t riazanonacos-1-yl]-4-hydroxy-2-pyrrolidinyl)methyl ester
gaatgtgaaagtcatcgacaa

SEQ ID NO: 171 - RNA, 21 nt, synthetic construct
  source 1..21: mol_type = other RNA
  modified_base 1: mod_base = OTHER; note = 2'-deoxy-2'-fluoroguanosine-3'-phosphorothioate
  modified_base 2: mod_base = OTHER; note = 2'-O-methyladenosine-3'-phosphorothioate
  modified_base 3: mod_base = OTHER; note = 2'-deoxy-2'-fluoroadenosine-3'-phosphate
  modified_base 4: mod_base = OTHER; note = 2'-O-methyluridine-3'-phosphate
  modified_base 5: mod_base = OTHER; note = 2'-deoxy-2'-fluoroguanosine-3'-phosphate
  modified_base 6: mod_base = OTHER; note = 2'-O-methyluridine-3'-phosphate
  modified_base 7: mod_base = OTHER; note = 2'-deoxy-2'-fluoroguanosine-3'-phosphate
  modified_base 8: mod_base = OTHER; note = 2'-O-methyladenosine-3'-phosphate
  modified_base 9: mod_base = OTHER; note = 2'-deoxy-2'-fluoroadenosine-3'-phosphate
  modified_base 10: mod_base = OTHER; note = 2'-deoxy-2'-fluoroadenosine-3'-phosphate
  modified_base 11: mod_base = OTHER; note = 2'-deoxy-2'-fluoroguanosine-3'-phosphate
  modified_base 12: mod_base = OTHER; note = 2'-O-methyluridine-3'-phosphate
  modified_base 13: mod_base = OTHER; note = 2'-deoxy-2'-fluorocytidine-3'-phosphate
  modified_base 14: mod_base = OTHER; note = 2'-O-methyladenosine-3'-phosphate
  modified_base 15: mod_base = OTHER; note = 2'-deoxy-2'-fluorouridine-3'-phosphate
  modified_base 16: mod_base = OTHER; note = 2'-O-methylcytidine-3'-phosphate
  modified_base 17: mod_base = OTHER; note = 2'-deoxy-2'-fluoroguanosine-3'-phosphate
  modified_base 18: mod_base = OTHER; note = 2'-O-methyladenosine-3'-phosphate
  modified_base 19: mod_base = OTHER; note = 2'-deoxy-2'-fluorocytidine-3'-phosphate
  modified_base 20: mod_base = OTHER; note = 2'-O-methyladenosine-3'-phosphate
  modified_base 21: mod_base = OTHER; note = 2'-deoxy-2'-fluoroadenosine-3'-phosphate ((2S,4R)-1-[29-[[2-(acetylamino)-2-deoxy-beta-D-galactopyra nosyl]oxy]-14,14-bis[[3-[[3-[[5-[[2-(acetylamino)-2-deoxy-b eta-D-galactopyranosyl]oxy]-1-oxopentyl]amino]propyl]amino] -3-oxopropoxy]methyl]-1,12,19,25-tetraoxo-16-oxa-13,20,24-t riazanonacos-1-yl]-4-hydroxy-2-pyrrolidinyl)methyl ester
gaatgtgaaagtcatcgacaa

SEQ ID NO: 172 - RNA, 21 nt, synthetic construct
  source 1..21: mol_type = other RNA
  modified_base 1: mod_base = OTHER; note = 2'-deoxy-2'-fluoroguanosine-3'-phosphorothioate
  modified_base 2: mod_base = OTHER; note = 2'-O-methyladenosine-3'-phosphorothioate
  modified_base 3: mod_base = OTHER; note = 2'-deoxy-2'-fluoroadenosine-3'-phosphate
  modified_base 4: mod_base = OTHER; note = 2'-O-methyluridine-3'-phosphate
  modified_base 5: mod_base = OTHER; note = 2'-deoxy-2'-fluoroguanosine-3'-phosphate
  modified_base 6: mod_base = OTHER; note = 2'-O-methyluridine-3'-phosphate
  modified_base 7: mod_base = OTHER; note = 2'-deoxy-2'-fluoroguanosine-3'-phosphate
  modified_base 8: mod_base = OTHER; note = 2'-O-methyladenosine-3'-phosphate
  modified_base 9: mod_base = OTHER; note = 2'-deoxy-2'-fluoroadenosine-3'-phosphate
  modified_base 10: mod_base = OTHER; note = 2'-deoxy-2'-fluoroadenosine-3'-phosphate
  modified_base 11: mod_base = OTHER; note = 2'-deoxy-2'-fluoroguanosine-3'-phosphate
  modified_base 12: mod_base = OTHER; note = 2'-O-methyluridine-3'-phosphate
  modified_base 13: mod_base = OTHER; note = 2'-deoxy-2'-fluorocytidine-3'-phosphate
  modified_base 14: mod_base = OTHER; note = 2'-O-methyladenosine-3'-phosphate
  modified_base 15: mod_base = OTHER; note = 2'-deoxy-2'-fluorouridine-3'-phosphate
  modified_base 16: mod_base = OTHER; note = 2'-O-methylcytidine-3'-phosphate
  modified_base 17: mod_base = OTHER; note = 2'-deoxy-2'-fluoroguanosine-3'-phosphate
  modified_base 18: mod_base = OTHER; note = 2'-O-methyladenosine-3'-phosphate
  modified_base 19: mod_base = OTHER; note = 2'-deoxy-2'-fluorocytidine-3'-phosphate
  modified_base 20: mod_base = OTHER; note = 2'-O-methyladenosine-3'-phosphate
  modified_base 21: mod_base = OTHER; note = 2'-deoxy-2'-fluoroadenosine-3'-phosphate ((2S,4R)-1-[29-[[2-(acetylamino)-2-deoxy-beta-D-galactopyra nosyl]oxy]-14,14-bis[[3-[[3-[[5-[[2-(acetylamino)-2-deoxy-b eta-D-galactopyranosyl]oxy]-1-oxopentyl]amino]propyl]amino] -3-oxopropoxy]methyl]-1,12,19,25-tetraoxo-16-oxa-13,20,24-t riazanonacos-1-yl]-4-hydroxy-2-pyrrolidinyl)methyl ester
gaatgtgaaagtcatcgacaa

SEQ ID NO: 173 - RNA, 21 nt, synthetic construct
  source 1..21: mol_type = other RNA
  modified_base 1: mod_base = OTHER; note = 2'-deoxy-2'-fluoroguanosine-3'-phosphorothioate
  modified_base 2: mod_base = OTHER; note = 2'-O-methyladenosine-3'-phosphorothioate
  modified_base 3: mod_base = OTHER; note = 2'-deoxy-2'-fluoroadenosine-3'-phosphate
  modified_base 4: mod_base = OTHER; note = 2'-O-methyluridine-3'-phosphate
  modified_base 5: mod_base = OTHER; note = 2'-deoxy-2'-fluoroguanosine-3'-phosphate
  modified_base 6: mod_base = OTHER; note = 2'-O-methyluridine-3'-phosphate
  modified_base 7: mod_base = OTHER; note = 2'-deoxy-2'-fluoroguanosine-3'-phosphate
  modified_base 8: mod_base = OTHER; note = 2'-O-methyladenosine-3'-phosphate
  modified_base 9: mod_base = OTHER; note = 2'-deoxy-2'-fluoroadenosine-3'-phosphate
  modified_base 10: mod_base = OTHER; note = 2'-deoxy-2'-fluoroadenosine-3'-phosphate
  modified_base 11: mod_base = OTHER; note = 2'-deoxy-2'-fluoroguanosine-3'-phosphate
  modified_base 12: mod_base = OTHER; note = 2'-O-methyluridine-3'-phosphate
  modified_base 13: mod_base = OTHER; note = 2'-deoxy-2'-fluorocytidine-3'-phosphate
  modified_base 14: mod_base = OTHER; note = 2'-O-methyladenosine-3'-phosphate
  modified_base 15: mod_base = OTHER; note = 2'-deoxy-2'-fluorouridine-3'-phosphate
  modified_base 16: mod_base = OTHER; note = 2'-O-methylcytidine-3'-phosphate
  modified_base 17: mod_base = OTHER; note = 2'-deoxy-2'-fluoroguanosine-3'-phosphate
  modified_base 18: mod_base = OTHER; note = 2'-O-methyladenosine-3'-phosphate
  modified_base 19: mod_base = OTHER; note = 2'-deoxy-2'-fluorocytidine-3'-phosphate
  modified_base 20: mod_base = OTHER; note = 2'-O-methyladenosine-3'-phosphate
  modified_base 21: mod_base = OTHER; note = 2'-deoxy-2'-fluoroadenosine-3'-phosphate ((2S,4R)-1-[29-[[2-(acetylamino)-2-deoxy-beta-D-galactopyra nosyl]oxy]-14,14-bis[[3-[[3-[[5-[[2-(acetylamino)-2-deoxy-b eta-D-galactopyranosyl]oxy]-1-oxopentyl]amino]propyl]amino] -3-oxopropoxy]methyl]-1,12,19,25-tetraoxo-16-oxa-13,20,24-t riazanonacos-1-yl]-4-hydroxy-2-pyrrolidinyl)methyl ester
gaatgtgaaagtcatcgacaa

SEQ ID NO: 174 - RNA, 21 nt, synthetic construct
  source 1..21: mol_type = other RNA
  modified_base 1: mod_base = OTHER; note = 2'-deoxy-2'-fluoroguanosine-3'-phosphorothioate
  modified_base 2: mod_base = OTHER; note = 2'-O-methyladenosine-3'-phosphorothioate
  modified_base 3: mod_base = OTHER; note = 2'-deoxy-2'-fluoroadenosine-3'-phosphate
  modified_base 4: mod_base = OTHER; note = 2'-O-methyluridine-3'-phosphate
  modified_base 5: mod_base = OTHER; note = 2'-deoxy-2'-fluoroguanosine-3'-phosphate
  modified_base 6: mod_base = OTHER; note = 2'-O-methyluridine-3'-phosphate
  modified_base 7: mod_base = OTHER; note = 2'-deoxy-2'-fluoroguanosine-3'-phosphate
  modified_base 8: mod_base = OTHER; note = 2'-O-methyladenosine-3'-phosphate
  modified_base 9: mod_base = OTHER; note = 2'-deoxy-2'-fluoroadenosine-3'-phosphate
  modified_base 10: mod_base = OTHER; note = 2'-deoxy-2'-fluoroadenosine-3'-phosphate
  modified_base 11: mod_base = OTHER; note = 2'-deoxy-2'-fluoroguanosine-3'-phosphate
  modified_base 12: mod_base = OTHER; note = 2'-O-methyluridine-3'-phosphate
  modified_base 13: mod_base = OTHER; note = 2'-deoxy-2'-fluorocytidine-3'-phosphate
  modified_base 14: mod_base = OTHER; note = 2'-O-methyladenosine-3'-phosphate
  modified_base 15: mod_base = OTHER; note = 2'-deoxy-2'-fluorouridine-3'-phosphate
  modified_base 16: mod_base = OTHER; note = 2'-O-methylcytidine-3'-phosphate
  modified_base 17: mod_base = OTHER; note = 2'-deoxy-2'-fluoroguanosine-3'-phosphate
  modified_base 18: mod_base = OTHER; note = 2'-O-methyladenosine-3'-phosphate
  modified_base 19: mod_base = OTHER; note = 2'-deoxy-2'-fluorocytidine-3'-phosphate
  modified_base 20: mod_base = OTHER; note = 2'-O-methyladenosine-3'-phosphate
  modified_base 21: mod_base = OTHER; note = 2'-deoxy-2'-fluoroadenosine-3'-phosphate ((2S,4R)-1-[29-[[2-(acetylamino)-2-deoxy-beta-D-galactopyra nosyl]oxy]-14,14-bis[[3-[[3-[[5-[[2-(acetylamino)-2-deoxy-b eta-D-galactopyranosyl]oxy]-1-oxopentyl]amino]propyl]amino] -3-oxopropoxy]methyl]-1,12,19,25-tetraoxo-16-oxa-13,20,24-t riazanonacos-1-yl]-4-hydroxy-2-pyrrolidinyl)methyl ester
gaatgtgaaagtcatcgacaa

SEQ ID NO: 175 - RNA, 21 nt, synthetic construct
  source 1..21: mol_type = other RNA
  modified_base 1: mod_base = OTHER; note = 2'-O-methylguanosine-3'-phosphorothioate
  modified_base 2: mod_base = OTHER; note = 2'-O-methyladenosine-3'-phosphorothioate
  modified_base 3: mod_base = OTHER; note = 2'-O-methyladenosine-3'-phosphate
  modified_base 4: mod_base = OTHER; note = 2'-O-methyluridine-3'-phosphate
  modified_base 5: mod_base = OTHER; note = 2'-O-methylguanosine-3'-phosphate
  modified_base 6: mod_base = OTHER; note = 2'-O-methyluridine-3'-phosphate
  modified_base 7: mod_base = OTHER; note = 2'-deoxy-2'-fluoroguanosine-3'-phosphate
  modified_base 8: mod_base = OTHER; note = 2'-O-methyladenosine-3'-phosphate
  modified_base 9: mod_base = OTHER; note = 2'-deoxy-2'-fluoroadenosine-3'-phosphate
  modified_base 10: mod_base = OTHER; note = 2'-deoxy-2'-fluoroadenosine-3'-phosphate
  modified_base 11: mod_base = OTHER; note = 2'-deoxy-2'-fluoroguanosine-3'-phosphate
  modified_base 12: mod_base = OTHER; note = 2'-O-methyluridine-3'-phosphate
  modified_base 13: mod_base = OTHER; note = 2'-O-methylcytidine-3'-phosphate
  modified_base 14: mod_base = OTHER; note = 2'-O-methyladenosine-3'-phosphate
  modified_base 15: mod_base = OTHER; note = 2'-O-methyluridine-3'-phosphate
  modified_base 16: mod_base = OTHER; note = 2'-O-methylcytidine-3'-phosphate
  modified_base 17: mod_base = OTHER; note = 2'-O-methylguanosine-3'-phosphate
  modified_base 18: mod_base = OTHER; note = 2'-O-methyladenosine-3'-phosphate
  modified_base 19: mod_base = OTHER; note = 2'-O-methylcytidine-3'-phosphate
  modified_base 20: mod_base = OTHER; note = 2'-O-methyladenosine-3'-phosphate
  modified_base 21: mod_base = OTHER; note = 2'-O-methyladenosine-3'-phosphate ((2S,4R)-1-[29-[[2-(acetylamino)-2-deoxy-beta-D-galactopyra nosyl]oxy]-14,14-bis[[3-[[3-[[5-[[2-(acetylamino)-2-deoxy-b eta-D-galactopyranosyl]oxy]-1-oxopentyl]amino]propyl]amino] -3-oxopropoxy]methyl]-1,12,19,25-tetraoxo-16-oxa-13,20,24-t riazanonacos-1-yl]-4-hydroxy-2-pyrrolidinyl)methyl ester
gaatgtgaaagtcatcgacaa

SEQ ID NO: 176 - RNA, 21 nt, synthetic construct
  source 1..21: mol_type = other RNA
  modified_base 1: mod_base = OTHER; note = 2'-O-methylguanosine-3'-phosphorothioate
  modified_base 2: mod_base = OTHER; note = 2'-O-methyladenosine-3'-phosphorothioate
  modified_base 3: mod_base = OTHER; note = 2'-O-methyladenosine-3'-phosphate
  modified_base 4: mod_base = OTHER; note = 2'-O-methyluridine-3'-phosphate
  modified_base 5: mod_base = OTHER; note = 2'-O-methylguanosine-3'-phosphate
  modified_base 6: mod_base = OTHER; note = 2'-O-methyluridine-3'-phosphate
  modified_base 7: mod_base = OTHER; note = 2'-deoxy-2'-fluoroguanosine-3'-phosphate
  modified_base 8: mod_base = OTHER; note = 2'-O-methyladenosine-3'-phosphate
  modified_base 9: mod_base = OTHER; note = 2'-deoxy-2'-fluoroadenosine-3'-phosphate
  modified_base 10: mod_base = OTHER; note = 2'-deoxy-2'-fluoroadenosine-3'-phosphate
  modified_base 11: mod_base = OTHER; note = 2'-deoxy-2'-fluoroguanosine-3'-phosphate
  modified_base 12: mod_base = OTHER; note = 2'-O-methyluridine-3'-phosphate
  modified_base 13: mod_base = OTHER; note = 2'-O-methylcytidine-3'-phosphate
  modified_base 14: mod_base = OTHER; note = 2'-O-methyladenosine-3'-phosphate
  modified_base 15: mod_base = OTHER; note = 2'-O-methyluridine-3'-phosphate
  modified_base 16: mod_base = OTHER; note = 2'-O-methylcytidine-3'-phosphate
  modified_base 17: mod_base = OTHER; note = 2'-O-methylguanosine-3'-phosphate
  modified_base 18: mod_base = OTHER; note = 2'-O-methyladenosine-3'-phosphate
  modified_base 19: mod_base = OTHER; note = 2'-O-methylcytidine-3'-phosphate
  modified_base 20: mod_base = OTHER; note = 2'-O-methyladenosine-3'-phosphate
  modified_base 21: mod_base = OTHER; note = 2'-O-methyladenosine-3'-phosphate ((2S,4R)-1-[29-[[2-(acetylamino)-2-deoxy-beta-D-galactopyra nosyl]oxy]-14,14-bis[[3-[[3-[[5-[[2-(acetylamino)-2-deoxy-b eta-D-galactopyranosyl]oxy]-1-oxopentyl]amino]propyl]amino] -3-oxopropoxy]methyl]-1,12,19,25-tetraoxo-16-oxa-13,20,24-t riazanonacos-1-yl]-4-hydroxy-2-pyrrolidinyl)methyl ester
gaatgtgaaagtcatcgacaa

SEQ ID NO: 177 - RNA, 21 nt, synthetic construct
  source 1..21: mol_type = other RNA
  modified_base 1: mod_base = OTHER; note = 2'-O-methylguanosine-3'-phosphorothioate
  modified_base 2: mod_base = OTHER; note = 2'-O-methyladenosine-3'-phosphorothioate
  modified_base 3: mod_base = OTHER; note = 2'-O-methyladenosine-3'-phosphate
  modified_base 4: mod_base = OTHER; note = 2'-O-methyluridine-3'-phosphate
  modified_base 5: mod_base = OTHER; note = 2'-O-methylguanosine-3'-phosphate
  modified_base 6: mod_base = OTHER; note = 2'-O-methyluridine-3'-phosphate
  modified_base 7: mod_base = OTHER; note = 2'-deoxy-2'-fluoroguanosine-3'-phosphate
  modified_base 8: mod_base = OTHER; note = 2'-O-methyladenosine-3'-phosphate
  modified_base 9: mod_base = OTHER; note = 2'-O-methyladenosine-3'-phosphate
  modified_base 10: mod_base = OTHER; note = 2'-deoxy-2'-fluoroadenosine-3'-phosphate
  modified_base 11: mod_base = OTHER; note = 2'-deoxy-2'-fluoroguanosine-3'-phosphate
  modified_base 12: mod_base = OTHER; note = 2'-O-methyluridine-3'-phosphate
  modified_base 13: mod_base = OTHER; note = 2'-O-methylcytidine-3'-phosphate
  modified_base 14: mod_base = OTHER; note = 2'-O-methyladenosine-3'-phosphate
  modified_base 15: mod_base = OTHER; note = 2'-O-methyluridine-3'-phosphate
  modified_base 16: mod_base = OTHER; note = 2'-O-methylcytidine-3'-phosphate
  modified_base 17: mod_base = OTHER; note = 2'-O-methylguanosine-3'-phosphate
  modified_base 18: mod_base = OTHER; note = 2'-O-methyladenosine-3'-phosphate
  modified_base 19: mod_base = OTHER; note = 2'-O-methylcytidine-3'-phosphate
  modified_base 20: mod_base = OTHER; note = 2'-O-methyladenosine-3'-phosphate
  modified_base 21: mod_base = OTHER; note = 2'-O-methyladenosine-3'-phosphate ((2S,4R)-1-[29-[[2-(acetylamino)-2-deoxy-beta-D-galactopyra nosyl]oxy]-14,14-bis[[3-[[3-[[5-[[2-(acetylamino)-2-deoxy-b eta-D-galactopyranosyl]oxy]-1-oxopentyl]amino]propyl]amino] -3-oxopropoxy]methyl]-1,12,19,25-tetraoxo-16-oxa-13,20,24-t riazanonacos-1-yl]-4-hydroxy-2-pyrrolidinyl)methyl ester
gaatgtgaaagtcatcgacaa

SEQ ID NO: 178 - RNA, 21 nt, synthetic construct
  source 1..21: mol_type = other RNA
  modified_base 1: mod_base = OTHER; note = 2'-O-methylguanosine-3'-phosphorothioate
  modified_base 2: mod_base = OTHER; note = 2'-O-methyladenosine-3'-phosphorothioate
  modified_base 3: mod_base = OTHER; note = 2'-O-methyladenosine-3'-phosphate
  modified_base 4: mod_base = OTHER; note = 2'-O-methyluridine-3'-phosphate
  modified_base 5: mod_base = OTHER; note = 2'-O-methylguanosine-3'-phosphate
  modified_base 6: mod_base = OTHER; note = 2'-O-methyluridine-3'-phosphate
  modified_base 7: mod_base = OTHER; note = 2'-deoxy-2'-fluoroguanosine-3'-phosphate
  modified_base 8: mod_base = OTHER; note = 2'-O-methyladenosine-3'-phosphate
  modified_base 9: mod_base = OTHER; note = 2'-O-methyladenosine-3'-phosphate
  modified_base 10: mod_base = OTHER; note = 2'-deoxy-2'-fluoroadenosine-3'-phosphate
  modified_base 11: mod_base = OTHER; note = 2'-deoxy-2'-fluoroguanosine-3'-phosphate
  modified_base 12: mod_base = OTHER; note = 2'-O-methyluridine-3'-phosphate
  modified_base 13: mod_base = OTHER; note = 2'-O-methylcytidine-3'-phosphate
  modified_base 14: mod_base = OTHER; note = 2'-O-methyladenosine-3'-phosphate
  modified_base 15: mod_base = OTHER; note = 2'-O-methyluridine-3'-phosphate
  modified_base 16: mod_base = OTHER; note = 2'-O-methylcytidine-3'-phosphate
  modified_base 17: mod_base = OTHER; note = 2'-O-methylguanosine-3'-phosphate
  modified_base 18: mod_base = OTHER; note = 2'-O-methyladenosine-3'-phosphate
  modified_base 19: mod_base = OTHER; note = 2'-O-methylcytidine-3'-phosphate
  modified_base 20: mod_base = OTHER; note = 2'-O-methyladenosine-3'-phosphate
  modified_base 21: mod_base = OTHER; note = 2'-O-methyladenosine-3'-phosphate ((2S,4R)-1-[29-[[2-(acetylamino)-2-deoxy-beta-D-galactopyra nosyl]oxy]-14,14-bis[[3-[[3-[[5-[[2-(acetylamino)-2-deoxy-b eta-D-galactopyranosyl]oxy]-1-oxopentyl]amino]propyl]amino] -3-oxopropoxy]methyl]-1,12,19,25-tetraoxo-16-oxa-13,20,24-t riazanonacos-1-yl]-4-hydroxy-2-pyrrolidinyl)methyl ester
gaatgtgaaagtcatcgacaa

SEQ ID NO: 179 - RNA, 21 nt, synthetic construct
  source 1..21: mol_type = other RNA
  modified_base 1: mod_base = OTHER; note = 2'-O-methylguanosine-3'-phosphorothioate
  modified_base 2: mod_base = OTHER; note = 2'-O-methyladenosine-3'-phosphorothioate
  modified_base 3: mod_base = OTHER; note = 2'-O-methyladenosine-3'-phosphate
  modified_base 4: mod_base = OTHER; note = 2'-O-methyluridine-3'-phosphate
  modified_base 5: mod_base = OTHER; note = 2'-O-methylguanosine-3'-phosphate
  modified_base 6: mod_base = OTHER; note = 2'-O-methyluridine-3'-phosphate
  modified_base 7: mod_base = OTHER; note = 2'-deoxy-2'-fluoroguanosine-3'-phosphate
  modified_base 8: mod_base = OTHER; note = 2'-O-methyladenosine-3'-phosphate
  modified_base 9: mod_base = OTHER; note = 2'-O-methyladenosine-3'-phosphate
  modified_base 10: mod_base = OTHER; note = 2'-deoxy-2'-fluoroadenosine-3'-phosphate
  modified_base 11: mod_base = OTHER; note = 2'-deoxy-2'-fluoroguanosine-3'-phosphate
  modified_base 12: mod_base = OTHER; note = 2'-O-methyluridine-3'-phosphate
  modified_base 13: mod_base = OTHER; note = 2'-O-methylcytidine-3'-phosphate
  modified_base 14: mod_base = OTHER; note = 2'-O-methyladenosine-3'-phosphate
  modified_base 15: mod_base = OTHER; note = 2'-O-methyluridine-3'-phosphate
  modified_base 16: mod_base = OTHER; note = 2'-O-methylcytidine-3'-phosphate
  modified_base 17: mod_base = OTHER; note = 2'-O-methylguanosine-3'-phosphate
  modified_base 18: mod_base = OTHER; note = 2'-O-methyladenosine-3'-phosphate
  modified_base 19: mod_base = OTHER; note = 2'-O-methylcytidine-3'-phosphate
  modified_base 20: mod_base = OTHER; note = 2'-O-methyladenosine-3'-phosphate
  modified_base 21: mod_base = OTHER; note = 2'-O-methyladenosine-3'-phosphate ((2S,4R)-1-[29-[[2-(acetylamino)-2-deoxy-beta-D-galactopyra nosyl]oxy]-14,14-bis[[3-[[3-[[5-[[2-(acetylamino)-2-deoxy-b eta-D-galactopyranosyl]oxy]-1-oxopentyl]amino]propyl]amino] -3-oxopropoxy]methyl]-1,12,19,25-tetraoxo-16-oxa-13,20,24-t riazanonacos-1-yl]-4-hydroxy-2-pyrrolidinyl)methyl ester
gaatgtgaaagtcatcgacaa

SEQ ID NO: 180 - RNA, 21 nt, synthetic construct
  source 1..21: mol_type = other RNA
  modified_base 1: mod_base = OTHER; note = 2'-O-methylguanosine-3'-phosphorothioate
  modified_base 2: mod_base = OTHER; note = 2'-O-methyladenosine-3'-phosphorothioate
  modified_base 3: mod_base = OTHER; note = 2'-O-methyladenosine-3'-phosphate
  modified_base 4: mod_base = OTHER; note = 2'-O-methyluridine-3'-phosphate
  modified_base 5: mod_base = OTHER; note = 2'-O-methylguanosine-3'-phosphate
  modified_base 6: mod_base = OTHER; note = 2'-O-methyluridine-3'-phosphate
  modified_base 7: mod_base = OTHER; note = 2'-O-methylguanosine-3'-phosphate
  modified_base 8: mod_base = OTHER; note = 2'-O-methyladenosine-3'-phosphate
  modified_base 9: mod_base = OTHER; note = 2'-O-methyladenosine-3'-phosphate
  modified_base 10: mod_base = OTHER; note = 2'-O-methyladenosine-3'-phosphate
  modified_base 11: mod_base = OTHER; note = 2'-O-methylguanosine-3'-phosphate
  modified_base 12: mod_base = OTHER; note = 2'-O-methyluridine-3'-phosphate
  modified_base 13: mod_base = OTHER; note = 2'-O-methylcytidine-3'-phosphate
  modified_base 14: mod_base = OTHER; note = 2'-O-methyladenosine-3'-phosphate
  modified_base 15: mod_base = OTHER; note = 2'-O-methyluridine-3'-phosphate
  modified_base 16: mod_base = OTHER; note = Cytidine-glycol nucleic acid (GNA), S-isomer
  modified_base 17: mod_base = OTHER; note = 2'-O-methylguanosine-3'-phosphate
  modified_base 18: mod_base = OTHER; note = 2'-O-methyladenosine-3'-phosphate
  modified_base 19: mod_base = OTHER; note = 2'-O-methylcytidine-3'-phosphate
  modified_base 20: mod_base = OTHER; note = 2'-O-methyladenosine-3'-phosphate
  modified_base 21: mod_base = OTHER; note = 2'-O-methyladenosine-3'-phosphate ((2S,4R)-1-[29-[[2-(acetylamino)-2-deoxy-beta-D-galactopyra nosyl]oxy]-14,14-bis[[3-[[3-[[5-[[2-(acetylamino)-2-deoxy-b eta-D-galactopyranosyl]oxy]-1-oxopentyl]amino]propyl]amino] -3-oxopropoxy]methyl]-1,12,19,25-tetraoxo-16-oxa-13,20,24-t riazanonacos-1-yl]-4-hydroxy-2-pyrrolidinyl)methyl ester
gaatgtgaaagtcatcgacaa

SEQ ID NO: 181 - DNA, 21 bp, synthetic construct
  source 1..21: mol_type = other DNA
  modified_base 1: mod_base = OTHER; note = 2'-O-methylguanosine-3'-phosphorothioate
  modified_base 2: mod_base = OTHER; note = 2'-O-methyladenosine-3'-phosphorothioate
  modified_base 3: mod_base = OTHER; note = 2'-O-methyladenosine-3'-phosphate
  modified_base 4: mod_base = OTHER; note = 2'-O-methyluridine-3'-phosphate
  modified_base 5: mod_base = OTHER; note = 2'-O-methylguanosine-3'-phosphate
  modified_base 7: mod_base = OTHER; note = 2'-O-methylguanosine-3'-phosphate
  modified_base 8: mod_base = OTHER; note = 2'-O-methyladenosine-3'-phosphate
  modified_base 9: mod_base = OTHER; note = 2'-O-methyladenosine-3'-phosphate
  modified_base 10: mod_base = OTHER; note = 2'-O-methyladenosine-3'-phosphate
  modified_base 11: mod_base = OTHER; note = 2'-O-methylguanosine-3'-phosphate
  modified_base 12: mod_base = OTHER; note = 2'-O-methyluridine-3'-phosphate
  modified_base 13: mod_base = OTHER; note = 2'-O-methylcytidine-3'-phosphate
  modified_base 14: mod_base = OTHER; note = 2'-O-methyladenosine-3'-phosphate
  modified_base 15: mod_base = OTHER; note = 2'-O-methyluridine-3'-phosphate
  modified_base 16: mod_base = OTHER; note = Cytidine-glycol nucleic acid (GNA), S-isomer
  modified_base 17: mod_base = OTHER; note = 2'-O-methylguanosine-3'-phosphate
  modified_base 18: mod_base = OTHER; note = 2'-O-methyladenosine-3'-phosphate
  modified_base 19: mod_base = OTHER; note = 2'-O-methylcytidine-3'-phosphate
  modified_base 20: mod_base = OTHER; note = 2'-O-methyladenosine-3'-phosphate
  modified_base 21: mod_base = OTHER; note = 2'-O-methyladenosine-3'-phosphate ((2S,4R)-1-[29-[[2-(acetylamino)-2-deoxy-beta-D-galactopyra nosyl]oxy]-14,14-bis[[3-[[3-[[5-[[2-(acetylamino)-2-deoxy-b eta-D-galactopyranosyl]oxy]-1-oxopentyl]amino]propyl]amino] -3-oxopropoxy]methyl]-1,12,19,25-tetraoxo-16-oxa-13,20,24-t riazanonacos-1-yl]-4-hydroxy-2-pyrrolidinyl)methyl ester
  misc_feature 1..5: note = RNA
  misc_feature 7..21: note = RNA
  misc_feature 6: note = DNA
gaatgtgaaagtcatcgacaa

SEQ ID NO: 182 - DNA, 21 bp, synthetic construct
  source 1..21: mol_type = other DNA
  modified_base 1: mod_base = OTHER; note = 2'-O-methylguanosine-3'-phosphorothioate
  modified_base 2: mod_base = OTHER; note = 2'-O-methyladenosine-3'-phosphorothioate
  modified_base 3: mod_base = OTHER; note = 2'-O-methyladenosine-3'-phosphate
  modified_base 4: mod_base = OTHER; note = 2'-O-methyluridine-3'-phosphate
  modified_base 6: mod_base = OTHER; note = 2'-O-methyluridine-3'-phosphate
  modified_base 7: mod_base = OTHER; note = 2'-O-methylguanosine-3'-phosphate
  modified_base 8: mod_base = OTHER; note = 2'-O-methyladenosine-3'-phosphate
  modified_base 9: mod_base = OTHER; note = 2'-O-methyladenosine-3'-phosphate
  modified_base 10: mod_base = OTHER; note = 2'-O-methyladenosine-3'-phosphate
  modified_base 12: mod_base = OTHER; note = 2'-O-methyluridine-3'-phosphate
  modified_base 13: mod_base = OTHER; note = 2'-O-methylcytidine-3'-phosphate
  modified_base 14: mod_base = OTHER; note = 2'-O-methyladenosine-3'-phosphate
  modified_base 15: mod_base = OTHER; note = 2'-O-methyluridine-3'-phosphate
  modified_base 16: mod_base = OTHER; note = Cytidine-glycol nucleic acid (GNA), S-isomer
  modified_base 17: mod_base = OTHER; note = 2'-O-methylguanosine-3'-phosphate
  modified_base 18: mod_base = OTHER; note = 2'-O-methyladenosine-3'-phosphate
  modified_base 19: mod_base = OTHER; note = 2'-O-methylcytidine-3'-phosphate
  modified_base 20: mod_base = OTHER; note = 2'-O-methyladenosine-3'-phosphate
  modified_base 21: mod_base = OTHER; note = 2'-O-methyladenosine-3'-phosphate ((2S,4R)-1-[29-[[2-(acetylamino)-2-deoxy-beta-D-galactopyra nosyl]oxy]-14,14-bis[[3-[[3-[[5-[[2-(acetylamino)-2-deoxy-b eta-D-galactopyranosyl]oxy]-1-oxopentyl]amino]propyl]amino] -3-oxopropoxy]methyl]-1,12,19,25-tetraoxo-16-oxa-13,20,24-t riazanonacos-1-yl]-4-hydroxy-2-pyrrolidinyl)methyl ester
  misc_feature 1..4: note = RNA
  misc_feature 6..10: note = RNA
  misc_feature 12..21: note = RNA
  misc_feature 5: note = DNA
  misc_feature 11: note = DNA
gaatgtgaaagtcatcgacaa

SEQ ID NO: 183 - DNA, 21 bp, synthetic construct
  source 1..21: mol_type = other DNA
  modified_base 1: mod_base = OTHER; note = 2'-O-methylguanosine-3'-phosphorothioate
  modified_base 2: mod_base = OTHER; note = 2'-O-methyladenosine-3'-phosphorothioate
  modified_base 3: mod_base = OTHER; note = 2'-O-methyladenosine-3'-phosphate
  modified_base 4: mod_base = OTHER; note = 2'-O-methyluridine-3'-phosphate
  modified_base 5: mod_base = OTHER; note = 2'-O-methylguanosine-3'-phosphate
  modified_base 7: mod_base = OTHER; note = 2'-O-methylguanosine-3'-phosphate
  modified_base 8: mod_base = OTHER; note = 2'-O-methyladenosine-3'-phosphate
  modified_base 9: mod_base = OTHER; note = 2'-O-methyladenosine-3'-phosphate
  modified_base 10: mod_base = OTHER; note = 2'-O-methyladenosine-3'-phosphate
  modified_base 12: mod_base = OTHER; note = 2'-O-methyluridine-3'-phosphate
  modified_base 13: mod_base = OTHER; note = 2'-O-methylcytidine-3'-phosphate
  modified_base 14: mod_base = OTHER; note = 2'-O-methyladenosine-3'-phosphate
  modified_base 15: mod_base = OTHER; note = 2'-O-methyluridine-3'-phosphate
  modified_base 16: mod_base = OTHER; note = Cytidine-glycol nucleic acid (GNA), S-isomer
  modified_base 17: mod_base = OTHER; note = 2'-O-methylguanosine-3'-phosphate
  modified_base 18: mod_base = OTHER; note = 2'-O-methyladenosine-3'-phosphate
  modified_base 19: mod_base = OTHER; note = 2'-O-methylcytidine-3'-phosphate
  modified_base 20: mod_base = OTHER; note = 2'-O-methyladenosine-3'-phosphate
  modified_base 21: mod_base = OTHER; note = 2'-O-methyladenosine-3'-phosphate ((2S,4R)-1-[29-[[2-(acetylamino)-2-deoxy-beta-D-galactopyra nosyl]oxy]-14,14-bis[[3-[[3-[[5-[[2-(acetylamino)-2-deoxy-b eta-D-galactopyranosyl]oxy]-1-oxopentyl]amino]propyl]amino] -3-oxopropoxy]methyl]-1,12,19,25-tetraoxo-16-oxa-13,20,24-t riazanonacos-1-yl]-4-hydroxy-2-pyrrolidinyl)methyl ester
  misc_feature 1..5: note = RNA
  misc_feature 7..10: note = RNA
  misc_feature 12..21: note = RNA
  misc_feature 6: note = DNA
  misc_feature 11: note = DNA
gaatgtgaaagtcatcgacaa

SEQ ID NO: 184 - DNA, 21 bp, synthetic construct
  source 1..21: mol_type = other DNA
  modified_base 1: mod_base = OTHER; note = 2'-O-methylguanosine-3'-phosphorothioate
  modified_base 2: mod_base = OTHER; note = 2'-O-methyladenosine-3'-phosphorothioate
  modified_base 3: mod_base = OTHER; note = 2'-O-methyladenosine-3'-phosphate
  modified_base 4: mod_base = OTHER; note = 2'-O-methyluridine-3'-phosphate
  modified_base 5: mod_base = OTHER; note = 2'-O-methylguanosine-3'-phosphate
  modified_base 6: mod_base = OTHER; note = 2'-O-methyluridine-3'-phosphate
  modified_base 8: mod_base = OTHER; note = 2'-O-methyladenosine-3'-phosphate
  modified_base 9: mod_base = OTHER; note = 2'-O-methyladenosine-3'-phosphate
  modified_base 10: mod_base = OTHER; note = 2'-O-methyladenosine-3'-phosphate
  modified_base 12: mod_base = OTHER; note = 2'-O-methyluridine-3'-phosphate
  modified_base 13: mod_base = OTHER; note = 2'-O-methylcytidine-3'-phosphate
  modified_base 14: mod_base = OTHER; note = 2'-O-methyladenosine-3'-phosphate
  modified_base 15: mod_base = OTHER; note = 2'-O-methyluridine-3'-phosphate
  modified_base 16: mod_base = OTHER; note = Cytidine-glycol nucleic acid (GNA), S-isomer
  modified_base 17: mod_base = OTHER; note = 2'-O-methylguanosine-3'-phosphate
  modified_base 18: mod_base = OTHER; note = 2'-O-methyladenosine-3'-phosphate
  modified_base 19: mod_base = OTHER; note = 2'-O-methylcytidine-3'-phosphate
  modified_base 20: mod_base = OTHER; note = 2'-O-methyladenosine-3'-phosphate
  modified_base 21: mod_base = OTHER; note = 2'-O-methyladenosine-3'-phosphate ((2S,4R)-1-[29-[[2-(acetylamino)-2-deoxy-beta-D-galactopyra nosyl]oxy]-14,14-bis[[3-[[3-[[5-[[2-(acetylamino)-2-deoxy-b eta-D-galactopyranosyl]oxy]-1-oxopentyl]amino]propyl]amino] -3-oxopropoxy]methyl]-1,12,19,25-tetraoxo-16-oxa-13,20,24-t riazanonacos-1-yl]-4-hydroxy-2-pyrrolidinyl)methyl ester
  misc_feature 1..6: note = RNA
  misc_feature 8..10: note = RNA
  misc_feature 12..21: note = RNA
  misc_feature 7: note = DNA
  misc_feature 11: note = DNA
gaatgtgaaagtcatcgacaa

SEQ ID NO: 185 - DNA, 21 bp, synthetic construct
  source 1..21: mol_type = other DNA
  modified_base 1: mod_base = OTHER; note = 2'-O-methylguanosine-3'-phosphorothioate
  modified_base 2: mod_base = OTHER; note = 2'-O-methyladenosine-3'-phosphorothioate
  modified_base 3: mod_base = OTHER; note = 2'-O-methyladenosine-3'-phosphate
  modified_base 4: mod_base = OTHER; note = 2'-O-methyluridine-3'-phosphate
  modified_base 5: mod_base = OTHER; note = 2'-O-methylguanosine-3'-phosphate
  modified_base 6: mod_base = OTHER; note = 2'-O-methyluridine-3'-phosphate
  modified_base 7: mod_base = OTHER; note = 2'-O-methylguanosine-3'-phosphate
  modified_base 8: mod_base = OTHER; note = 2'-O-methyladenosine-3'-phosphate
  modified_base 9: mod_base = OTHER; note = 2'-O-methyladenosine-3'-phosphate
  modified_base 10: mod_base = OTHER; note = 2'-O-methyladenosine-3'-phosphate
  modified_base 12: mod_base = OTHER; note = 2'-O-methyluridine-3'-phosphate
  modified_base 13: mod_base = OTHER; note = 2'-O-methylcytidine-3'-phosphate
  modified_base 14: mod_base = OTHER; note = 2'-O-methyladenosine-3'-phosphate
  modified_base 15: mod_base = OTHER; note = 2'-O-methyluridine-3'-phosphate
  modified_base 16: mod_base = OTHER; note = 2'-O-methylcytidine-3'-phosphate
  modified_base 18: mod_base = OTHER; note = 2'-O-methyladenosine-3'-phosphate
  modified_base 19: mod_base = OTHER; note = 2'-O-methylcytidine-3'-phosphate
  modified_base 20: mod_base = OTHER; note = 2'-O-methyladenosine-3'-phosphate
  modified_base 21: mod_base = OTHER; note = 2'-O-methyladenosine-3'-phosphate ((2S,4R)-1-[29-[[2-(acetylamino)-2-deoxy-beta-D-galactopyra nosyl]oxy]-14,14-bis[[3-[[3-[[5-[[2-(acetylamino)-2-deoxy-b eta-D-galactopyranosyl]oxy]-1-oxopentyl]amino]propyl]amino] -3-oxopropoxy]methyl]-1,12,19,25-tetraoxo-16-oxa-13,20,24-t riazanonacos-1-yl]-4-hydroxy-2-pyrrolidinyl)methyl ester
  misc_feature 1..10: note = RNA
  misc_feature 12..16: note = RNA
  misc_feature 18..21: note = RNA
  misc_feature 11: note = DNA
  misc_feature 17: note = DNA
gaatgtgaaagtcatcgacaa

SEQ ID NO: 186 - DNA, 21 bp, synthetic construct
  source 1..21: mol_type = other DNA
  modified_base 1: mod_base = OTHER; note = 2'-O-methylguanosine-3'-phosphorothioate
  modified_base 2: mod_base = OTHER; note = 2'-O-methyladenosine-3'-phosphorothioate
  modified_base 3: mod_base = OTHER; note = 2'-O-methyladenosine-3'-phosphate
  modified_base 4: mod_base = OTHER; note = 2'-O-methyluridine-3'-phosphate
  modified_base 5: mod_base = OTHER; note = 2'-O-methylguanosine-3'-phosphate
  modified_base 6: mod_base = OTHER; note = 2'-O-methyluridine-3'-phosphate
  modified_base 7: mod_base = OTHER; note = 2'-O-methylguanosine-3'-phosphate
  modified_base 8: mod_base = OTHER; note = 2'-O-methyladenosine-3'-phosphate
  modified_base 9: mod_base = OTHER; note = 2'-O-methyladenosine-3'-phosphate
  modified_base 10: mod_base = OTHER; note = 2'-O-methyladenosine-3'-phosphate
  modified_base 12: mod_base = OTHER; note = 2'-O-methyluridine-3'-phosphate
  modified_base 13: mod_base = OTHER; note = 2'-O-methylcytidine-3'-phosphate
  modified_base 14: mod_base = OTHER; note = 2'-O-methyladenosine-3'-phosphate
  modified_base 15: mod_base = OTHER; note = 2'-O-methyluridine-3'-phosphate
  modified_base 16: mod_base = OTHER; note = 2'-O-methylcytidine-3'-phosphate
  modified_base 18: mod_base = OTHER; note = 2'-O-methyladenosine-3'-phosphate
  modified_base 19: mod_base = OTHER; note = 2'-O-methylcytidine-3'-phosphate
  modified_base 20: mod_base = OTHER; note = 2'-O-methyladenosine-3'-phosphate
  modified_base 21: mod_base = OTHER; note = 2'-O-methyladenosine-3'-phosphate ((2S,4R)-1-[29-[[2-(acetylamino)-2-deoxy-beta-D-galactopyra nosyl]oxy]-14,14-bis[[3-[[3-[[5-[[2-(acetylamino)-2-deoxy-b eta-D-galactopyranosyl]oxy]-1-oxopentyl]amino]propyl]amino] -3-oxopropoxy]methyl]-1,12,19,25-tetraoxo-16-oxa-13,20,24-t riazanonacos-1-yl]-4-hydroxy-2-pyrrolidinyl)methyl ester
  misc_feature 1..10: note = RNA
  misc_feature 12..16: note = RNA
  misc_feature 18..21: note = RNA
  misc_feature 11: note = DNA
  misc_feature 17: note = DNA
gaatgtgaaagtcatctacaa

SEQ ID NO: 187 - DNA, 21 bp, synthetic construct
  source 1..21: mol_type = other DNA
  modified_base 1: mod_base = OTHER; note = 2'-O-methylguanosine-3'-phosphorothioate
  modified_base 2: mod_base = OTHER; note = 2'-O-methyladenosine-3'-phosphorothioate
  modified_base 3: mod_base = OTHER; note = 2'-O-methyladenosine-3'-phosphate
  modified_base 4: mod_base = OTHER; note = 2'-O-methyluridine-3'-phosphate
  modified_base 5: mod_base = OTHER; note = 2'-O-methylguanosine-3'-phosphate
  modified_base 6: mod_base = OTHER; note = 2'-O-methyluridine-3'-phosphate
  modified_base 7: mod_base = OTHER; note = 2'-O-methylguanosine-3'-phosphate
  modified_base 8: mod_base = OTHER; note = 2'-O-methyladenosine-3'-phosphate
  modified_base 9: mod_base = OTHER; note = 2'-O-methyladenosine-3'-phosphate
  modified_base 10: mod_base = OTHER; note = 2'-O-methyladenosine-3'-phosphate
  modified_base 12: mod_base = OTHER; note = 2'-O-methyluridine-3'-phosphate
  modified_base 13: mod_base = OTHER; note = 2'-O-methylcytidine-3'-phosphate
  modified_base 14: mod_base = OTHER; note = 2'-O-methyladenosine-3'-phosphate
  modified_base 15: mod_base = OTHER; note = 2'-O-methyluridine-3'-phosphate
  modified_base 16: mod_base = OTHER; note = 2'-O-methylcytidine-3'-phosphate
  modified_base 17: mod_base = OTHER; note = 2-hydroxymethyl-4-methoxy-tetrahydrofuran-3-phosphate
  modified_base 18: mod_base = OTHER; note = 2'-O-methyladenosine-3'-phosphate
  modified_base 19: mod_base = OTHER; note = 2'-O-methylcytidine-3'-phosphate
  modified_base 20: mod_base = OTHER; note = 2'-O-methyladenosine-3'-phosphate
  modified_base 21: mod_base = OTHER; note = 2'-O-methyladenosine-3'-phosphate ((2S,4R)-1-[29-[[2-(acetylamino)-2-deoxy-beta-D-galactopyra nosyl]oxy]-14,14-bis[[3-[[3-[[5-[[2-(acetylamino)-2-deoxy-b eta-D-galactopyranosyl]oxy]-1-oxopentyl]amino]propyl]amino] -3-oxopropoxy]methyl]-1,12,19,25-tetraoxo-16-oxa-13,20,24-t riazanonacos-1-yl]-4-hydroxy-2-pyrrolidinyl)methyl ester
  misc_feature 1..10: note = RNA
  misc_feature 12..21: note = RNA
  misc_feature 11: note = DNA
gaatgtgaaagtcatcnacaa

SEQ ID NO: 188 - DNA, 21 bp, synthetic construct
  source 1..21: mol_type = other DNA
  modified_base 1: mod_base = OTHER; note = 2'-O-methylguanosine-3'-phosphorothioate
  modified_base 2: mod_base = OTHER; note = 2'-O-methyladenosine-3'-phosphorothioate
  modified_base 3: mod_base = OTHER; note = 2'-O-methyladenosine-3'-phosphate
  modified_base 4: mod_base = OTHER; note = 2'-O-methyluridine-3'-phosphate
  modified_base 5: mod_base = OTHER; note = 2'-O-methylguanosine-3'-phosphate
  modified_base 6: mod_base = OTHER; note = 2'-O-methyluridine-3'-phosphate
  modified_base 7: mod_base = OTHER; note = 2'-O-methylguanosine-3'-phosphate
  modified_base 8: mod_base = OTHER; note = 2'-O-methyladenosine-3'-phosphate
  modified_base 9: mod_base = OTHER; note = 2'-O-methyladenosine-3'-phosphate
  modified_base 10: mod_base = OTHER; note = 2'-O-methyladenosine-3'-phosphate
  modified_base 12: mod_base = OTHER; note = 2'-O-methyluridine-3'-phosphate
  modified_base 13: mod_base = OTHER; note = 2'-O-methylcytidine-3'-phosphate
  modified_base 14: mod_base = OTHER; note = 2'-O-methyladenosine-3'-phosphate
  modified_base 16: mod_base = OTHER; note = 2'-O-methylcytidine-3'-phosphate
  modified_base 18: mod_base = OTHER; note = 2'-O-methyladenosine-3'-phosphate
  modified_base 19: mod_base = OTHER; note = 2'-O-methylcytidine-3'-phosphate
  modified_base 20: mod_base = OTHER; note = 2'-O-methyladenosine-3'-phosphate
  modified_base 21: mod_base = OTHER; note = 2'-O-methyladenosine-3'-phosphate ((2S,4R)-1-[29-[[2-(acetylamino)-2-deoxy-beta-D-galactopyra nosyl]oxy]-14,14-bis[[3-[[3-[[5-[[2-(acetylamino)-2-deoxy-b eta-D-galactopyranosyl]oxy]-1-oxopentyl]amino]propyl]amino] -3-oxopropoxy]methyl]-1,12,19,25-tetraoxo-16-oxa-13,20,24-t riazanonacos-1-yl]-4-hydroxy-2-pyrrolidinyl)methyl ester
  misc_feature 1..10: note = RNA
  misc_feature 12..14: note = RNA
  misc_feature 16: note = RNA
  misc_feature 18..21: note = RNA
  misc_feature 11: note = DNA
  misc_feature 15: note = DNA
  misc_feature 17: note = DNA
gaatgtgaaagtcatctacaa

SEQ ID NO: 189 - DNA, 21 bp, synthetic construct
  source 1..21: mol_type = other DNA
  modified_base 1: mod_base = OTHER; note = 2'-O-methylguanosine-3'-phosphorothioate
  modified_base 2: mod_base = OTHER; note = 2'-O-methyladenosine-3'-phosphorothioate
  modified_base 3: mod_base = OTHER; note = 2'-O-methyladenosine-3'-phosphate
  modified_base 4: mod_base = OTHER; note = 2'-O-methyluridine-3'-phosphate
  modified_base 5: mod_base = OTHER; note = 2'-O-methylguanosine-3'-phosphate
  modified_base 6: mod_base = OTHER; note = 2'-O-methyluridine-3'-phosphate
  modified_base 7: mod_base = OTHER; note = 2'-O-methylguanosine-3'-phosphate
  modified_base 8: mod_base = OTHER; note = 2'-O-methyladenosine-3'-phosphate
  modified_base 9: mod_base = OTHER; note = 2'-O-methyladenosine-3'-phosphate
  modified_base 10: mod_base = OTHER; note = 2'-O-methyladenosine-3'-phosphate
  modified_base 12: mod_base = OTHER; note = 2'-O-methyluridine-3'-phosphate
  modified_base 13: mod_base = OTHER; note = 2'-O-methylcytidine-3'-phosphate
  modified_base 14: mod_base = OTHER; note = 2'-O-methyladenosine-3'-phosphate
  modified_base 15: mod_base = OTHER; note = 2'-O-methyluridine-3'-phosphate
  modified_base 16: mod_base = OTHER; note = 2'-O-methylcytidine-3'-phosphate
  modified_base 18: mod_base = OTHER; note = 2'-O-methyladenosine-3'-phosphate
  modified_base 20: mod_base = OTHER; note = 2'-O-methyladenosine-3'-phosphate
  modified_base 21: mod_base = OTHER; note = 2'-O-methyladenosine-3'-phosphate ((2S,4R)-1-[29-[[2-(acetylamino)-2-deoxy-beta-D-galactopyra nosyl]oxy]-14,14-bis[[3-[[3-[[5-[[2-(acetylamino)-2-deoxy-b eta-D-galactopyranosyl]oxy]-1-oxopentyl]amino]propyl]amino] -3-oxopropoxy]methyl]-1,12,19,25-tetraoxo-16-oxa-13,20,24-t riazanonacos-1-yl]-4-hydroxy-2-pyrrolidinyl)methyl ester
  misc_feature 1..10: note = RNA
  misc_feature 12..16: note = RNA
  misc_feature 18: note = RNA
  misc_feature 20..21: note = RNA
  misc_feature 11: note = DNA
  misc_feature 17: note = DNA
  misc_feature 19: note = DNA
gaatgtgaaagtcatcgacaa

SEQ ID NO: 190 - DNA, 21 bp, synthetic construct
  source 1..21: mol_type = other DNA
  modified_base 1: mod_base = OTHER; note = 2'-O-methylguanosine-3'-phosphorothioate
  modified_base 2: mod_base = OTHER; note = 2'-O-methyladenosine-3'-phosphorothioate
  modified_base 3: mod_base = OTHER; note = 2'-O-methyladenosine-3'-phosphate
  modified_base 4: mod_base = OTHER; note = 2'-O-methyluridine-3'-phosphate
  modified_base 5: mod_base = OTHER; note = 2'-O-methylguanosine-3'-phosphate
  modified_base 6: mod_base = OTHER; note = 2'-O-methyluridine-3'-phosphate
  modified_base 7: mod_base = OTHER; note = 2'-O-methylguanosine-3'-phosphate
  modified_base 8: mod_base = OTHER; note = 2'-O-methyladenosine-3'-phosphate
  modified_base 9: mod_base = OTHER; note = 2'-O-methyladenosine-3'-phosphate
  modified_base 10: mod_base = OTHER; note = 2'-O-methyladenosine-3'-phosphate
  modified_base 12: mod_base = OTHER; note = 2'-O-methyluridine-3'-phosphate
  modified_base 13: mod_base = OTHER; note = 2'-O-methylcytidine-3'-phosphate
  modified_base 14: mod_base = OTHER; note = 2'-O-methyladenosine-3'-phosphate
  modified_base 15: mod_base = OTHER; note = 2'-O-methyluridine-3'-phosphate
  modified_base 16: mod_base = OTHER; note = 2'-O-methylcytidine-3'-phosphate
  modified_base 18: mod_base = OTHER; note = 2'-O-methyladenosine-3'-phosphate
  modified_base 20: mod_base = OTHER; note = 2'-O-methyladenosine-3'-phosphate
  modified_base 21: mod_base = OTHER; note = 2'-O-methyladenosine-3'-phosphate ((2S,4R)-1-[29-[[2-(acetylamino)-2-deoxy-beta-D-galactopyra nosyl]oxy]-14,14-bis[[3-[[3-[[5-[[2-(acetylamino)-2-deoxy-b eta-D-galactopyranosyl]oxy]-1-oxopentyl]amino]propyl]amino] -3-oxopropoxy]methyl]-1,12,19,25-tetraoxo-16-oxa-13,20,24-t riazanonacos-1-yl]-4-hydroxy-2-pyrrolidinyl)methyl ester
  misc_feature 1..10: note = RNA
  misc_feature 12..16: note = RNA
  misc_feature 18: note = RNA
  misc_feature 20..21: note = RNA
  misc_feature 11: note = DNA
  misc_feature 17: note = DNA
  misc_feature 19: note = DNA
gaatgtgaaagtcatctacaa

SEQ ID NO: 191 - DNA, 21 bp, synthetic construct
  source 1..21: mol_type = other DNA
  modified_base 1: mod_base = OTHER; note = 2'-O-methylguanosine-3'-phosphorothioate
  modified_base 2: mod_base = OTHER; note = 2'-O-methyladenosine-3'-phosphorothioate
  modified_base 3: mod_base = OTHER; note = 2'-O-methyladenosine-3'-phosphate
  modified_base 4: mod_base = OTHER; note = 2'-O-methyluridine-3'-phosphate
  modified_base 5: mod_base = OTHER; note = 2'-O-methylguanosine-3'-phosphate
  modified_base 6: mod_base = OTHER; note = 2'-O-methyluridine-3'-phosphate
  modified_base 7: mod_base = OTHER; note = 2'-O-methylguanosine-3'-phosphate
  modified_base 8: mod_base = OTHER; note = 2'-O-methyladenosine-3'-phosphate
  modified_base 9: mod_base = OTHER; note = 2'-O-methyladenosine-3'-phosphate
  modified_base 10: mod_base = OTHER; note = 2'-O-methyladenosine-3'-phosphate
  modified_base 12: mod_base = OTHER; note = 2'-O-methyluridine-3'-phosphate
  modified_base 13: mod_base = OTHER; note = 2'-O-methylcytidine-3'-phosphate
  modified_base 14: mod_base = OTHER; note = 2'-O-methyladenosine-3'-phosphate
  modified_base 15: mod_base = OTHER; note = 2'-O-methyluridine-3'-phosphate
  modified_base 16: mod_base = OTHER; note = 2'-O-methylcytidine-3'-phosphate
  modified_base 17: mod_base = OTHER; note = 2-hydroxymethyl-4-methoxy-tetrahydrofuran-3-phosphate
  modified_base 18: mod_base = OTHER; note = 2'-O-methyladenosine-3'-phosphate
  modified_base 20: mod_base = OTHER; note = 2'-O-methyladenosine-3'-phosphate
  modified_base 21: mod_base = OTHER; note = 2'-O-methyladenosine-3'-phosphate ((2S,4R)-1-[29-[[2-(acetylamino)-2-deoxy-beta-D-galactopyra nosyl]oxy]-14,14-bis[[3-[[3-[[5-[[2-(acetylamino)-2-deoxy-b eta-D-galactopyranosyl]oxy]-1-oxopentyl]amino]propyl]amino] -3-oxopropoxy]methyl]-1,12,19,25-tetraoxo-16-oxa-13,20,24-t riazanonacos-1-yl]-4-hydroxy-2-pyrrolidinyl)methyl ester
  misc_feature 1..10: note = RNA
  misc_feature 12..18: note = RNA
  misc_feature 20..21: note = RNA
  misc_feature 11: note = DNA
  misc_feature 19: note = DNA
gaatgtgaaagtcatcnacaa

SEQ ID NO: 192 - RNA, 21 nt, synthetic construct
  source 1..21: mol_type = other RNA
  modified_base 1: mod_base = OTHER; note = 2'-deoxy-2'-fluoroguanosine-3'-phosphorothioate
  modified_base 2: mod_base = OTHER; note = 2'-O-methyladenosine-3'-phosphorothioate
  modified_base 3: mod_base = OTHER; note = 2'-deoxy-2'-fluoroadenosine-3'-phosphate
  modified_base 4: mod_base = OTHER; note = 2'-O-methyluridine-3'-phosphate
  modified_base 5: mod_base = OTHER; note = 2'-deoxy-2'-fluoroguanosine-3'-phosphate
  modified_base 6: mod_base = OTHER; note = 2'-O-methyluridine-3'-phosphate
  modified_base 7: mod_base = OTHER; note = 2'-deoxy-2'-fluoroguanosine-3'-phosphate
  modified_base 8: mod_base = OTHER; note = 2'-O-methyladenosine-3'-phosphate
  modified_base 9: mod_base = OTHER; note = 2'-deoxy-2'-fluoroadenosine-3'-phosphate
  modified_base 10: mod_base = OTHER; note = 2'-deoxy-2'-fluoroadenosine-3'-phosphate
  modified_base 11: mod_base = OTHER; note = 2'-deoxy-2'-fluoroguanosine-3'-phosphate
  modified_base 12: mod_base = OTHER; note = 2'-O-methyluridine-3'-phosphate
  modified_base 13: mod_base = OTHER; note = 2'-deoxy-2'-fluorocytidine-3'-phosphate
  modified_base 14: mod_base = OTHER; note = 2'-O-methyladenosine-3'-phosphate
  modified_base 15: mod_base = OTHER; note = 2'-deoxy-2'-fluorouridine-3'-phosphate
  modified_base 16: mod_base = OTHER; note = 2'-O-methylcytidine-3'-phosphate
  modified_base 17: mod_base = OTHER; note = 2'-deoxy-2'-fluoroguanosine-3'-phosphate
  modified_base 18: mod_base = OTHER; note = 2'-O-methyladenosine-3'-phosphate
  modified_base 19: mod_base = OTHER; note = 2'-deoxy-2'-fluorocytidine-3'-phosphate
  modified_base 20: mod_base = OTHER; note = 2'-O-methyladenosine-3'-phosphate
  modified_base 21: mod_base = OTHER; note = 2'-deoxy-2'-fluoroadenosine-3'-phosphate ((2S,4R)-1-[29-[[2-(acetylamino)-2-deoxy-beta-D-galactopyra nosyl]oxy]-14,14-bis[[3-[[3-[[5-[[2-(acetylamino)-2-deoxy-b eta-D-galactopyranosyl]oxy]-1-oxopentyl]amino]propyl]amino] -3-oxopropoxy]methyl]-1,12,19,25-tetraoxo-16-oxa-13,20,24-t riazanonacos-1-yl]-4-hydroxy-2-pyrrolidinyl)methyl ester
gaatgtgaaagtcatcgacaa

SEQ ID NO: 193 - RNA, 21 nt, synthetic construct
  source 1..21: mol_type = other RNA
  modified_base 1: mod_base = OTHER; note = 2'-deoxy-2'-fluoroguanosine-3'-phosphorothioate
  modified_base 2: mod_base = OTHER; note = 2'-O-methyladenosine-3'-phosphorothioate
  modified_base 3: mod_base = OTHER; note = 2'-deoxy-2'-fluoroadenosine-3'-phosphate
  modified_base 4: mod_base = OTHER; note = 2'-O-methyluridine-3'-phosphate
  modified_base 5: mod_base = OTHER; note = 2'-deoxy-2'-fluoroguanosine-3'-phosphate
  modified_base 6: mod_base = OTHER; note = 2'-O-methyluridine-3'-phosphate
  modified_base 7: mod_base = OTHER; note = 2'-deoxy-2'-fluoroguanosine-3'-phosphate
  modified_base 8: mod_base = OTHER; note = 2'-O-methyladenosine-3'-phosphate
  modified_base 9: mod_base = OTHER; note = 2'-deoxy-2'-fluoroadenosine-3'-phosphate
  modified_base 10: mod_base = OTHER; note = 2'-deoxy-2'-fluoroadenosine-3'-phosphate
  modified_base 11: mod_base = OTHER; note = 2'-deoxy-2'-fluoroguanosine-3'-phosphate
  modified_base 12: mod_base = OTHER; note = 2'-O-methyluridine-3'-phosphate
  modified_base 13: mod_base = OTHER; note = 2'-deoxy-2'-fluorocytidine-3'-phosphate
  modified_base 14: mod_base = OTHER; note = 2'-O-methyladenosine-3'-phosphate
  modified_base 15: mod_base = OTHER; note = 2'-deoxy-2'-fluorouridine-3'-phosphate
  modified_base 16: mod_base = OTHER; note = 2'-O-methylcytidine-3'-phosphate
  modified_base 17: mod_base = OTHER; note = 2'-deoxy-2'-fluoroguanosine-3'-phosphate
  modified_base 18: mod_base = OTHER; note = 2'-O-methyladenosine-3'-phosphate
  modified_base 19: mod_base = OTHER; note = 2'-deoxy-2'-fluorocytidine-3'-phosphate
  modified_base 20: mod_base = OTHER; note = 2'-O-methyladenosine-3'-phosphate
  modified_base 21: mod_base = OTHER; note = 2'-deoxy-2'-fluoroadenosine-3'-phosphate ((2S,4R)-1-[29-[[2-(acetylamino)-2-deoxy-beta-D-galactopyra nosyl]oxy]-14,14-bis[[3-[[3-[[5-[[2-(acetylamino)-2-deoxy-b eta-D-galactopyranosyl]oxy]-1-oxopentyl]amino]propyl]amino] -3-oxopropoxy]methyl]-1,12,19,25-tetraoxo-16-oxa-13,20,24-t riazanonacos-1-yl]-4-hydroxy-2-pyrrolidinyl)methyl ester
gaatgtgaaagtcatcgacaa

SEQ ID NO: 194 - RNA, 21 nt, synthetic construct
  source 1..21: mol_type = other RNA
  modified_base 1: mod_base = OTHER; note = 2'-deoxy-2'-fluoroguanosine-3'-phosphorothioate
  modified_base 2: mod_base = OTHER; note = 2'-O-methyladenosine-3'-phosphorothioate
  modified_base 3: mod_base = OTHER; note = 2'-deoxy-2'-fluoroadenosine-3'-phosphate
  modified_base 4: mod_base = OTHER; note = 2'-O-methyluridine-3'-phosphate
  modified_base 5: mod_base = OTHER; note = 2'-deoxy-2'-fluoroguanosine-3'-phosphate
  modified_base 6: mod_base = OTHER; note = 2'-O-methyluridine-3'-phosphate
  modified_base 7: mod_base = OTHER; note = 2'-deoxy-2'-fluoroguanosine-3'-phosphate
  modified_base 8: mod_base = OTHER; note = 2'-O-methyladenosine-3'-phosphate
  modified_base 9: mod_base = OTHER; note = 2'-deoxy-2'-fluoroadenosine-3'-phosphate
  modified_base 10: mod_base = OTHER; note = 2'-deoxy-2'-fluoroadenosine-3'-phosphate
  modified_base 11: mod_base = OTHER; note = 2'-deoxy-2'-fluoroguanosine-3'-phosphate
  modified_base 12: mod_base = OTHER; note = 2'-O-methyluridine-3'-phosphate
  modified_base 13: mod_base = OTHER; note = 2'-deoxy-2'-fluorocytidine-3'-phosphate
  modified_base 14: mod_base = OTHER; note = 2'-O-methyladenosine-3'-phosphate
  modified_base 15: mod_base = OTHER; note = 2'-deoxy-2'-fluorouridine-3'-phosphate
  modified_base 16: mod_base = OTHER; note = 2'-O-methylcytidine-3'-phosphate
  modified_base 17: mod_base = OTHER; note = 2'-deoxy-2'-fluoroguanosine-3'-phosphate
  modified_base 18: mod_base = OTHER; note = 2'-O-methyladenosine-3'-phosphate
  modified_base 19: mod_base = OTHER; note = 2'-deoxy-2'-fluorocytidine-3'-phosphate
  modified_base 20: mod_base = OTHER; note = 2'-O-methyladenosine-3'-phosphate
  modified_base 21: mod_base = OTHER; note = 2'-deoxy-2'-fluoroadenosine-3'-phosphate ((2S,4R)-1-[29-[[2-(acetylamino)-2-deoxy-beta-D-galactopyra nosyl]oxy]-14,14-bis[[3-[[3-[[5-[[2-(acetylamino)-2-deoxy-b eta-D-galactopyranosyl]oxy]-1-oxopentyl]amino]propyl]amino] -3-oxopropoxy]methyl]-1,12,19,25-tetraoxo-16-oxa-13,20,24-t riazanonacos-1-yl]-4-hydroxy-2-pyrrolidinyl)methyl ester
gaatgtgaaagtcatcgacaa

SEQ ID NO: 195 - RNA, 21 nt, synthetic construct
  source 1..21: mol_type = other RNA
  modified_base 1: mod_base = OTHER; note = 2'-deoxy-2'-fluoroguanosine-3'-phosphorothioate
  modified_base 2: mod_base = OTHER; note = 2'-O-methyladenosine-3'-phosphorothioate
  modified_base 3: mod_base = OTHER; note = 2'-deoxy-2'-fluoroadenosine-3'-phosphate
  modified_base 4: mod_base = OTHER; note = 2'-O-methyluridine-3'-phosphate
  modified_base 5: mod_base = OTHER; note = 2'-deoxy-2'-fluoroguanosine-3'-phosphate
  modified_base 6: mod_base = OTHER; note = 2'-O-methyluridine-3'-phosphate
  modified_base 7: mod_base = OTHER; note = 2'-deoxy-2'-fluoroguanosine-3'-phosphate
  modified_base 8: mod_base = OTHER; note = 2'-O-methyladenosine-3'-phosphate
  modified_base 9: mod_base = OTHER; note = 2'-deoxy-2'-fluoroadenosine-3'-phosphate
  modified_base 10: mod_base = OTHER; note = 2'-deoxy-2'-fluoroadenosine-3'-phosphate
  modified_base 11: mod_base = OTHER; note = 2'-deoxy-2'-fluoroguanosine-3'-phosphate
  modified_base 12: mod_base = OTHER; note = 2'-O-methyluridine-3'-phosphate
  modified_base 13: mod_base = OTHER; note = 2'-deoxy-2'-fluorocytidine-3'-phosphate
  modified_base 14: mod_base = OTHER; note = 2'-O-methyladenosine-3'-phosphate
  modified_base 15: mod_base = OTHER; note = 2'-deoxy-2'-fluorouridine-3'-phosphate
  modified_base 16: mod_base = OTHER; note = 2'-O-methylcytidine-3'-phosphate
  modified_base 17: mod_base = OTHER; note = 2'-deoxy-2'-fluoroguanosine-3'-phosphate
  modified_base 18: mod_base = OTHER; note = 2'-O-methyladenosine-3'-phosphate
  modified_base 19: mod_base = OTHER; note = 2'-deoxy-2'-fluorocytidine-3'-phosphate
  modified_base 20: mod_base = OTHER; note = 2'-O-methyladenosine-3'-phosphate
  modified_base 21: mod_base = OTHER; note = 2'-deoxy-2'-fluoroadenosine-3'-phosphate ((2S,4R)-1-[29-[[2-(acetylamino)-2-deoxy-beta-D-galactopyra nosyl]oxy]-14,14-bis[[3-[[3-[[5-[[2-(acetylamino)-2-deoxy-b eta-D-galactopyranosyl]oxy]-1-oxopentyl]amino]propyl]amino] -3-oxopropoxy]methyl]-1,12,19,25-tetraoxo-16-oxa-13,20,24-t riazanonacos-1-yl]-4-hydroxy-2-pyrrolidinyl)methyl ester
gaatgtgaaagtcatcgacaa

SEQ ID NO: 196 - RNA, 21 nt, synthetic construct
  source 1..21: mol_type = other RNA
  modified_base 1: mod_base = OTHER; note = 2'-deoxy-2'-fluoroguanosine-3'-phosphorothioate
  modified_base 2: mod_base = OTHER; note = 2'-O-methyladenosine-3'-phosphorothioate
  modified_base 3: mod_base = OTHER; note = 2'-deoxy-2'-fluoroadenosine-3'-phosphate
  modified_base 4: mod_base = OTHER; note = 2'-O-methyluridine-3'-phosphate
  modified_base 5: mod_base = OTHER; note = 2'-deoxy-2'-fluoroguanosine-3'-phosphate
  modified_base 6: mod_base = OTHER; note = 2'-O-methyluridine-3'-phosphate
  modified_base 7: mod_base = OTHER; note = 2'-deoxy-2'-fluoroguanosine-3'-phosphate
  modified_base 8: mod_base = OTHER; note = 2'-O-methyladenosine-3'-phosphate
  modified_base 9: mod_base = OTHER; note = 2'-deoxy-2'-fluoroadenosine-3'-phosphate
  modified_base 10: mod_base = OTHER; note = 2'-deoxy-2'-fluoroadenosine-3'-phosphate
  modified_base 11: mod_base = OTHER; note = 2'-deoxy-2'-fluoroguanosine-3'-phosphate
  modified_base 12: mod_base = OTHER; note = 2'-O-methyluridine-3'-phosphate
  modified_base 13: mod_base = OTHER; note = 2'-deoxy-2'-fluorocytidine-3'-phosphate
  modified_base 14: mod_base = OTHER; note = 2'-O-methyladenosine-3'-phosphate
  modified_base 15: mod_base = OTHER; note = 2'-deoxy-2'-fluorouridine-3'-phosphate
  modified_base 16: mod_base = OTHER; note = 2'-O-methylcytidine-3'-phosphate
  modified_base 17: mod_base = OTHER; note = 2'-deoxy-2'-fluoroguanosine-3'-phosphate
  modified_base 18: mod_base = OTHER; note = 2'-O-methyladenosine-3'-phosphate
  modified_base 19: mod_base = OTHER; note = 2'-deoxy-2'-fluorocytidine-3'-phosphate
  modified_base 20: mod_base = OTHER; note = 2'-O-methyladenosine-3'-phosphate
  modified_base 21: mod_base = OTHER; note = 2'-deoxy-2'-fluoroadenosine-3'-phosphate ((2S,4R)-1-[29-[[2-(acetylamino)-2-deoxy-beta-D-galactopyra nosyl]oxy]-14,14-bis[[3-[[3-[[5-[[2-(acetylamino)-2-deoxy-b eta-D-galactopyranosyl]oxy]-1-oxopentyl]amino]propyl]amino] -3-oxopropoxy]methyl]-1,12,19,25-tetraoxo-16-oxa-13,20,24-t riazanonacos-1-yl]-4-hydroxy-2-pyrrolidinyl)methyl ester
gaatgtgaaagtcatcgacaa

SEQ ID NO: 197 - RNA, 21 nt, synthetic construct
  source 1..21: mol_type = other RNA
  modified_base 1: mod_base = OTHER; note = 2'-deoxy-2'-fluoroguanosine-3'-phosphorothioate
  modified_base 2: mod_base = OTHER; note = 2'-O-methyladenosine-3'-phosphorothioate
  modified_base 3: mod_base = OTHER; note = 2'-deoxy-2'-fluoroadenosine-3'-phosphate
  modified_base 4: mod_base = OTHER; note = 2'-O-methyluridine-3'-phosphate
  modified_base 5: mod_base = OTHER; note = 2'-deoxy-2'-fluoroguanosine-3'-phosphate
  modified_base 6: mod_base = OTHER; note = 2'-O-methyluridine-3'-phosphate
  modified_base 7: mod_base = OTHER; note = 2'-deoxy-2'-fluoroguanosine-3'-phosphate
  modified_base 8: mod_base = OTHER; note = 2'-O-methyladenosine-3'-phosphate
  modified_base 9: mod_base = OTHER; note = 2'-deoxy-2'-fluoroadenosine-3'-phosphate
  modified_base 10: mod_base = OTHER; note = 2'-deoxy-2'-fluoroadenosine-3'-phosphate
  modified_base 11: mod_base = OTHER; note = 2'-deoxy-2'-fluoroguanosine-3'-phosphate
  modified_base 12: mod_base = OTHER; note = 2'-O-methyluridine-3'-phosphate
  modified_base 13: mod_base = OTHER; note = 2'-deoxy-2'-fluorocytidine-3'-phosphate
  modified_base 14: mod_base = OTHER; note = 2'-O-methyladenosine-3'-phosphate
  modified_base 15: mod_base = OTHER; note = 2'-deoxy-2'-fluorouridine-3'-phosphate
  modified_base 16: mod_base = OTHER; note = 2'-O-methylcytidine-3'-phosphate
  modified_base 17: mod_base = OTHER; note = 2'-deoxy-2'-fluoroguanosine-3'-phosphate
  modified_base 18: mod_base = OTHER; note = 2'-O-methyladenosine-3'-phosphate
  modified_base 19: mod_base = OTHER; note = 2'-deoxy-2'-fluorocytidine-3'-phosphate
  modified_base 20: mod_base = OTHER; note = 2'-O-methyladenosine-3'-phosphate
  modified_base 21: mod_base = OTHER; note = 2'-deoxy-2'-fluoroadenosine-3'-phosphate ((2S,4R)-1-[29-[[2-(acetylamino)-2-deoxy-beta-D-galactopyra nosyl]oxy]-14,14-bis[[3-[[3-[[5-[[2-(acetylamino)-2-deoxy-b eta-D-galactopyranosyl]oxy]-1-oxopentyl]amino]propyl]amino] -3-oxopropoxy]methyl]-1,12,19,25-tetraoxo-16-oxa-13,20,24-t riazanonacos-1-yl]-4-hydroxy-2-pyrrolidinyl)methyl ester
gaatgtgaaagtcatcgacaa

SEQ ID NO: 198 - DNA, 21 bp, synthetic construct
  source 1..21: mol_type = other DNA
  modified_base 1: mod_base = OTHER; note = 2'-O-methylguanosine-3'-phosphorothioate
  modified_base 2: mod_base = OTHER; note = 2'-O-methyladenosine-3'-phosphorothioate
  modified_base 3: mod_base = OTHER; note = 2'-O-methyladenosine-3'-phosphate
  modified_base 4: mod_base = OTHER; note = 2'-O-methyluridine-3'-phosphate
  modified_base 5: mod_base = OTHER; note = 2'-O-methylguanosine-3'-phosphate
  modified_base 6: mod_base = OTHER; note = 2'-O-methyluridine-3'-phosphate
  modified_base 7: mod_base = OTHER; note = 2'-O-methylguanosine-3'-phosphate
  modified_base 8: mod_base = OTHER; note = 2'-O-methyladenosine-3'-phosphate
  modified_base 9: mod_base = OTHER; note = 2'-O-methyladenosine-3'-phosphate
  modified_base 10: mod_base = OTHER; note = 2'-O-methyladenosine-3'-phosphate
  modified_base 12: mod_base = OTHER; note = 2'-O-methyluridine-3'-phosphate
  modified_base 13: mod_base = OTHER; note = 2'-O-methylcytidine-3'-phosphate
  modified_base 14: mod_base = OTHER; note = 2'-O-methyladenosine-3'-phosphate
  modified_base 15: mod_base = OTHER; note = 2'-O-methyluridine-3'-phosphate
  modified_base 16: mod_base = OTHER; note = Cytidine-glycol nucleic acid (GNA), S-isomer
  modified_base 17: mod_base = OTHER; note = 2'-O-methylguanosine-3'-phosphate
  modified_base 18: mod_base = OTHER; note = 2'-O-methyladenosine-3'-phosphate
  modified_base 19: mod_base = OTHER; note = 2'-O-methylcytidine-3'-phosphate
  modified_base 20: mod_base = OTHER; note = 2'-O-methyladenosine-3'-phosphate
  modified_base 21: mod_base = OTHER; note = 2'-O-methyladenosine-3'-phosphate ((2S,4R)-1-[29-[[2-(acetylamino)-2-deoxy-beta-D-galactopyra nosyl]oxy]-14,14-bis[[3-[[3-[[5-[[2-(acetylamino)-2-deoxy-b eta-D-galactopyranosyl]oxy]-1-oxopentyl]amino]propyl]amino] -3-oxopropoxy]methyl]-1,12,19,25-tetraoxo-16-oxa-13,20,24-t riazanonacos-1-yl]-4-hydroxy-2-pyrrolidinyl)methyl ester
  misc_feature 1..10: note = RNA
  misc_feature 12..21: note = RNA
  misc_feature 11: note = DNA
gaatgtgaaagtcatcgacaa

SEQ ID NO: 199 - RNA, 21 nt, synthetic construct
  source 1..21: mol_type = other RNA
  modified_base 1: mod_base = OTHER; note = 2'-deoxy-2'-fluoroguanosine-3'-phosphorothioate
  modified_base 2: mod_base = OTHER; note = 2'-O-methyladenosine-3'-phosphorothioate
  modified_base 3: mod_base = OTHER; note = 2'-deoxy-2'-fluorocytidine-3'-phosphate
  modified_base 4: mod_base = OTHER; note = 2'-O-methyluridine-3'-phosphate
  modified_base 5: mod_base = OTHER; note = 2'-deoxy-2'-fluorouridine-3'-phosphate
  modified_base 6: mod_base = OTHER; note = 2'-O-methyluridine-3'-phosphate
  modified_base 7: mod_base = OTHER; note = 2'-deoxy-2'-fluorocytidine-3'-phosphate
  modified_base 8: mod_base = OTHER; note = 2'-O-methyladenosine-3'-phosphate
  modified_base 9: mod_base = OTHER; note = 2'-deoxy-2'-fluorouridine-3'-phosphate
  modified_base 10: mod_base = OTHER; note = 2'-deoxy-2'-fluorocytidine-3'-phosphate
  modified_base 11: mod_base = OTHER; note = 2'-deoxy-2'-fluorocytidine-3'-phosphate
  modified_base 12: mod_base = OTHER; note = 2'-O-methyluridine-3'-phosphate
  modified_base 13: mod_base = OTHER; note = 2'-deoxy-2'-fluoroguanosine-3'-phosphate
  modified_base 14: mod_base = OTHER; note = 2'-O-methylguanosine-3'-phosphate
  modified_base 15: mod_base = OTHER; note = 2'-deoxy-2'-fluoroadenosine-3'-phosphate
  modified_base 16: mod_base = OTHER; note = 2'-O-methyladenosine-3'-phosphate
  modified_base 17: mod_base = OTHER; note = 2'-deoxy-2'-fluoroadenosine-3'-phosphate
  modified_base 18: mod_base = OTHER; note = 2'-O-methyluridine-3'-phosphate
  modified_base 19: mod_base = OTHER; note = 2'-deoxy-2'-fluoroadenosine-3'-phosphate
  modified_base 20: mod_base = OTHER; note = 2'-O-methyluridine-3'-phosphate
  modified_base 21: mod_base = OTHER; note = 2'-deoxy-2'-fluoroadenosine-3'-phosphate ((2S,4R)-1-[29-[[2-(acetylamino)-2-deoxy-beta-D-galactopyra nosyl]oxy]-14,14-bis[[3-[[3-[[5-[[2-(acetylamino)-2-deoxy-b eta-D-galactopyranosyl]oxy]-1-oxopentyl]amino]propyl]amino] -3-oxopropoxy]methyl]-1,12,19,25-tetraoxo-16-oxa-13,20,24-t riazanonacos-1-yl]-4-hydroxy-2-pyrrolidinyl)methyl ester
gactttcatcctggaaatata

SEQ ID NO: 200 - RNA, 21 nt, synthetic construct
  source 1..21: mol_type = other RNA
  modified_base 1: mod_base = OTHER; note = 2'-O-methylguanosine-3'-phosphorothioate
  modified_base 2: mod_base = OTHER; note = 2'-O-methyladenosine-3'-phosphorothioate
  modified_base 3: mod_base = OTHER; note = 2'-O-methylcytidine-3'-phosphate
  modified_base 4: mod_base = OTHER; note = 2'-O-methyluridine-3'-phosphate
  modified_base 5: mod_base = OTHER; note = 2'-O-methyluridine-3'-phosphate
  modified_base 6: mod_base = OTHER; note = 2'-O-methyluridine-3'-phosphate
  modified_base 7: mod_base = OTHER; note = 2'-deoxy-2'-fluorocytidine-3'-phosphate
  modified_base 8: mod_base = OTHER; note = 2'-O-methyladenosine-3'-phosphate
  modified_base 9: mod_base = OTHER; note = 2'-deoxy-2'-fluorouridine-3'-phosphate
  modified_base 10: mod_base = OTHER; note = 2'-deoxy-2'-fluorocytidine-3'-phosphate
  modified_base 11: mod_base = OTHER; note = 2'-deoxy-2'-fluorocytidine-3'-phosphate
  modified_base 12: mod_base = OTHER; note = 2'-O-methyluridine-3'-phosphate
  modified_base 13: mod_base = OTHER; note = 2'-O-methylguanosine-3'-phosphate
  modified_base 14: mod_base = OTHER; note = 2'-O-methylguanosine-3'-phosphate
  modified_base 15: mod_base = OTHER; note = 2'-O-methyladenosine-3'-phosphate
  modified_base 16: mod_base = OTHER; note = 2'-deoxy-2'-fluoroadenosine-3'-phosphate
  modified_base 17: mod_base = OTHER; note = 2'-O-methyladenosine-3'-phosphate
  modified_base 18: mod_base = OTHER; note = 2'-O-methyluridine-3'-phosphate
  modified_base 19: mod_base = OTHER; note = 2'-O-methyladenosine-3'-phosphate
  modified_base 20: mod_base = OTHER; note = 2'-O-methyluridine-3'-phosphate
  modified_base 21: mod_base = OTHER; note = 2'-O-methyladenosine-3'-phosphate ((2S,4R)-1-[29-[[2-(acetylamino)-2-deoxy-beta-D-galactopyra nosyl]oxy]-14,14-bis[[3-[[3-[[5-[[2-(acetylamino)-2-deoxy-b eta-D-galactopyranosyl]oxy]-1-oxopentyl]amino]propyl]amino] -3-oxopropoxy]methyl]-1,12,19,25-tetraoxo-16-oxa-13,20,24-t riazanonacos-1-yl]-4-hydroxy-2-pyrrolidinyl)methyl ester
gactttcatcctggaaatata

SEQ ID NO: 201 - RNA, 21 nt, synthetic construct
  source 1..21: mol_type = other RNA
  modified_base 1: mod_base = OTHER; note = 2'-O-methylguanosine-3'-phosphorothioate
  modified_base 2: mod_base = OTHER; note = 2'-O-methyladenosine-3'-phosphorothioate
  modified_base 3: mod_base = OTHER; note = 2'-O-methylcytidine-3'-phosphate
  modified_base 4: mod_base = OTHER; note = 2'-O-methyluridine-3'-phosphate
  modified_base 5: mod_base = OTHER; note = 2'-O-methyluridine-3'-phosphate
  modified_base 6: mod_base = OTHER; note = 2'-O-methyluridine-3'-phosphate
  modified_base 7: mod_base = OTHER; note = 2'-deoxy-2'-fluorocytidine-3'-phosphate
  modified_base 8: mod_base = OTHER; note = 2'-O-methyladenosine-3'-phosphate
  modified_base 9: mod_base = OTHER; note = 2'-deoxy-2'-fluorouridine-3'-phosphate
  modified_base 10: mod_base = OTHER; note = 2'-deoxy-2'-fluorocytidine-3'-phosphate
  modified_base 11: mod_base = OTHER; note = 2'-deoxy-2'-fluorocytidine-3'-phosphate
  modified_base 12: mod_base = OTHER; note = 2'-O-methyluridine-3'-phosphate
  modified_base 13: mod_base = OTHER; note = 2'-O-methylguanosine-3'-phosphate
  modified_base 14: mod_base = OTHER; note = 2'-O-methylguanosine-3'-phosphate
  modified_base 15: mod_base = OTHER; note = 2'-O-methyladenosine-3'-phosphate
  modified_base 16: mod_base = OTHER; note = 2'-O-methyladenosine-3'-phosphate
  modified_base 17: mod_base = OTHER; note = 2'-O-methyladenosine-3'-phosphate
  modified_base 18: mod_base = OTHER; note = 2'-O-methyluridine-3'-phosphate
  modified_base 19: mod_base = OTHER; note = 2'-O-methyladenosine-3'-phosphate
  modified_base 20: mod_base = OTHER; note = 2'-O-methyluridine-3'-phosphate
  modified_base 21: mod_base = OTHER; note = 2'-O-methyladenosine-3'-phosphate ((2S,4R)-1-[29-[[2-(acetylamino)-2-deoxy-beta-D-galactopyra nosyl]oxy]-14,14-bis[[3-[[3-[[5-[[2-(acetylamino)-2-deoxy-b eta-D-galactopyranosyl]oxy]-1-oxopentyl]amino]propyl]amino] -3-oxopropoxy]methyl]-1,12,19,25-tetraoxo-16-oxa-13,20,24-t riazanonacos-1-yl]-4-hydroxy-2-pyrrolidinyl)methyl ester
gactttcatcctggaaatata

SEQ ID NO: 202 - RNA, 21 nt, synthetic construct
  source 1..21: mol_type = other RNA
  modified_base 1: mod_base = OTHER; note = 2'-O-methylguanosine-3'-phosphorothioate
  modified_base 2: mod_base = OTHER; note = 2'-O-methyladenosine-3'-phosphorothioate
  modified_base 3: mod_base = OTHER; note = 2'-O-methylcytidine-3'-phosphate
  modified_base 4: mod_base = OTHER; note = 2'-O-methyluridine-3'-phosphate
  modified_base 5: mod_base = OTHER; note = 2'-O-methyluridine-3'-phosphate
  modified_base 6: mod_base = OTHER; note = 2'-O-methyluridine-3'-phosphate
  modified_base 7: mod_base = OTHER; note = 2'-deoxy-2'-fluorocytidine-3'-phosphate
  modified_base 8: mod_base = OTHER; note = 2'-O-methyladenosine-3'-phosphate
  modified_base 9: mod_base = OTHER; note = 2'-O-methyluridine-3'-phosphate
  modified_base 10: mod_base = OTHER; note = 2'-O-methylcytidine-3'-phosphate
  modified_base 11: mod_base = OTHER; note = 2'-deoxy-2'-fluorocytidine-3'-phosphate
  modified_base 12: mod_base = OTHER; note = 2'-O-methyluridine-3'-phosphate
  modified_base 13: mod_base = OTHER; note = 2'-O-methylguanosine-3'-phosphate
  modified_base 14: mod_base = OTHER; note = 2'-O-methylguanosine-3'-phosphate
  modified_base 15: mod_base = OTHER; note = 2'-O-methyladenosine-3'-phosphate
  modified_base 16: mod_base = OTHER; note = 2'-O-methyladenosine-3'-phosphate
  modified_base 17: mod_base = OTHER; note = 2'-deoxy-2'-fluoroadenosine-3'-phosphate
  modified_base 18: mod_base = OTHER; note = 2'-O-methyluridine-3'-phosphate
  modified_base 19: mod_base = OTHER; note = 2'-O-methyladenosine-3'-phosphate
  modified_base 20: mod_base = OTHER; note = 2'-O-methyluridine-3'-phosphate
  modified_base 21: mod_base = OTHER; note = 2'-O-methyladenosine-3'-phosphate ((2S,4R)-1-[29-[[2-(acetylamino)-2-deoxy-beta-D-galactopyra nosyl]oxy]-14,14-bis[[3-[[3-[[5-[[2-(acetylamino)-2-deoxy-b eta-D-galactopyranosyl]oxy]-1-oxopentyl]amino]propyl]amino] -3-oxopropoxy]methyl]-1,12,19,25-tetraoxo-16-oxa-13,20,24-t riazanonacos-1-yl]-4-hydroxy-2-pyrrolidinyl)methyl ester
gactttcatcctggaaatata

SEQ ID NO: 203 - RNA, 21 nt, synthetic construct
  source 1..21: mol_type = other RNA
  modified_base 1: mod_base = OTHER; note = 2'-O-methylguanosine-3'-phosphorothioate
  modified_base 2: mod_base = OTHER; note = 2'-O-methyladenosine-3'-phosphorothioate
  modified_base 3: mod_base = OTHER; note = 2'-O-methylcytidine-3'-phosphate
  modified_base 4: mod_base = OTHER; note = 2'-O-methyluridine-3'-phosphate
  modified_base 5: mod_base = OTHER; note = 2'-O-methyluridine-3'-phosphate
  modified_base 6: mod_base = OTHER; note = 2'-O-methyluridine-3'-phosphate
  modified_base 7: mod_base = OTHER; note = 2'-O-methylcytidine-3'-phosphate
  modified_base 8: mod_base = OTHER; note = 2'-O-methyladenosine-3'-phosphate
  modified_base 9: mod_base = OTHER; note = 2'-O-methyluridine-3'-phosphate
  modified_base 10: mod_base = OTHER; note = 2'-O-methylcytidine-3'-phosphate
  modified_base 11: mod_base = OTHER; note = 2'-deoxy-2'-fluorocytidine-3'-phosphate
  modified_base 12: mod_base = OTHER; note = 2'-O-methyluridine-3'-phosphate
  modified_base 13: mod_base = OTHER; note = 2'-O-methylguanosine-3'-phosphate
  modified_base 14: mod_base = OTHER; note = 2'-O-methylguanosine-3'-phosphate
  modified_base 15: mod_base = OTHER; note = 2'-O-methyladenosine-3'-phosphate
  modified_base 16: mod_base = OTHER; note = 2'-O-methyladenosine-3'-phosphate
  modified_base 17: mod_base = OTHER; note = 2'-deoxy-2'-fluoroadenosine-3'-phosphate
  modified_base 18: mod_base = OTHER; note = 2'-O-methyluridine-3'-phosphate
  modified_base 19: mod_base = OTHER; note = 2'-O-methyladenosine-3'-phosphate
  modified_base 20: mod_base = OTHER; note = 2'-O-methyluridine-3'-phosphate
  modified_base 21: mod_base = OTHER; note = 2'-O-methyladenosine-3'-phosphate ((2S,4R)-1-[29-[[2-(acetylamino)-2-deoxy-beta-D-galactopyra nosyl]oxy]-14,14-bis[[3-[[3-[[5-[[2-(acetylamino)-2-deoxy-b eta-D-galactopyranosyl]oxy]-1-oxopentyl]amino]propyl]amino] -3-oxopropoxy]methyl]-1,12,19,25-tetraoxo-16-oxa-13,20,24-t riazanonacos-1-yl]-4-hydroxy-2-pyrrolidinyl)methyl ester
gactttcatcctggaaatata

SEQ ID NO: 204 - RNA, 21 nt, synthetic construct
  source 1..21: mol_type = other RNA
  modified_base 1: mod_base = OTHER; note = 2'-O-methylguanosine-3'-phosphorothioate
  modified_base 2: mod_base = OTHER; note = 2'-O-methyladenosine-3'-phosphorothioate
  modified_base 3: mod_base = OTHER; note = 2'-O-methylcytidine-3'-phosphate
  modified_base 4: mod_base = OTHER; note = 2'-O-methyluridine-3'-phosphate
  modified_base 5: mod_base = OTHER; note = 2'-O-methyluridine-3'-phosphate
  modified_base 6: mod_base = OTHER; note = 2'-O-methyluridine-3'-phosphate
  modified_base 7: mod_base = OTHER; note = 2'-deoxy-2'-fluorocytidine-3'-phosphate
  modified_base 8: mod_base = OTHER; note = 2'-O-methyladenosine-3'-phosphate
  modified_base 9: mod_base = OTHER; note = 2'-O-methyluridine-3'-phosphate
  modified_base 10: mod_base = OTHER; note = 2'-O-methylcytidine-3'-phosphate
  modified_base 11: mod_base = OTHER; note = 2'-deoxy-2'-fluorocytidine-3'-phosphate
  modified_base 12: mod_base = OTHER; note = 2'-O-methyluridine-3'-phosphate
  modified_base 13: mod_base = OTHER; note = 2'-O-methylguanosine-3'-phosphate
  modified_base 14: mod_base = OTHER; note = 2'-O-methylguanosine-3'-phosphate
  modified_base 15: mod_base = OTHER; note = 2'-O-methyladenosine-3'-phosphate
  modified_base 16: mod_base = OTHER; note = 2'-O-methyladenosine-3'-phosphate
  modified_base 17: mod_base = OTHER; note = 2'-O-methyladenosine-3'-phosphate
  modified_base 18: mod_base = OTHER; note = 2'-O-methyluridine-3'-phosphate
  modified_base 19: mod_base = OTHER; note = 2'-O-methyladenosine-3'-phosphate
  modified_base 20: mod_base = OTHER; note = 2'-O-methyluridine-3'-phosphate
  modified_base 21: mod_base = OTHER; note = 2'-O-methyladenosine-3'-phosphate ((2S,4R)-1-[29-[[2-(acetylamino)-2-deoxy-beta-D-galactopyra nosyl]oxy]-14,14-bis[[3-[[3-[[5-[[2-(acetylamino)-2-deoxy-b eta-D-galactopyranosyl]oxy]-1-oxopentyl]amino]propyl]amino] -3-oxopropoxy]methyl]-1,12,19,25-tetraoxo-16-oxa-13,20,24-t riazanonacos-1-yl]-4-hydroxy-2-pyrrolidinyl)methyl ester
gactttcatcctggaaatata

SEQ ID NO: 205 - RNA, 19 nt, synthetic construct
  source 1..19: mol_type = other RNA
  modified_base 1: mod_base = OTHER; note = 2'-deoxy-2'-fluorocytidine-3'-phosphorothioate
  modified_base 2: mod_base = OTHER; note = 2'-O-methyluridine-3'-phosphorothioate
  modified_base 3: mod_base = OTHER; note = 2'-deoxy-2'-fluorouridine-3'-phosphate
  modified_base 4: mod_base = OTHER; note = 2'-O-methyluridine-3'-phosphate
  modified_base 5: mod_base = OTHER; note = 2'-deoxy-2'-fluorocytidine-3'-phosphate
  modified_base 6: mod_base = OTHER; note = 2'-O-methyladenosine-3'-phosphate
  modified_base 7: mod_base = OTHER; note = 2'-deoxy-2'-fluorouridine-3'-phosphate
  modified_base 8: mod_base = OTHER; note = 2'-deoxy-2'-fluorocytidine-3'-phosphate
  modified_base 9: mod_base = OTHER; note = 2'-deoxy-2'-fluorocytidine-3'-phosphate
  modified_base 10: mod_base = OTHER; note = 2'-O-methyluridine-3'-phosphate
  modified_base 11: mod_base = OTHER; note = 2'-deoxy-2'-fluoroguanosine-3'-phosphate
  modified_base 12: mod_base = OTHER; note = 2'-O-methylguanosine-3'-phosphate
  modified_base 13: mod_base = OTHER; note = 2'-deoxy-2'-fluoroadenosine-3'-phosphate
  modified_base 14: mod_base = OTHER; note = 2'-O-methyladenosine-3'-phosphate
  modified_base 15: mod_base = OTHER; note = 2'-deoxy-2'-fluoroadenosine-3'-phosphate
  modified_base 16: mod_base = OTHER; note = 2'-O-methyluridine-3'-phosphate
  modified_base 17: mod_base = OTHER; note = 2'-deoxy-2'-fluoroadenosine-3'-phosphate
  modified_base 18: mod_base = OTHER; note = 2'-O-methyluridine-3'-phosphate
  modified_base 19: mod_base = OTHER; note = 2'-deoxy-2'-fluoroadenosine-3'-phosphate ((2S,4R)-1-[29-[[2-(acetylamino)-2-deoxy-beta-D-galactopyra nosyl]oxy]-14,14-bis[[3-[[3-[[5-[[2-(acetylamino)-2-deoxy-b eta-D-galactopyranosyl]oxy]-1-oxopentyl]amino]propyl]amino] -3-oxopropoxy]methyl]-1,12,19,25-tetraoxo-16-oxa-13,20,24-t riazanonacos-1-yl]-4-hydroxy-2-pyrrolidinyl)methyl ester
ctttcatcctggaaatata

SEQ ID NO: 206 - RNA, 19 nt, synthetic construct
  source 1..19: mol_type = other RNA
  modified_base 1: mod_base = OTHER; note = 2'-O-methylcytidine-3'-phosphorothioate
  modified_base 2: mod_base = OTHER; note = 2'-O-methyluridine-3'-phosphorothioate
  modified_base 3: mod_base = OTHER; note = 2'-O-methyluridine-3'-phosphate
  modified_base 4: mod_base = OTHER; note = 2'-O-methyluridine-3'-phosphate
  modified_base 5: mod_base = OTHER; note = 2'-deoxy-2'-fluorocytidine-3'-phosphate
  modified_base 6: mod_base = OTHER; note = 2'-O-methyladenosine-3'-phosphate
  modified_base 7: mod_base = OTHER; note = 2'-deoxy-2'-fluorouridine-3'-phosphate
  modified_base 8: mod_base = OTHER; note = 2'-deoxy-2'-fluorocytidine-3'-phosphate
  modified_base 9: mod_base = OTHER; note = 2'-deoxy-2'-fluorocytidine-3'-phosphate
  modified_base 10: mod_base = OTHER; note = 2'-O-methyluridine-3'-phosphate
  modified_base 11: mod_base = OTHER; note = 2'-O-methylguanosine-3'-phosphate
  modified_base 12: mod_base = OTHER; note = 2'-O-methylguanosine-3'-phosphate
  modified_base 13: mod_base = OTHER; note = 2'-O-methyladenosine-3'-phosphate
  modified_base 14: mod_base = OTHER; note = 2'-O-methyladenosine-3'-phosphate
  modified_base 15: mod_base = OTHER; note = 2'-O-methyladenosine-3'-phosphate
  modified_base 16: mod_base = OTHER; note = 2'-O-methyluridine-3'-phosphate
  modified_base 17: mod_base = OTHER; note = 2'-O-methyladenosine-3'-phosphate
  modified_base 18: mod_base = OTHER; note = 2'-O-methyluridine-3'-phosphate
  modified_base 19: mod_base = OTHER; note = 2'-O-methyladenosine-3'-phosphate ((2S,4R)-1-[29-[[2-(acetylamino)-2-deoxy-beta-D-galactopyra nosyl]oxy]-14,14-bis[[3-[[3-[[5-[[2-(acetylamino)-2-deoxy-b eta-D-galactopyranosyl]oxy]-1-oxopentyl]amino]propyl]amino] -3-oxopropoxy]methyl]-1,12,19,25-tetraoxo-16-oxa-13,20,24-t riazanonacos-1-yl]-4-hydroxy-2-pyrrolidinyl)methyl ester
ctttcatcctggaaatata

SEQ ID NO: 207 - RNA, 21 nt, synthetic construct
  source 1..21: mol_type = other RNA
  modified_base 1: mod_base = OTHER; note = 2'-deoxy-2'-fluoroguanosine-3'-phosphorothioate
  modified_base 2: mod_base = OTHER; note = 2'-O-methyladenosine-3'-phosphorothioate
  modified_base 3: mod_base = OTHER; note = 2'-deoxy-2'-fluorocytidine-3'-phosphate
  modified_base 4: mod_base = OTHER; note = 2'-O-methyluridine-3'-phosphate
  modified_base 5: mod_base = OTHER; note = 2'-deoxy-2'-fluorouridine-3'-phosphate
  modified_base 6: mod_base = OTHER; note = 2'-O-methyluridine-3'-phosphate
  modified_base 7: mod_base = OTHER; note = 2'-deoxy-2'-fluorocytidine-3'-phosphate
  modified_base 8: mod_base = OTHER; note = 2'-O-methyladenosine-3'-phosphate
  modified_base 9: mod_base = OTHER; note = 2'-deoxy-2'-fluorouridine-3'-phosphate
  modified_base 10: mod_base = OTHER; note = 2'-deoxy-2'-fluorocytidine-3'-phosphate
  modified_base 11: mod_base = OTHER; note = 2'-deoxy-2'-fluorocytidine-3'-phosphate
  modified_base 12: mod_base = OTHER; note = 2'-O-methyluridine-3'-phosphate
  modified_base 13: mod_base = OTHER; note = 2'-deoxy-2'-fluoroguanosine-3'-phosphate
  modified_base 14: mod_base = OTHER; note = 2'-O-methylguanosine-3'-phosphate
  modified_base 15: mod_base = OTHER; note = 2'-deoxy-2'-fluoroadenosine-3'-phosphate
  modified_base 16: mod_base = OTHER; note = 2'-O-methyladenosine-3'-phosphate
  modified_base 17: mod_base = OTHER; note = 2'-deoxy-2'-fluoroadenosine-3'-phosphate
  modified_base 18: mod_base = OTHER; note = 2'-O-methyluridine-3'-phosphate
  modified_base 19: mod_base = OTHER; note = 2'-deoxy-2'-fluoroadenosine-3'-phosphate
  modified_base 20: mod_base = OTHER; note = 2'-O-methyluridine-3'-phosphate
  modified_base 21: mod_base = OTHER; note = 2'-deoxy-2'-fluoroadenosine-3'-phosphate ((2S,4R)-1-[29-[[2-(acetylamino)-2-deoxy-beta-D-galactopyra nosyl]oxy]-14,14-bis[[3-[[3-[[5-[[2-(acetylamino)-2-deoxy-b eta-D-galactopyranosyl]oxy]-1-oxopentyl]amino]propyl]amino] -3-oxopropoxy]methyl]-1,12,19,25-tetraoxo-16-oxa-13,20,24-t riazanonacos-1-yl]-4-hydroxy-2-pyrrolidinyl)methyl ester
gactttcatcctggaaatata

SEQ ID NO: 208 - RNA, 21 nt, synthetic construct
  source 1..21: mol_type = other RNA
  modified_base 1: mod_base = OTHER; note = 2'-deoxy-2'-fluoroguanosine-3'-phosphorothioate
  modified_base 2: mod_base = OTHER; note = 2'-O-methyladenosine-3'-phosphorothioate
  modified_base 3: mod_base = OTHER; note = 2'-deoxy-2'-fluorocytidine-3'-phosphate
  modified_base 4: mod_base = OTHER; note = 2'-O-methyluridine-3'-phosphate
  modified_base 5: mod_base = OTHER; note = 2'-deoxy-2'-fluorouridine-3'-phosphate
  modified_base 6: mod_base = OTHER; note = 2'-O-methyluridine-3'-phosphate
  modified_base 7: mod_base = OTHER; note = 2'-deoxy-2'-fluorocytidine-3'-phosphate
  modified_base 8: mod_base = OTHER; note = 2'-O-methyladenosine-3'-phosphate
  modified_base 9: mod_base = OTHER; note = 2'-deoxy-2'-fluorouridine-3'-phosphate
  modified_base 10: mod_base = OTHER; note = 2'-deoxy-2'-fluorocytidine-3'-phosphate
  modified_base 11: mod_base = OTHER; note = 2'-deoxy-2'-fluorocytidine-3'-phosphate
  modified_base 12: mod_base = OTHER; note = 2'-O-methyluridine-3'-phosphate
  modified_base 13: mod_base = OTHER; note = 2'-deoxy-2'-fluoroguanosine-3'-phosphate
  modified_base 14: mod_base = OTHER; note = 2'-O-methylguanosine-3'-phosphate
  modified_base 15: mod_base = OTHER; note = 2'-deoxy-2'-fluoroadenosine-3'-phosphate
  modified_base 16: mod_base = OTHER; note = 2'-O-methyladenosine-3'-phosphate
  modified_base 17: mod_base = OTHER; note = 2'-deoxy-2'-fluoroadenosine-3'-phosphate
  modified_base 18: mod_base = OTHER; note = 2'-O-methyluridine-3'-phosphate
  modified_base 19: mod_base = OTHER; note = 2'-deoxy-2'-fluoroadenosine-3'-phosphate
  modified_base 20: mod_base = OTHER; note = 2'-O-methyluridine-3'-phosphate
  modified_base 21: mod_base = OTHER; note = 2'-deoxy-2'-fluoroadenosine-3'-phosphate ((2S,4R)-1-[29-[[2-(acetylamino)-2-deoxy-beta-D-galactopyra nosyl]oxy]-14,14-bis[[3-[[3-[[5-[[2-(acetylamino)-2-deoxy-b eta-D-galactopyranosyl]oxy]-1-oxopentyl]amino]propyl]amino] -3-oxopropoxy]methyl]-1,12,19,25-tetraoxo-16-oxa-13,20,24-t riazanonacos-1-yl]-4-hydroxy-2-pyrrolidinyl)methyl ester
gactttcatcctggaaatata

SEQ ID NO: 209 - RNA, 21 nt, synthetic construct
  source 1..21: mol_type = other RNA
  modified_base 1: mod_base = OTHER; note = 2'-deoxy-2'-fluoroguanosine-3'-phosphorothioate
  modified_base 2: mod_base = OTHER; note = 2'-O-methyladenosine-3'-phosphorothioate
  modified_base 3: mod_base = OTHER; note = 2'-deoxy-2'-fluorocytidine-3'-phosphate
  modified_base 4: mod_base = OTHER; note = 2'-O-methyluridine-3'-phosphate
  modified_base 5: mod_base = OTHER; note = 2'-deoxy-2'-fluorouridine-3'-phosphate
  modified_base 6: mod_base = OTHER; note = 2'-O-methyluridine-3'-phosphate
  modified_base 7: mod_base = OTHER; note = 2'-deoxy-2'-fluorocytidine-3'-phosphate
  modified_base 8: mod_base = OTHER; note = 2'-O-methyladenosine-3'-phosphate
  modified_base 9: mod_base = OTHER; note = 2'-deoxy-2'-fluorouridine-3'-phosphate
  modified_base 10: mod_base = OTHER; note = 2'-deoxy-2'-fluorocytidine-3'-phosphate
  modified_base 11: mod_base = OTHER; note = 2'-deoxy-2'-fluorocytidine-3'-phosphate
  modified_base 12: mod_base = OTHER; note = 2'-O-methyluridine-3'-phosphate
  modified_base 13: mod_base = OTHER; note = 2'-deoxy-2'-fluoroguanosine-3'-phosphate
  modified_base 14: mod_base = OTHER; note = 2'-O-methylguanosine-3'-phosphate
  modified_base 15: mod_base = OTHER; note = 2'-deoxy-2'-fluoroadenosine-3'-phosphate
  modified_base 16: mod_base = OTHER; note = 2'-O-methyladenosine-3'-phosphate
  modified_base 17: mod_base = OTHER; note = 2'-deoxy-2'-fluoroadenosine-3'-phosphate
  modified_base 18: mod_base = OTHER; note = 2'-O-methyluridine-3'-phosphate
  modified_base 19: mod_base = OTHER; note = 2'-deoxy-2'-fluoroadenosine-3'-phosphate
  modified_base 20: mod_base = OTHER; note = 2'-O-methyluridine-3'-phosphate
  modified_base 21: mod_base = OTHER; note = 2'-deoxy-2'-fluoroadenosine-3'-phosphate ((2S,4R)-1-[29-[[2-(acetylamino)-2-deoxy-beta-D-galactopyra nosyl]oxy]-14,14-bis[[3-[[3-[[5-[[2-(acetylamino)-2-deoxy-b eta-D-galactopyranosyl]oxy]-1-oxopentyl]amino]propyl]amino] -3-oxopropoxy]methyl]-1,12,19,25-tetraoxo-16-oxa-13,20,24-t riazanonacos-1-yl]-4-hydroxy-2-pyrrolidinyl)methyl ester
gactttcatcctggaaatata

SEQ ID NO: 210 - RNA, 21 nt, synthetic construct
  source 1..21: mol_type = other RNA
  modified_base 1: mod_base = OTHER; note = 2'-deoxy-2'-fluoroguanosine-3'-phosphorothioate
  modified_base 2: mod_base = OTHER; note = 2'-O-methyladenosine-3'-phosphorothioate
  modified_base 3: mod_base = OTHER; note = 2'-deoxy-2'-fluorocytidine-3'-phosphate
  modified_base 4: mod_base = OTHER; note = 2'-O-methyluridine-3'-phosphate
  modified_base 5: mod_base = OTHER; note = 2'-deoxy-2'-fluorouridine-3'-phosphate
  modified_base 6: mod_base = OTHER; note = 2'-O-methyluridine-3'-phosphate
  modified_base 7: mod_base = OTHER; note = 2'-deoxy-2'-fluorocytidine-3'-phosphate
  modified_base 8: mod_base = OTHER; note = 2'-O-methyladenosine-3'-phosphate
  modified_base 9: mod_base = OTHER; note = 2'-deoxy-2'-fluorouridine-3'-phosphate
  modified_base 10: mod_base = OTHER; note = 2'-deoxy-2'-fluorocytidine-3'-phosphate
  modified_base 11: mod_base = OTHER; note = 2'-deoxy-2'-fluorocytidine-3'-phosphate
  modified_base 12: mod_base = OTHER; note = 2'-O-methyluridine-3'-phosphate
  modified_base 13: mod_base = OTHER; note = 2'-deoxy-2'-fluoroguanosine-3'-phosphate
  modified_base 14: mod_base = OTHER; note = 2'-O-methylguanosine-3'-phosphate
  modified_base 15: mod_base = OTHER; note = 2'-deoxy-2'-fluoroadenosine-3'-phosphate
  modified_base 16: mod_base = OTHER; note = 2'-O-methyladenosine-3'-phosphate
  modified_base 17: mod_base = OTHER; note = 2'-deoxy-2'-fluoroadenosine-3'-phosphate
  modified_base 18: mod_base = OTHER; note = 2'-O-methyluridine-3'-phosphate
  modified_base 19: mod_base = OTHER; note = 2'-deoxy-2'-fluoroadenosine-3'-phosphate
  modified_base 20: mod_base = OTHER; note = 2'-O-methyluridine-3'-phosphate
  modified_base 21: mod_base = OTHER; note = 2'-deoxy-2'-fluoroadenosine-3'-phosphate ((2S,4R)-1-[29-[[2-(acetylamino)-2-deoxy-beta-D-galactopyra nosyl]oxy]-14,14-bis[[3-[[3-[[5-[[2-(acetylamino)-2-deoxy-b eta-D-galactopyranosyl]oxy]-1-oxopentyl]amino]propyl]amino] -3-oxopropoxy]methyl]-1,12,19,25-tetraoxo-16-oxa-13,20,24-t riazanonacos-1-yl]-4-hydroxy-2-pyrrolidinyl)methyl ester
gactttcatcctggaaatata

SEQ ID NO: 211 - RNA, 21 nt, synthetic construct
  source 1..21: mol_type = other RNA
  modified_base 1: mod_base = OTHER; note = 2'-deoxy-2'-fluoroguanosine-3'-phosphorothioate
  modified_base 2: mod_base = OTHER; note = 2'-O-methyladenosine-3'-phosphorothioate
  modified_base 3: mod_base = OTHER; note = 2'-deoxy-2'-fluorocytidine-3'-phosphate
  modified_base 4: mod_base = OTHER; note = 2'-O-methyluridine-3'-phosphate
  modified_base 5: mod_base = OTHER; note = 2'-deoxy-2'-fluorouridine-3'-phosphate
  modified_base 6: mod_base = OTHER; note = 2'-O-methyluridine-3'-phosphate
  modified_base 7: mod_base = OTHER; note = 2'-deoxy-2'-fluorocytidine-3'-phosphate
  modified_base 8: mod_base = OTHER; note = 2'-O-methyladenosine-3'-phosphate
  modified_base 9: mod_base = OTHER; note = 2'-deoxy-2'-fluorouridine-3'-phosphate
  modified_base 10: mod_base = OTHER; note = 2'-deoxy-2'-fluorocytidine-3'-phosphate
  modified_base 11: mod_base = OTHER; note = 2'-deoxy-2'-fluorocytidine-3'-phosphate
  modified_base 12: mod_base = OTHER; note = 2'-O-methyluridine-3'-phosphate
  modified_base 13: mod_base = OTHER; note = 2'-deoxy-2'-fluoroguanosine-3'-phosphate
  modified_base 14: mod_base = OTHER; note = 2'-O-methylguanosine-3'-phosphate
  modified_base 15: mod_base = OTHER; note = 2'-deoxy-2'-fluoroadenosine-3'-phosphate
  modified_base 16: mod_base = OTHER; note = 2'-O-methyladenosine-3'-phosphate
  modified_base 17: mod_base = OTHER; note = 2'-deoxy-2'-fluoroadenosine-3'-phosphate
  modified_base 18: mod_base = OTHER; note = 2'-O-methyluridine-3'-phosphate
  modified_base 19: mod_base = OTHER; note = 2'-deoxy-2'-fluoroadenosine-3'-phosphate
  modified_base 20: mod_base = OTHER; note = 2'-O-methyluridine-3'-phosphate
  modified_base 21: mod_base = OTHER; note = 2'-deoxy-2'-fluoroadenosine-3'-phosphate ((2S,4R)-1-[29-[[2-(acetylamino)-2-deoxy-beta-D-galactopyra nosyl]oxy]-14,14-bis[[3-[[3-[[5-[[2-(acetylamino)-2-deoxy-b eta-D-galactopyranosyl]oxy]-1-oxopentyl]amino]propyl]amino] -3-oxopropoxy]methyl]-1,12,19,25-tetraoxo-16-oxa-13,20,24-t riazanonacos-1-yl]-4-hydroxy-2-pyrrolidinyl)methyl ester
gactttcatcctggaaatata

SEQ ID NO: 212 - RNA, 21 nt, synthetic construct
  source 1..21: mol_type = other RNA
  modified_base 1: mod_base = OTHER; note = 2'-O-methylguanosine-3'-phosphorothioate
  modified_base 2: mod_base = OTHER; note = 2'-O-methyladenosine-3'-phosphorothioate
  modified_base 3: mod_base = OTHER; note = 2'-O-methylcytidine-3'-phosphate
  modified_base 4: mod_base = OTHER; note = 2'-O-methyluridine-3'-phosphate
  modified_base 5: mod_base = OTHER; note = 2'-O-methyluridine-3'-phosphate
  modified_base 6: mod_base = OTHER; note = 2'-O-methyluridine-3'-phosphate
  modified_base 7: mod_base = OTHER; note = 2'-deoxy-2'-fluorocytidine-3'-phosphate
  modified_base 8: mod_base = OTHER; note = 2'-O-methyladenosine-3'-phosphate
  modified_base 9: mod_base = OTHER; note = 2'-deoxy-2'-fluorouridine-3'-phosphate
  modified_base 10: mod_base = OTHER; note = 2'-deoxy-2'-fluorocytidine-3'-phosphate
  modified_base 11: mod_base = OTHER; note = 2'-deoxy-2'-fluorocytidine-3'-phosphate
  modified_base 12: mod_base = OTHER; note = 2'-O-methyluridine-3'-phosphate
  modified_base 13: mod_base = OTHER; note = 2'-O-methylguanosine-3'-phosphate
  modified_base 14: mod_base = OTHER; note = 2'-O-methylguanosine-3'-phosphate
  modified_base 15: mod_base = OTHER; note = 2'-O-methyladenosine-3'-phosphate
  modified_base 16: mod_base = OTHER; note = 2'-O-methyladenosine-3'-phosphate
  modified_base 17: mod_base = OTHER; note = 2'-O-methyladenosine-3'-phosphate
  modified_base 18: mod_base = OTHER; note = 2'-O-methyluridine-3'-phosphate
  modified_base 19: mod_base = OTHER; note = 2'-O-methyladenosine-3'-phosphate
  modified_base 20: mod_base = OTHER; note = 2'-O-methyluridine-3'-phosphate
  modified_base 21: mod_base = OTHER; note = 2'-O-methyladenosine-3'-phosphate ((2S,4R)-1-[29-[[2-(acetylamino)-2-deoxy-beta-D-galactopyra nosyl]oxy]-14,14-bis[[3-[[3-[[5-[[2-(acetylamino)-2-deoxy-b eta-D-galactopyranosyl]oxy]-1-oxopentyl]amino]propyl]amino] -3-oxopropoxy]methyl]-1,12,19,25-tetraoxo-16-oxa-13,20,24-t riazanonacos-1-yl]-4-hydroxy-2-pyrrolidinyl)methyl ester
gactttcatcctggaaatata

SEQ ID NO: 213 - RNA, 21 nt, synthetic construct
  source 1..21: mol_type = other RNA
  modified_base 1: mod_base = OTHER; note = 2'-O-methylguanosine-3'-phosphorothioate
  modified_base 2: mod_base = OTHER; note = 2'-O-methyladenosine-3'-phosphorothioate
  modified_base 3: mod_base = OTHER; note = 2'-O-methylcytidine-3'-phosphate
  modified_base 4: mod_base = OTHER; note = 2'-O-methyluridine-3'-phosphate
  modified_base 5: mod_base = OTHER; note = 2'-O-methyluridine-3'-phosphate
  modified_base 6: mod_base = OTHER; note = 2'-O-methyluridine-3'-phosphate
  modified_base 7: mod_base = OTHER; note = 2'-deoxy-2'-fluorocytidine-3'-phosphate
  modified_base 8: mod_base = OTHER; note = 2'-O-methyladenosine-3'-phosphate
  modified_base 9: mod_base = OTHER; note = 2'-deoxy-2'-fluorouridine-3'-phosphate
  modified_base 10: mod_base = OTHER; note = 2'-deoxy-2'-fluorocytidine-3'-phosphate
  modified_base 11: mod_base = OTHER; note = 2'-deoxy-2'-fluorocytidine-3'-phosphate
  modified_base 12: mod_base = OTHER; note = 2'-O-methyluridine-3'-phosphate
  modified_base 13: mod_base = OTHER; note = 2'-O-methylguanosine-3'-phosphate
  modified_base 14: mod_base = OTHER; note = 2'-O-methylguanosine-3'-phosphate
  modified_base 15: mod_base = OTHER; note = 2'-O-methyladenosine-3'-phosphate
  modified_base 16: mod_base = OTHER; note = 2'-O-methyladenosine-3'-phosphate
  modified_base 17: mod_base = OTHER; note = 2'-O-methyladenosine-3'-phosphate
  modified_base 18: mod_base = OTHER; note = 2'-O-methyluridine-3'-phosphate
  modified_base 19: mod_base = OTHER; note = 2'-O-methyladenosine-3'-phosphate
  modified_base 20: mod_base = OTHER; note = 2'-O-methyluridine-3'-phosphate
  modified_base 21: mod_base = OTHER; note = 2'-O-methyladenosine-3'-phosphate ((2S,4R)-1-[29-[[2-(acetylamino)-2-deoxy-beta-D-galactopyra nosyl]oxy]-14,14-bis[[3-[[3-[[5-[[2-(acetylamino)-2-deoxy-b eta-D-galactopyranosyl]oxy]-1-oxopentyl]amino]propyl]amino] -3-oxopropoxy]methyl]-1,12,19,25-tetraoxo-16-oxa-13,20,24-t riazanonacos-1-yl]-4-hydroxy-2-pyrrolidinyl)methyl ester
gactttcatcctggaaatata

SEQ ID NO: 214 - RNA, 21 nt, synthetic construct
  source 1..21: mol_type = other RNA
  modified_base 1: mod_base = OTHER; note = 2'-O-methylguanosine-3'-phosphorothioate
  modified_base 2: mod_base = OTHER; note = 2'-O-methyladenosine-3'-phosphorothioate
  modified_base 3: mod_base = OTHER; note = 2'-O-methylcytidine-3'-phosphate
  modified_base 4: mod_base = OTHER; note = 2'-O-methyluridine-3'-phosphate
  modified_base 5: mod_base = OTHER; note = 2'-O-methyluridine-3'-phosphate
  modified_base 6: mod_base = OTHER; note = 2'-O-methyluridine-3'-phosphate
  modified_base 7: mod_base = OTHER; note = 2'-deoxy-2'-fluorocytidine-3'-phosphate
  modified_base 8: mod_base = OTHER; note = 2'-O-methyladenosine-3'-phosphate
  modified_base 9: mod_base = OTHER; note = 2'-deoxy-2'-fluorouridine-3'-phosphate
  modified_base 10: mod_base = OTHER; note = 2'-deoxy-2'-fluorocytidine-3'-phosphate
  modified_base 11: mod_base = OTHER; note = 2'-deoxy-2'-fluorocytidine-3'-phosphate
  modified_base 12: mod_base = OTHER; note = 2'-O-methyluridine-3'-phosphate
  modified_base 13: mod_base = OTHER; note = 2'-O-methylguanosine-3'-phosphate
  modified_base 14: mod_base = OTHER; note = 2'-O-methylguanosine-3'-phosphate
  modified_base 15: mod_base = OTHER; note = 2'-O-methyladenosine-3'-phosphate
  modified_base 16: mod_base = OTHER; note = 2'-O-methyladenosine-3'-phosphate
  modified_base 17: mod_base = OTHER; note = 2'-O-methyladenosine-3'-phosphate
  modified_base 18: mod_base = OTHER; note = 2'-O-methyluridine-3'-phosphate
  modified_base 19: mod_base = OTHER; note = 2'-O-methyladenosine-3'-phosphate
  modified_base 20: mod_base = OTHER; note = 2'-O-methyluridine-3'-phosphate
  modified_base 21: mod_base = OTHER; note = 2'-O-methyladenosine-3'-phosphate ((2S,4R)-1-[29-[[2-(acetylamino)-2-deoxy-beta-D-galactopyra nosyl]oxy]-14,14-bis[[3-[[3-[[5-[[2-(acetylamino)-2-deoxy-b eta-D-galactopyranosyl]oxy]-1-oxopentyl]amino]propyl]amino] -3-oxopropoxy]methyl]-1,12,19,25-tetraoxo-16-oxa-13,20,24-t riazanonacos-1-yl]-4-hydroxy-2-pyrrolidinyl)methyl ester
gactttcatcctggaaatata

SEQ ID NO: 215 - RNA, 21 nt, synthetic construct
  source 1..21: mol_type = other RNA
  modified_base 1: mod_base = OTHER; note = 2'-O-methylguanosine-3'-phosphorothioate
  modified_base 2: mod_base = OTHER; note = 2'-O-methyladenosine-3'-phosphorothioate
  modified_base 3: mod_base = OTHER; note = 2'-O-methylcytidine-3'-phosphate
  modified_base 4: mod_base = OTHER; note = 2'-O-methyluridine-3'-phosphate
  modified_base 5: mod_base = OTHER; note = 2'-O-methyluridine-3'-phosphate
  modified_base 6: mod_base = OTHER; note = 2'-O-methyluridine-3'-phosphate
  modified_base 7: mod_base = OTHER; note = 2'-deoxy-2'-fluorocytidine-3'-phosphate
  modified_base 8: mod_base = OTHER; note = 2'-O-methyladenosine-3'-phosphate
  modified_base 9: mod_base = OTHER; note = 2'-O-methyluridine-3'-phosphate
  modified_base 10: mod_base = OTHER; note = 2'-deoxy-2'-fluorocytidine-3'-phosphate
  modified_base 11: mod_base = OTHER; note = 2'-deoxy-2'-fluorocytidine-3'-phosphate
  modified_base 12: mod_base = OTHER; note = 2'-O-methyluridine-3'-phosphate
  modified_base 13: mod_base = OTHER; note = 2'-O-methylguanosine-3'-phosphate
  modified_base 14: mod_base = OTHER; note = 2'-O-methylguanosine-3'-phosphate
  modified_base 15: mod_base = OTHER; note = 2'-O-methyladenosine-3'-phosphate
  modified_base 16: mod_base = OTHER; note = 2'-O-methyladenosine-3'-phosphate
  modified_base 17: mod_base = OTHER; note = 2'-O-methyladenosine-3'-phosphate
  modified_base 18: mod_base = OTHER; note = 2'-O-methyluridine-3'-phosphate
  modified_base 19: mod_base = OTHER; note = 2'-O-methyladenosine-3'-phosphate
  modified_base 20: mod_base = OTHER; note = 2'-O-methyluridine-3'-phosphate
  modified_base 21: mod_base = OTHER; note = 2'-O-methyladenosine-3'-phosphate ((2S,4R)-1-[29-[[2-(acetylamino)-2-deoxy-beta-D-galactopyra nosyl]oxy]-14,14-bis[[3-[[3-[[5-[[2-(acetylamino)-2-deoxy-b eta-D-galactopyranosyl]oxy]-1-oxopentyl]amino]propyl]amino] -3-oxopropoxy]methyl]-1,12,19,25-tetraoxo-16-oxa-13,20,24-t riazanonacos-1-yl]-4-hydroxy-2-pyrrolidinyl)methyl ester
gactttcatcctggaaatata

SEQ ID NO: 216 - RNA, 21 nt, synthetic construct
  source 1..21: mol_type = other RNA
  modified_base 1: mod_base = OTHER; note = 2'-O-methylguanosine-3'-phosphorothioate
  modified_base 2: mod_base = OTHER; note = 2'-O-methyladenosine-3'-phosphorothioate
  modified_base 3: mod_base = OTHER; note = 2'-O-methylcytidine-3'-phosphate
  modified_base 4: mod_base = OTHER; note = 2'-O-methyluridine-3'-phosphate
  modified_base 5: mod_base = OTHER; note = 2'-O-methyluridine-3'-phosphate
  modified_base 6: mod_base = OTHER; note = 2'-O-methyluridine-3'-phosphate
  modified_base 7: mod_base = OTHER; note = 2'-deoxy-2'-fluorocytidine-3'-phosphate
  modified_base 8: mod_base = OTHER; note = 2'-O-methyladenosine-3'-phosphate
  modified_base 9: mod_base = OTHER; note = 2'-O-methyluridine-3'-phosphate
  modified_base 10: mod_base = OTHER; note = 2'-deoxy-2'-fluorocytidine-3'-phosphate
  modified_base 11: mod_base = OTHER; note = 2'-deoxy-2'-fluorocytidine-3'-phosphate
  modified_base 12: mod_base = OTHER; note = 2'-O-methyluridine-3'-phosphate
  modified_base 13: mod_base = OTHER; note = 2'-O-methylguanosine-3'-phosphate
  modified_base 14: mod_base = OTHER; note = 2'-O-methylguanosine-3'-phosphate
  modified_base 15: mod_base = OTHER; note = 2'-O-methyladenosine-3'-phosphate
  modified_base 16: mod_base = OTHER; note = 2'-O-methyladenosine-3'-phosphate
  modified_base 17: mod_base = OTHER; note = 2'-O-methyladenosine-3'-phosphate
  modified_base 18: mod_base = OTHER; note = 2'-O-methyluridine-3'-phosphate
  modified_base 19: mod_base = OTHER; note = 2'-O-methyladenosine-3'-phosphate
  modified_base 20: mod_base = OTHER; note = 2'-O-methyluridine-3'-phosphate
  modified_base 21: mod_base = OTHER; note = 2'-O-methyladenosine-3'-phosphate ((2S,4R)-1-[29-[[2-(acetylamino)-2-deoxy-beta-D-galactopyra nosyl]oxy]-14,14-bis[[3-[[3-[[5-[[2-(acetylamino)-2-deoxy-b eta-D-galactopyranosyl]oxy]-1-oxopentyl]amino]propyl]amino] -3-oxopropoxy]methyl]-1,12,19,25-tetraoxo-16-oxa-13,20,24-t riazanonacos-1-yl]-4-hydroxy-2-pyrrolidinyl)methyl ester
gactttcatcctggaaatata

SEQ ID NO: 217 - RNA, 21 nt, synthetic construct
  source 1..21: mol_type = other RNA
  modified_base 1: mod_base = OTHER; note = 2'-O-methylguanosine-3'-phosphorothioate
  modified_base 2: mod_base = OTHER; note = 2'-O-methyladenosine-3'-phosphorothioate
  modified_base 3: mod_base = OTHER; note = 2'-O-methylcytidine-3'-phosphate
  modified_base 4: mod_base = OTHER; note = 2'-O-methyluridine-3'-phosphate
  modified_base 5: mod_base = OTHER; note = 2'-O-methyluridine-3'-phosphate
  modified_base 6: mod_base = OTHER; note = 2'-O-methyluridine-3'-phosphate
  modified_base 7: mod_base = OTHER; note = 2'-deoxy-2'-fluorocytidine-3'-phosphate
  modified_base 8: mod_base = OTHER; note = 2'-O-methyladenosine-3'-phosphate
  modified_base 9: mod_base = OTHER; note = 2'-O-methyluridine-3'-phosphate
  modified_base 10: mod_base = OTHER; note = 2'-deoxy-2'-fluorocytidine-3'-phosphate
  modified_base 11: mod_base = OTHER; note = 2'-deoxy-2'-fluorocytidine-3'-phosphate
  modified_base 12: mod_base = OTHER; note = 2'-O-methyluridine-3'-phosphate
  modified_base 13: mod_base = OTHER; note = 2'-O-methylguanosine-3'-phosphate
  modified_base 14: mod_base = OTHER; note = 2'-O-methylguanosine-3'-phosphate
  modified_base 15: mod_base = OTHER; note = 2'-O-methyladenosine-3'-phosphate
  modified_base 16: mod_base = OTHER; note = 2'-O-methyladenosine-3'-phosphate
  modified_base 17: mod_base = OTHER; note = 2'-O-methyladenosine-3'-phosphate
  modified_base 18: mod_base = OTHER; note = 2'-O-methyluridine-3'-phosphate
  modified_base 19: mod_base = OTHER; note = 2'-O-methyladenosine-3'-phosphate
  modified_base 20: mod_base = OTHER; note = 2'-O-methyluridine-3'-phosphate
  modified_base 21: mod_base = OTHER; note = 2'-O-methyladenosine-3'-phosphate ((2S,4R)-1-[29-[[2-(acetylamino)-2-deoxy-beta-D-galactopyra nosyl]oxy]-14,14-bis[[3-[[3-[[5-[[2-(acetylamino)-2-deoxy-b eta-D-galactopyranosyl]oxy]-1-oxopentyl]amino]propyl]amino] -3-oxopropoxy]methyl]-1,12,19,25-tetraoxo-16-oxa-13,20,24-t riazanonacos-1-yl]-4-hydroxy-2-pyrrolidinyl)methyl ester
gactttcatcctggaaatata

SEQ ID NO: 218 - RNA, 21 nt, synthetic construct
  source 1..21: mol_type = other RNA
  modified_base 1: mod_base = OTHER; note = 2'-O-methylguanosine-3'-phosphorothioate
  modified_base 2: mod_base = OTHER; note = 2'-O-methyladenosine-3'-phosphorothioate
  modified_base 3: mod_base = OTHER; note = 2'-O-methylcytidine-3'-phosphate
  modified_base 4: mod_base = OTHER; note = 2'-O-methyluridine-3'-phosphate
  modified_base 5: mod_base = OTHER; note = 2'-O-methyluridine-3'-phosphate
  modified_base 6: mod_base = OTHER; note = 2'-O-methyluridine-3'-phosphate
  modified_base 7: mod_base = OTHER; note = 2'-O-methylcytidine-3'-phosphate
  modified_base 8: mod_base = OTHER; note = 2'-O-methyladenosine-3'-phosphate
  modified_base 9: mod_base = OTHER; note = 2'-O-methyluridine-3'-phosphate
  modified_base 10: mod_base = OTHER; note = 2'-O-methylcytidine-3'-phosphate
  modified_base 11: mod_base = OTHER; note = 2'-O-methylcytidine-3'-phosphate
  modified_base 12: mod_base = OTHER; note = 2'-O-methyluridine-3'-phosphate
  modified_base 13: mod_base = OTHER; note = 2'-O-methylguanosine-3'-phosphate
  modified_base 14: mod_base = OTHER; note = 2'-O-methylguanosine-3'-phosphate
  modified_base 15: mod_base = OTHER; note = 2'-O-methyladenosine-3'-phosphate
  modified_base 16: mod_base = OTHER; note = 2'-O-methyladenosine-3'-phosphate
  modified_base 17: mod_base = OTHER; note = Adenosine-glycol nucleic acid (GNA), S-isomer
  modified_base 18: mod_base = OTHER; note = 2'-O-methyluridine-3'-phosphate
  modified_base 19: mod_base = OTHER; note = 2'-O-methyladenosine-3'-phosphate
  modified_base 20: mod_base = OTHER; note = 2'-O-methyluridine-3'-phosphate
  modified_base 21: mod_base = OTHER; note = 2'-O-methyladenosine-3'-phosphate ((2S,4R)-1-[29-[[2-(acetylamino)-2-deoxy-beta-D-galactopyra nosyl]oxy]-14,14-bis[[3-[[3-[[5-[[2-(acetylamino)-2-deoxy-b eta-D-galactopyranosyl]oxy]-1-oxopentyl]amino]propyl]amino] -3-oxopropoxy]methyl]-1,12,19,25-tetraoxo-16-oxa-13,20,24-t riazanonacos-1-yl]-4-hydroxy-2-pyrrolidinyl)methyl ester
gactttcatcctggaaatata

SEQ ID NO: 219 - DNA, 21 bp, synthetic construct
  source 1..21: mol_type = other DNA
  modified_base 1: mod_base = OTHER; note = 2'-O-methylguanosine-3'-phosphorothioate
  modified_base 2: mod_base = OTHER; note = 2'-O-methyladenosine-3'-phosphorothioate
  modified_base 3: mod_base = OTHER; note = 2'-O-methylcytidine-3'-phosphate
  modified_base 4: mod_base = OTHER; note = 2'-O-methyluridine-3'-phosphate
  modified_base 5: mod_base = OTHER; note = 2'-O-methyluridine-3'-phosphate
  modified_base 6: mod_base = OTHER; note = 2'-O-methyluridine-3'-phosphate
  modified_base 7: mod_base = OTHER; note = 2'-O-methylcytidine-3'-phosphate
  modified_base 8: mod_base = OTHER; note = 2'-O-methyladenosine-3'-phosphate
  modified_base 9: mod_base = OTHER; note = 2'-O-methyluridine-3'-phosphate
  modified_base 10: mod_base = OTHER; note = 2'-O-methylcytidine-3'-phosphate
  modified_base 12: mod_base = OTHER; note = 2'-O-methyluridine-3'-phosphate
  modified_base 13: mod_base = OTHER; note = 2'-O-methylguanosine-3'-phosphate
  modified_base 14: mod_base = OTHER; note = 2'-O-methylguanosine-3'-phosphate
  modified_base 15: mod_base = OTHER; note = 2'-O-methyladenosine-3'-phosphate
  modified_base 16: mod_base = OTHER; note = 2'-O-methyladenosine-3'-phosphate
  modified_base 17: mod_base = OTHER; note = Adenosine-glycol nucleic acid (GNA), S-isomer
  modified_base 18: mod_base = OTHER; note = 2'-O-methyluridine-3'-phosphate
  modified_base 19: mod_base = OTHER; note = 2'-O-methyladenosine-3'-phosphate
  modified_base 20: mod_base = OTHER; note = 2'-O-methyluridine-3'-phosphate
  modified_base 21: mod_base = OTHER; note = 2'-O-methyladenosine-3'-phosphate ((2S,4R)-1-[29-[[2-(acetylamino)-2-deoxy-beta-D-galactopyra nosyl]oxy]-14,14-bis[[3-[[3-[[5-[[2-(acetylamino)-2-deoxy-b eta-D-galactopyranosyl]oxy]-1-oxopentyl]amino]propyl]amino] -3-oxopropoxy]methyl]-1,12,19,25-tetraoxo-16-oxa-13,20,24-t riazanonacos-1-yl]-4-hydroxy-2-pyrrolidinyl)methyl ester
  misc_feature 1..10: note = RNA
  misc_feature 12..21: note = RNA
  misc_feature 11: note = DNA
gactttcatcctggaaatata

SEQ ID NO: 220 - DNA, 21 bp, synthetic construct
  source 1..21: mol_type = other DNA
  modified_base 1: mod_base = OTHER; note = 2'-O-methylguanosine-3'-phosphorothioate
  modified_base 2: mod_base = OTHER; note = 2'-O-methyladenosine-3'-phosphorothioate
  modified_base 3: mod_base = OTHER; note = 2'-O-methylcytidine-3'-phosphate
  modified_base 4: mod_base = OTHER; note = 2'-O-methyluridine-3'-phosphate
  modified_base 6: mod_base = OTHER; note = 2'-O-methyluridine-3'-phosphate
  modified_base 7: mod_base = OTHER; note = 2'-O-methylcytidine-3'-phosphate
  modified_base 8: mod_base = OTHER; note = 2'-O-methyladenosine-3'-phosphate
  modified_base 9: mod_base = OTHER; note = 2'-O-methyluridine-3'-phosphate
  modified_base 10: mod_base = OTHER; note = 2'-O-methylcytidine-3'-phosphate
  modified_base 12: mod_base = OTHER; note = 2'-O-methyluridine-3'-phosphate
  modified_base 13: mod_base = OTHER; note = 2'-O-methylguanosine-3'-phosphate
  modified_base 14: mod_base = OTHER; note = 2'-O-methylguanosine-3'-phosphate
  modified_base 15: mod_base = OTHER; note = 2'-O-methyladenosine-3'-phosphate
  modified_base 16: mod_base = OTHER; note = 2'-O-methyladenosine-3'-phosphate
  modified_base 17: mod_base = OTHER; note = Adenosine-glycol nucleic acid (GNA), S-isomer
  modified_base 18: mod_base = OTHER; note = 2'-O-methyluridine-3'-phosphate
  modified_base 19: mod_base = OTHER; note = 2'-O-methyladenosine-3'-phosphate
  modified_base 20: mod_base = OTHER; note = 2'-O-methyluridine-3'-phosphate
  modified_base 21: mod_base = OTHER; note = 2'-O-methyladenosine-3'-phosphate ((2S,4R)-1-[29-[[2-(acetylamino)-2-deoxy-beta-D-galactopyra nosyl]oxy]-14,14-bis[[3-[[3-[[5-[[2-(acetylamino)-2-deoxy-b eta-D-galactopyranosyl]oxy]-1-oxopentyl]amino]propyl]amino] -3-oxopropoxy]methyl]-1,12,19,25-tetraoxo-16-oxa-13,20,24-t riazanonacos-1-yl]-4-hydroxy-2-pyrrolidinyl)methyl ester
  misc_feature 1..4: note = RNA
  misc_feature 6..10: note = RNA
  misc_feature 12..21: note = RNA
  misc_feature 5: note = DNA
  misc_feature 11: note = DNA
gactttcatcctggaaatata

SEQ ID NO: 221 - DNA, 21 bp, synthetic construct
  source 1..21: mol_type = other DNA
  modified_base 1: mod_base = OTHER; note = 2'-O-methylguanosine-3'-phosphorothioate
  modified_base 2: mod_base = OTHER; note = 2'-O-methyladenosine-3'-phosphorothioate
  modified_base 3: mod_base = OTHER; note = 2'-O-methylcytidine-3'-phosphate
  modified_base 4: mod_base = OTHER; note = 2'-O-methyluridine-3'-phosphate
  modified_base 5: mod_base = OTHER; note = 2'-O-methyluridine-3'-phosphate
  modified_base 7: mod_base = OTHER; note = 2'-O-methylcytidine-3'-phosphate
  modified_base 8: mod_base = OTHER; note = 2'-O-methyladenosine-3'-phosphate
  modified_base 9: mod_base = OTHER; note = 2'-O-methyluridine-3'-phosphate
  modified_base 10: mod_base = OTHER; note = 2'-O-methylcytidine-3'-phosphate
  modified_base 12: mod_base = OTHER; note = 2'-O-methyluridine-3'-phosphate
  modified_base 13: mod_base = OTHER; note = 2'-O-methylguanosine-3'-phosphate
  modified_base 14: mod_base = OTHER; note = 2'-O-methylguanosine-3'-phosphate
  modified_base 15: mod_base = OTHER; note = 2'-O-methyladenosine-3'-phosphate
  modified_base 16: mod_base = OTHER; note = 2'-O-methyladenosine-3'-phosphate
  modified_base 17: mod_base = OTHER; note = Adenosine-glycol nucleic acid (GNA), S-isomer
  modified_base 18: mod_base = OTHER; note = 2'-O-methyluridine-3'-phosphate
  modified_base 19: mod_base = OTHER; note = 2'-O-methyladenosine-3'-phosphate
  modified_base 20: mod_base = OTHER; note = 2'-O-methyluridine-3'-phosphate
  modified_base 21: mod_base = OTHER; note = 2'-O-methyladenosine-3'-phosphate ((2S,4R)-1-[29-[[2-(acetylamino)-2-deoxy-beta-D-galactopyra nosyl]oxy]-14,14-bis[[3-[[3-[[5-[[2-(acetylamino)-2-deoxy-b eta-D-galactopyranosyl]oxy]-1-oxopentyl]amino]propyl]amino] -3-oxopropoxy]methyl]-1,12,19,25-tetraoxo-16-oxa-13,20,24-t riazanonacos-1-yl]-4-hydroxy-2-pyrrolidinyl)methyl ester
  misc_feature 1..5: note = RNA
  misc_feature 7..10: note = RNA
  misc_feature 12..21: note = RNA
  misc_feature 6: note = DNA
  misc_feature 11: note = DNA
gactttcatcctggaaatata

SEQ ID NO: 222 - DNA, 21 bp, synthetic construct
  source 1..21: mol_type = other DNA
  modified_base 1: mod_base = OTHER; note = 2'-O-methylguanosine-3'-phosphorothioate
  modified_base 2: mod_base = OTHER; note = 2'-O-methyladenosine-3'-phosphorothioate
  modified_base 3: mod_base = OTHER; note = 2'-O-methylcytidine-3'-phosphate
  modified_base 4: mod_base = OTHER; note = 2'-O-methyluridine-3'-phosphate
  modified_base 5: mod_base = OTHER; note = 2'-O-methyluridine-3'-phosphate
  modified_base 6: mod_base = OTHER; note = 2'-O-methyluridine-3'-phosphate
  modified_base 8: mod_base = OTHER; note = 2'-O-methyladenosine-3'-phosphate
  modified_base 9: mod_base = OTHER; note = 2'-O-methyluridine-3'-phosphate
  modified_base 10: mod_base = OTHER; note = 2'-O-methylcytidine-3'-phosphate
  modified_base 12: mod_base = OTHER; note = 2'-O-methyluridine-3'-phosphate
  modified_base 13: mod_base = OTHER; note = 2'-O-methylguanosine-3'-phosphate
  modified_base 14: mod_base = OTHER; note = 2'-O-methylguanosine-3'-phosphate
  modified_base 15: mod_base = OTHER; note = 2'-O-methyladenosine-3'-phosphate
  modified_base 16: mod_base = OTHER; note = 2'-O-methyladenosine-3'-phosphate
  modified_base 17: mod_base = OTHER; note = Adenosine-glycol nucleic acid (GNA), S-isomer
  modified_base 18: mod_base = OTHER; note = 2'-O-methyluridine-3'-phosphate
  modified_base 19: mod_base = OTHER; note = 2'-O-methyladenosine-3'-phosphate
  modified_base 20: mod_base = OTHER; note = 2'-O-methyluridine-3'-phosphate
  modified_base 21: mod_base = OTHER; note = 2'-O-methyladenosine-3'-phosphate ((2S,4R)-1-[29-[[2-(acetylamino)-2-deoxy-beta-D-galactopyra nosyl]oxy]-14,14-bis[[3-[[3-[[5-[[2-(acetylamino)-2-deoxy-b eta-D-galactopyranosyl]oxy]-1-oxopentyl]amino]propyl]amino] -3-oxopropoxy]methyl]-1,12,19,25-tetraoxo-16-oxa-13,20,24-t riazanonacos-1-yl]-4-hydroxy-2-pyrrolidinyl)methyl ester
  misc_feature 1..6: note = RNA
  misc_feature 8..10: note = RNA
  misc_feature 12..21: note = RNA
  misc_feature 7: note = DNA
  misc_feature 11: note = DNA
gactttcatcctggaaatata

SEQ ID NO: 223 - DNA, 21 bp, synthetic construct
  source 1..21: mol_type = other DNA
  modified_base 1: mod_base = OTHER; note = 2'-O-methylguanosine-3'-phosphorothioate
  modified_base 2: mod_base = OTHER; note = 2'-O-methyladenosine-3'-phosphorothioate
  modified_base 3: mod_base = OTHER; note = 2'-O-methylcytidine-3'-phosphate
  modified_base 4: mod_base = OTHER; note = 2'-O-methyluridine-3'-phosphate
  modified_base 5: mod_base = OTHER; note = 2'-O-methyluridine-3'-phosphate
  modified_base 6: mod_base = OTHER; note = 2'-O-methyluridine-3'-phosphate
  modified_base 7: mod_base = OTHER; note = 2'-O-methylcytidine-3'-phosphate
  modified_base 8: mod_base = OTHER; note = 2'-O-methyladenosine-3'-phosphate
  modified_base 9: mod_base = OTHER; note = 2'-O-methyluridine-3'-phosphate
  modified_base 10: mod_base = OTHER; note = 2'-O-methylcytidine-3'-phosphate
  modified_base 12: mod_base = OTHER; note = 2'-O-methyluridine-3'-phosphate
  modified_base 13: mod_base = OTHER; note = 2'-O-methylguanosine-3'-phosphate
  modified_base 14: mod_base = OTHER; note = 2'-O-methylguanosine-3'-phosphate
  modified_base 15: mod_base = OTHER; note = 2'-O-methyladenosine-3'-phosphate
  modified_base 16: mod_base = OTHER; note = 2'-O-methyladenosine-3'-phosphate
  modified_base 18: mod_base = OTHER; note = 2'-O-methyluridine-3'-phosphate
  modified_base 19: mod_base = OTHER; note = 2'-O-methyladenosine-3'-phosphate
  modified_base 20: mod_base = OTHER; note = 2'-O-methyluridine-3'-phosphate
  modified_base 21: mod_base = OTHER; note = 2'-O-methyladenosine-3'-phosphate ((2S,4R)-1-[29-[[2-(acetylamino)-2-deoxy-beta-D-galactopyra nosyl]oxy]-14,14-bis[[3-[[3-[[5-[[2-(acetylamino)-2-deoxy-b eta-D-galactopyranosyl]oxy]-1-oxopentyl]amino]propyl]amino] -3-oxopropoxy]methyl]-1,12,19,25-tetraoxo-16-oxa-13,20,24-t riazanonacos-1-yl]-4-hydroxy-2-pyrrolidinyl)methyl ester
  misc_feature 1..10: note = RNA
  misc_feature 12..16: note = RNA
  misc_feature 18..21: note = RNA
  misc_feature 11: note = DNA
  misc_feature 17: note = DNA
gactttcatcctggaaatata

SEQ ID NO: 224 - DNA, 21 bp, synthetic construct
  source 1..21: mol_type = other DNA
  modified_base 1: mod_base = OTHER; note = 2'-O-methylguanosine-3'-phosphorothioate
  modified_base 2: mod_base = OTHER; note = 2'-O-methyladenosine-3'-phosphorothioate
  modified_base 3: mod_base = OTHER; note = 2'-O-methylcytidine-3'-phosphate
  modified_base 4: mod_base = OTHER; note = 2'-O-methyluridine-3'-phosphate
  modified_base 5: mod_base = OTHER; note = 2'-O-methyluridine-3'-phosphate
  modified_base 6: mod_base = OTHER; note = 2'-O-methyluridine-3'-phosphate
  modified_base 7: mod_base = OTHER; note = 2'-O-methylcytidine-3'-phosphate
  modified_base 8: mod_base = OTHER; note = 2'-O-methyladenosine-3'-phosphate
  modified_base 9: mod_base = OTHER; note = 2'-O-methyluridine-3'-phosphate
  modified_base 10: mod_base = OTHER; note = 2'-O-methylcytidine-3'-phosphate
  modified_base 12: mod_base = OTHER; note = 2'-O-methyluridine-3'-phosphate
  modified_base 13: mod_base = OTHER; note = 2'-O-methylguanosine-3'-phosphate
  modified_base 14: mod_base = OTHER; note = 2'-O-methylguanosine-3'-phosphate
  modified_base 15: mod_base = OTHER; note = 2'-O-methyladenosine-3'-phosphate
  modified_base 16: mod_base = OTHER; note = 2'-O-methyladenosine-3'-phosphate
  modified_base 18: mod_base = OTHER; note = 2'-O-methyluridine-3'-phosphate
  modified_base 19: mod_base = OTHER; note = 2'-O-methyladenosine-3'-phosphate
  modified_base 20: mod_base = OTHER; note = 2'-O-methyluridine-3'-phosphate
  modified_base 21: mod_base = OTHER; note = 2'-O-methyladenosine-3'-phosphate ((2S,4R)-1-[29-[[2-(acetylamino)-2-deoxy-beta-D-galactopyra nosyl]oxy]-14,14-bis[[3-[[3-[[5-[[2-(acetylamino)-2-deoxy-b eta-D-galactopyranosyl]oxy]-1-oxopentyl]amino]propyl]amino] -3-oxopropoxy]methyl]-1,12,19,25-tetraoxo-16-oxa-13,20,24-t riazanonacos-1-yl]-4-hydroxy-2-pyrrolidinyl)methyl ester
  misc_feature 1..10: note = RNA
  misc_feature 12..16: note = RNA
  misc_feature 18..21: note = RNA
  misc_feature 11: note = DNA
  misc_feature 17: note = DNA
gactttcatcctggaattata

SEQ ID NO: 225 - DNA, 21 bp, synthetic construct
  source 1..21: mol_type = other DNA
  modified_base 1: mod_base = OTHER; note = 2'-O-methylguanosine-3'-phosphorothioate
  modified_base 2: mod_base = OTHER; note = 2'-O-methyladenosine-3'-phosphorothioate
  modified_base 3: mod_base = OTHER; note = 2'-O-methylcytidine-3'-phosphate
  modified_base 4: mod_base = OTHER; note = 2'-O-methyluridine-3'-phosphate
  modified_base 5: mod_base = OTHER; note = 2'-O-methyluridine-3'-phosphate
  modified_base 6: mod_base = OTHER; note = 2'-O-methyluridine-3'-phosphate
  modified_base 7: mod_base = OTHER; note = 2'-O-methylcytidine-3'-phosphate
  modified_base 8: mod_base = OTHER; note = 2'-O-methyladenosine-3'-phosphate
  modified_base 9: mod_base = OTHER; note = 2'-O-methyluridine-3'-phosphate
  modified_base 10: mod_base = OTHER; note = 2'-O-methylcytidine-3'-phosphate
  modified_base 12: mod_base = OTHER; note = 2'-O-methyluridine-3'-phosphate
  modified_base 13: mod_base = OTHER; note = 2'-O-methylguanosine-3'-phosphate
  modified_base 14: mod_base = OTHER; note = 2'-O-methylguanosine-3'-phosphate
  modified_base 15: mod_base = OTHER; note = 2'-O-methyladenosine-3'-phosphate
  modified_base 16: mod_base = OTHER; note = 2'-O-methyladenosine-3'-phosphate
  modified_base 17: mod_base = OTHER; note = 2-hydroxymethyl-4-methoxy-tetrahydrofuran-3-phosphate
  modified_base 18: mod_base = OTHER; note = 2'-O-methyluridine-3'-phosphate
  modified_base 19: mod_base = OTHER; note = 2'-O-methyladenosine-3'-phosphate
  modified_base 20: mod_base = OTHER; note = 2'-O-methyluridine-3'-phosphate
  modified_base 21: mod_base = OTHER; note = 2'-O-methyladenosine-3'-phosphate ((2S,4R)-1-[29-[[2-(acetylamino)-2-deoxy-beta-D-galactopyra nosyl]oxy]-14,14-bis[[3-[[3-[[5-[[2-(acetylamino)-2-deoxy-b eta-D-galactopyranosyl]oxy]-1-oxopentyl]amino]propyl]amino] -3-oxopropoxy]methyl]-1,12,19,25-tetraoxo-16-oxa-13,20,24-t riazanonacos-1-yl]-4-hydroxy-2-pyrrolidinyl)methyl ester
  misc_feature 1..10: note = RNA
  misc_feature 12..21: note = RNA
  misc_feature 11: note = DNA
gactttcatcctggaantata

SEQ ID NO: 226 - DNA, 21 bp, synthetic construct
  source 1..21: mol_type = other DNA
  modified_base 1: mod_base = OTHER; note = 2'-O-methylguanosine-3'-phosphorothioate
  modified_base 2: mod_base = OTHER; note = 2'-O-methyladenosine-3'-phosphorothioate
  modified_base 3: mod_base = OTHER; note = 2'-O-methylcytidine-3'-phosphate
  modified_base 4: mod_base = OTHER; note = 2'-O-methyluridine-3'-phosphate
  modified_base 5: mod_base = OTHER; note = 2'-O-methyluridine-3'-phosphate
  modified_base 6: mod_base = OTHER; note = 2'-O-methyluridine-3'-phosphate
  modified_base 7: mod_base = OTHER; note = 2'-O-methylcytidine-3'-phosphate
  modified_base 8: mod_base = OTHER; note = 2'-O-methyladenosine-3'-phosphate
  modified_base 9: mod_base = OTHER; note = 2'-O-methyluridine-3'-phosphate
  modified_base 10: mod_base = OTHER; note = 2'-O-methylcytidine-3'-phosphate
  modified_base 12: mod_base = OTHER; note = 2'-O-methyluridine-3'-phosphate
  modified_base 13: mod_base = OTHER; note = 2'-O-methylguanosine-3'-phosphate
  modified_base 14: mod_base = OTHER; note = 2'-O-methylguanosine-3'-phosphate
  modified_base 16: mod_base = OTHER; note = 2'-O-methyladenosine-3'-phosphate
  modified_base 18: mod_base = OTHER; note = 2'-O-methyluridine-3'-phosphate
  modified_base 19: mod_base = OTHER; note = 2'-O-methyladenosine-3'-phosphate
  modified_base 20: mod_base = OTHER; note = 2'-O-methyluridine-3'-phosphate
  modified_base 21: mod_base = OTHER; note = 2'-O-methyladenosine-3'-phosphate ((2S,4R)-1-[29-[[2-(acetylamino)-2-deoxy-beta-D-galactopyra nosyl]oxy]-14,14-bis[[3-[[3-[[5-[[2-(acetylamino)-2-deoxy-b eta-D-galactopyranosyl]oxy]-1-oxopentyl]amino]propyl]amino] -3-oxopropoxy]methyl]-1,12,19,25-tetraoxo-16-oxa-13,20,24-t riazanonacos-1-yl]-4-hydroxy-2-pyrrolidinyl)methyl ester
  misc_feature 1..10: note = RNA
  misc_feature 12..14: note = RNA
  misc_feature 16: note = RNA
  misc_feature 18..21: note = RNA
  misc_feature 11: note = DNA
  misc_feature 15: note = DNA
  misc_feature 17: note = DNA
gactttcatcctggaattata

SEQ ID NO: 227 - DNA, 21 bp, synthetic construct
  source 1..21: mol_type = other DNA
  modified_base 1: mod_base = OTHER; note = 2'-O-methylguanosine-3'-phosphorothioate
  modified_base 2: mod_base = OTHER; note = 2'-O-methyladenosine-3'-phosphorothioate
  modified_base 3: mod_base = OTHER; note = 2'-O-methylcytidine-3'-phosphate
  modified_base 4: mod_base = OTHER; note = 2'-O-methyluridine-3'-phosphate
  modified_base 5: mod_base = OTHER; note = 2'-O-methyluridine-3'-phosphate
  modified_base 6: mod_base = OTHER; note = 2'-O-methyluridine-3'-phosphate
  modified_base 7: mod_base = OTHER; note = 2'-O-methylcytidine-3'-phosphate
  modified_base 8: mod_base = OTHER; note = 2'-O-methyladenosine-3'-phosphate
  modified_base 9: mod_base = OTHER; note = 2'-O-methyluridine-3'-phosphate
  modified_base 10: mod_base = OTHER; note = 2'-O-methylcytidine-3'-phosphate
  modified_base 12: mod_base = OTHER; note = 2'-O-methyluridine-3'-phosphate
  modified_base 13: mod_base = OTHER; note = 2'-O-methylguanosine-3'-phosphate
  modified_base 14: mod_base = OTHER; note = 2'-O-methylguanosine-3'-phosphate
  modified_base 15: mod_base = OTHER; note = 2'-O-methyladenosine-3'-phosphate
  modified_base 16: mod_base = OTHER; note = 2'-O-methyladenosine-3'-phosphate
  modified_base 18: mod_base = OTHER; note = 2'-O-methyluridine-3'-phosphate
  modified_base 20: mod_base = OTHER; note = 2'-O-methyluridine-3'-phosphate
  modified_base 21: mod_base = OTHER; note = 2'-O-methyladenosine-3'-phosphate ((2S,4R)-1-[29-[[2-(acetylamino)-2-deoxy-beta-D-galactopyra nosyl]oxy]-14,14-bis[[3-[[3-[[5-[[2-(acetylamino)-2-deoxy-b eta-D-galactopyranosyl]oxy]-1-oxopentyl]amino]propyl]amino] -3-oxopropoxy]methyl]-1,12,19,25-tetraoxo-16-oxa-13,20,24-t riazanonacos-1-yl]-4-hydroxy-2-pyrrolidinyl)methyl ester
  misc_feature 1..10: note = RNA
  misc_feature 12..16: note = RNA
  misc_feature 18: note = RNA
  misc_feature 20..21: note = RNA
  misc_feature 11: note = DNA
  misc_feature 17: note = DNA
  misc_feature 19: note = DNA
gactttcatcctggaattata

SEQ ID NO: 228 - DNA, 21 bp, synthetic construct
  source 1..21: mol_type = other DNA
  modified_base 1: mod_base = OTHER; note = 2'-O-methylguanosine-3'-phosphorothioate
  modified_base 2: mod_base = OTHER; note = 2'-O-methyladenosine-3'-phosphorothioate
  modified_base 3: mod_base = OTHER; note = 2'-O-methylcytidine-3'-phosphate
  modified_base 4: mod_base = OTHER; note = 2'-O-methyluridine-3'-phosphate
  modified_base 5: mod_base = OTHER; note = 2'-O-methyluridine-3'-phosphate
  modified_base 6: mod_base = OTHER; note = 2'-O-methyluridine-3'-phosphate
  modified_base 7: mod_base = OTHER; note = 2'-O-methylcytidine-3'-phosphate
  modified_base 8: mod_base = OTHER; note = 2'-O-methyladenosine-3'-phosphate
  modified_base 9: mod_base = OTHER; note = 2'-O-methyluridine-3'-phosphate
  modified_base 10: mod_base = OTHER; note = 2'-O-methylcytidine-3'-phosphate
  modified_base 12: mod_base = OTHER; note = 2'-O-methyluridine-3'-phosphate
  modified_base 13: mod_base = OTHER; note = 2'-O-methylguanosine-3'-phosphate
  modified_base 14: mod_base = OTHER; note = 2'-O-methylguanosine-3'-phosphate
  modified_base 15: mod_base = OTHER; note = 2'-O-methyladenosine-3'-phosphate
  modified_base 16: mod_base = OTHER; note = 2'-O-methyladenosine-3'-phosphate
  modified_base 17: mod_base = OTHER; note = Adenosine-glycol nucleic acid (GNA), S-isomer
  modified_base 18: mod_base = OTHER; note = 2'-O-methyluridine-3'-phosphate
  modified_base 20: mod_base = OTHER; note = 2'-O-methyluridine-3'-phosphate
  modified_base 21: mod_base = OTHER; note = 2'-O-methyladenosine-3'-phosphate ((2S,4R)-1-[29-[[2-(acetylamino)-2-deoxy-beta-D-galactopyra nosyl]oxy]-14,14-bis[[3-[[3-[[5-[[2-(acetylamino)-2-deoxy-b eta-D-galactopyranosyl]oxy]-1-oxopentyl]amino]propyl]amino] -3-oxopropoxy]methyl]-1,12,19,25-tetraoxo-16-oxa-13,20,24-t riazanonacos-1-yl]-4-hydroxy-2-pyrrolidinyl)methyl ester
  misc_feature 1..10: note = RNA
  misc_feature 12..18: note = RNA
  misc_feature 20..21: note = RNA
  misc_feature 11: note = DNA
  misc_feature 19: note = DNA
gactttcatcctggaaatata

SEQ ID NO: 229 - DNA, 21 bp, synthetic construct
  source 1..21: mol_type = other DNA
  modified_base 1: mod_base = OTHER; note = 2'-O-methylguanosine-3'-phosphorothioate
  modified_base 2: mod_base = OTHER; note = 2'-O-methyladenosine-3'-phosphorothioate
  modified_base 3: mod_base = OTHER; note = 2'-O-methylcytidine-3'-phosphate
  modified_base 4: mod_base = OTHER; note = 2'-O-methyluridine-3'-phosphate
  modified_base 5: mod_base = OTHER; note = 2'-O-methyluridine-3'-phosphate
  modified_base 7: mod_base = OTHER; note = 2'-O-methylcytidine-3'-phosphate
  modified_base 8: mod_base = OTHER; note = 2'-O-methyladenosine-3'-phosphate
  modified_base 9: mod_base = OTHER; note = 2'-O-methyluridine-3'-phosphate
  modified_base 10: mod_base = OTHER; note = 2'-O-methylcytidine-3'-phosphate
  modified_base 12: mod_base = OTHER; note = 2'-O-methyluridine-3'-phosphate
  modified_base 13: mod_base = OTHER; note = 2'-O-methylguanosine-3'-phosphate
  modified_base 14: mod_base = OTHER; note = 2'-O-methylguanosine-3'-phosphate
  modified_base 15: mod_base = OTHER; note = 2'-O-methyladenosine-3'-phosphate
  modified_base 16: mod_base = OTHER; note = 2'-O-methyladenosine-3'-phosphate
  modified_base 18: mod_base = OTHER; note = 2'-O-methyluridine-3'-phosphate
  modified_base 20: mod_base = OTHER; note = 2'-O-methyluridine-3'-phosphate
  modified_base 21: mod_base = OTHER; note = 2'-O-methyladenosine-3'-phosphate ((2S,4R)-1-[29-[[2-(acetylamino)-2-deoxy-beta-D-galactopyra nosyl]oxy]-14,14-bis[[3-[[3-[[5-[[2-(acetylamino)-2-deoxy-b eta-D-galactopyranosyl]oxy]-1-oxopentyl]amino]propyl]amino] -3-oxopropoxy]methyl]-1,12,19,25-tetraoxo-16-oxa-13,20,24-t riazanonacos-1-yl]-4-hydroxy-2-pyrrolidinyl)methyl ester
  misc_feature 1..5: note = RNA
  misc_feature 7..10: note = RNA
  misc_feature 12..16: note = RNA
  misc_feature 18: note = RNA
  misc_feature 20..21: note = RNA
  misc_feature 6: note = DNA
  misc_feature 11: note = DNA
  misc_feature 17: note = DNA
  misc_feature 19: note = DNA
gactttcatcctggaaatata

SEQ ID NO: 230 - RNA, 21 nt, synthetic construct
  source 1..21: mol_type = other RNA
  modified_base 1: mod_base = OTHER; note = 2'-deoxy-2'-fluoroguanosine-3'-phosphorothioate
  modified_base 2: mod_base = OTHER; note = 2'-O-methyladenosine-3'-phosphorothioate
  modified_base 3: mod_base = OTHER; note = 2'-deoxy-2'-fluorocytidine-3'-phosphate
  modified_base 4: mod_base = OTHER; note = 2'-O-methyluridine-3'-phosphate
  modified_base 5: mod_base = OTHER; note = 2'-deoxy-2'-fluorouridine-3'-phosphate
  modified_base 6: mod_base = OTHER; note = 2'-O-methyluridine-3'-phosphate
  modified_base 7: mod_base = OTHER; note = 2'-deoxy-2'-fluorocytidine-3'-phosphate
  modified_base 8: mod_base = OTHER; note = 2'-O-methyladenosine-3'-phosphate
  modified_base 9: mod_base = OTHER; note = 2'-deoxy-2'-fluorouridine-3'-phosphate
  modified_base 10: mod_base = OTHER; note = 2'-deoxy-2'-fluorocytidine-3'-phosphate
  modified_base 11: mod_base = OTHER; note = 2'-deoxy-2'-fluorocytidine-3'-phosphate
  modified_base 12: mod_base = OTHER; note = 2'-O-methyluridine-3'-phosphate
  modified_base 13: mod_base = OTHER; note = 2'-deoxy-2'-fluoroguanosine-3'-phosphate
  modified_base 14: mod_base = OTHER; note = 2'-O-methylguanosine-3'-phosphate
  modified_base 15: mod_base = OTHER; note = 2'-deoxy-2'-fluoroadenosine-3'-phosphate
  modified_base 16: mod_base = OTHER; note = 2'-O-methyladenosine-3'-phosphate
  modified_base 17: mod_base = OTHER; note = 2'-deoxy-2'-fluoroadenosine-3'-phosphate
  modified_base 18: mod_base = OTHER; note = 2'-O-methyluridine-3'-phosphate
  modified_base 19: mod_base = OTHER; note = 2'-deoxy-2'-fluoroadenosine-3'-phosphate
  modified_base 20: mod_base = OTHER; note = 2'-O-methyluridine-3'-phosphate
  modified_base 21: mod_base = OTHER; note = 2'-deoxy-2'-fluoroadenosine-3'-phosphate ((2S,4R)-1-[29-[[2-(acetylamino)-2-deoxy-beta-D-galactopyra nosyl]oxy]-14,14-bis[[3-[[3-[[5-[[2-(acetylamino)-2-deoxy-b eta-D-galactopyranosyl]oxy]-1-oxopentyl]amino]propyl]amino] -3-oxopropoxy]methyl]-1,12,19,25-tetraoxo-16-oxa-13,20,24-t riazanonacos-1-yl]-4-hydroxy-2-pyrrolidinyl)methyl ester
gactttcatcctggaaatata

SEQ ID NO: 231 - RNA, 21 nt, synthetic construct
  source 1..21: mol_type = other RNA
  modified_base 1: mod_base = OTHER; note = 2'-deoxy-2'-fluoroguanosine-3'-phosphorothioate
  modified_base 2: mod_base = OTHER; note = 2'-O-methyladenosine-3'-phosphorothioate
  modified_base 3: mod_base = OTHER; note = 2'-deoxy-2'-fluorocytidine-3'-phosphate
  modified_base 4: mod_base = OTHER; note = 2'-O-methyluridine-3'-phosphate
  modified_base 5: mod_base = OTHER; note = 2'-deoxy-2'-fluorouridine-3'-phosphate
  modified_base 6: mod_base = OTHER; note = 2'-O-methyluridine-3'-phosphate
  modified_base 7: mod_base = OTHER; note = 2'-deoxy-2'-fluorocytidine-3'-phosphate
  modified_base 8: mod_base = OTHER; note = 2'-O-methyladenosine-3'-phosphate
  modified_base 9: mod_base = OTHER; note = 2'-deoxy-2'-fluorouridine-3'-phosphate
  modified_base 10: mod_base = OTHER; note = 2'-deoxy-2'-fluorocytidine-3'-phosphate
  modified_base 11: mod_base = OTHER; note = 2'-deoxy-2'-fluorocytidine-3'-phosphate
  modified_base 12: mod_base = OTHER; note = 2'-O-methyluridine-3'-phosphate
  modified_base 13: mod_base = OTHER; note = 2'-deoxy-2'-fluoroguanosine-3'-phosphate
  modified_base 14: mod_base = OTHER; note = 2'-O-methylguanosine-3'-phosphate
  modified_base 15: mod_base = OTHER; note = 2'-deoxy-2'-fluoroadenosine-3'-phosphate
  modified_base 16: mod_base = OTHER; note = 2'-O-methyladenosine-3'-phosphate
  modified_base 17: mod_base = OTHER; note = 2'-deoxy-2'-fluoroadenosine-3'-phosphate
  modified_base 18: mod_base = OTHER; note = 2'-O-methyluridine-3'-phosphate
  modified_base 19: mod_base = OTHER; note = 2'-deoxy-2'-fluoroadenosine-3'-phosphate
  modified_base 20: mod_base = OTHER; note = 2'-O-methyluridine-3'-phosphate
  modified_base 21: mod_base = OTHER; note = 2'-deoxy-2'-fluoroadenosine-3'-phosphate ((2S,4R)-1-[29-[[2-(acetylamino)-2-deoxy-beta-D-galactopyra nosyl]oxy]-14,14-bis[[3-[[3-[[5-[[2-(acetylamino)-2-deoxy-b eta-D-galactopyranosyl]oxy]-1-oxopentyl]amino]propyl]amino] -3-oxopropoxy]methyl]-1,12,19,25-tetraoxo-16-oxa-13,20,24-t riazanonacos-1-yl]-4-hydroxy-2-pyrrolidinyl)methyl ester
gactttcatcctggaaatata

SEQ ID NO: 232 - RNA, 21 nt, synthetic construct
  source 1..21: mol_type = other RNA
  modified_base 1: mod_base = OTHER; note = 2'-deoxy-2'-fluoroguanosine-3'-phosphorothioate
  modified_base 2: mod_base = OTHER; note = 2'-O-methyladenosine-3'-phosphorothioate
  modified_base 3: mod_base = OTHER; note = 2'-deoxy-2'-fluorocytidine-3'-phosphate
  modified_base 4: mod_base = OTHER; note = 2'-O-methyluridine-3'-phosphate
  modified_base 5: mod_base = OTHER; note = 2'-deoxy-2'-fluorouridine-3'-phosphate
  modified_base 6: mod_base = OTHER; note = 2'-O-methyluridine-3'-phosphate
  modified_base 7: mod_base = OTHER; note = 2'-deoxy-2'-fluorocytidine-3'-phosphate
  modified_base 8: mod_base = OTHER; note = 2'-O-methyladenosine-3'-phosphate
  modified_base 9: mod_base = OTHER; note = 2'-deoxy-2'-fluorouridine-3'-phosphate
  modified_base 10: mod_base = OTHER; note = 2'-deoxy-2'-fluorocytidine-3'-phosphate
  modified_base 11: mod_base = OTHER; note = 2'-deoxy-2'-fluorocytidine-3'-phosphate
  modified_base 12: mod_base = OTHER; note = 2'-O-methyluridine-3'-phosphate
  modified_base 13: mod_base = OTHER; note = 2'-deoxy-2'-fluoroguanosine-3'-phosphate
  modified_base 14: mod_base = OTHER; note = 2'-O-methylguanosine-3'-phosphate
  modified_base 15: mod_base = OTHER; note = 2'-deoxy-2'-fluoroadenosine-3'-phosphate
  modified_base 16: mod_base = OTHER; note = 2'-O-methyladenosine-3'-phosphate
  modified_base 17: mod_base = OTHER; note = 2'-deoxy-2'-fluoroadenosine-3'-phosphate
  modified_base 18: mod_base = OTHER; note = 2'-O-methyluridine-3'-phosphate
  modified_base 19: mod_base = OTHER; note = 2'-deoxy-2'-fluoroadenosine-3'-phosphate
  modified_base 20: mod_base = OTHER; note = 2'-O-methyluridine-3'-phosphate
  modified_base 21: mod_base = OTHER; note = 2'-deoxy-2'-fluoroadenosine-3'-phosphate ((2S,4R)-1-[29-[[2-(acetylamino)-2-deoxy-beta-D-galactopyra nosyl]oxy]-14,14-bis[[3-[[3-[[5-[[2-(acetylamino)-2-deoxy-b eta-D-galactopyranosyl]oxy]-1-oxopentyl]amino]propyl]amino] -3-oxopropoxy]methyl]-1,12,19,25-tetraoxo-16-oxa-13,20,24-t riazanonacos-1-yl]-4-hydroxy-2-pyrrolidinyl)methyl ester
gactttcatcctggaaatata

SEQ ID NO: 233 - RNA, 21 nt, synthetic construct
  source 1..21: mol_type = other RNA
  modified_base 1: mod_base = OTHER; note = 2'-deoxy-2'-fluoroguanosine-3'-phosphorothioate
  modified_base 2: mod_base = OTHER; note = 2'-O-methyladenosine-3'-phosphorothioate
  modified_base 3: mod_base = OTHER; note = 2'-deoxy-2'-fluorocytidine-3'-phosphate
  modified_base 4: mod_base = OTHER; note = 2'-O-methyluridine-3'-phosphate
  modified_base 5: mod_base = OTHER; note = 2'-deoxy-2'-fluorouridine-3'-phosphate
  modified_base 6: mod_base = OTHER; note = 2'-O-methyluridine-3'-phosphate
  modified_base 7: mod_base = OTHER; note = 2'-deoxy-2'-fluorocytidine-3'-phosphate
  modified_base 8: mod_base = OTHER; note = 2'-O-methyladenosine-3'-phosphate
  modified_base 9: mod_base = OTHER; note = 2'-deoxy-2'-fluorouridine-3'-phosphate
  modified_base 10: mod_base = OTHER; note = 2'-deoxy-2'-fluorocytidine-3'-phosphate
  modified_base 11: mod_base = OTHER; note = 2'-deoxy-2'-fluorocytidine-3'-phosphate
  modified_base 12: mod_base = OTHER; note = 2'-O-methyluridine-3'-phosphate
  modified_base 13: mod_base = OTHER; note = 2'-deoxy-2'-fluoroguanosine-3'-phosphate
  modified_base 14: mod_base = OTHER; note = 2'-O-methylguanosine-3'-phosphate
  modified_base 15: mod_base = OTHER; note = 2'-deoxy-2'-fluoroadenosine-3'-phosphate
  modified_base 16: mod_base = OTHER; note = 2'-O-methyladenosine-3'-phosphate
  modified_base 17: mod_base = OTHER; note = 2'-deoxy-2'-fluoroadenosine-3'-phosphate
  modified_base 18: mod_base = OTHER; note = 2'-O-methyluridine-3'-phosphate
  modified_base 19: mod_base = OTHER; note = 2'-deoxy-2'-fluoroadenosine-3'-phosphate
  modified_base 20: mod_base = OTHER; note = 2'-O-methyluridine-3'-phosphate
  modified_base 21: mod_base = OTHER; note = 2'-deoxy-2'-fluoroadenosine-3'-phosphate ((2S,4R)-1-[29-[[2-(acetylamino)-2-deoxy-beta-D-galactopyra nosyl]oxy]-14,14-bis[[3-[[3-[[5-[[2-(acetylamino)-2-deoxy-b eta-D-galactopyranosyl]oxy]-1-oxopentyl]amino]propyl]amino] -3-oxopropoxy]methyl]-1,12,19,25-tetraoxo-16-oxa-13,20,24-t riazanonacos-1-yl]-4-hydroxy-2-pyrrolidinyl)methyl ester
gactttcatcctggaaatata

SEQ ID NO: 234 - RNA, 21 nt, synthetic construct
  source 1..21: mol_type = other RNA
  modified_base 1: mod_base = OTHER; note = 2'-deoxy-2'-fluoroguanosine-3'-phosphorothioate
  modified_base 2: mod_base = OTHER; note = 2'-O-methyladenosine-3'-phosphorothioate
  modified_base 3: mod_base = OTHER; note = 2'-deoxy-2'-fluorocytidine-3'-phosphate
  modified_base 4: mod_base = OTHER; note = 2'-O-methyluridine-3'-phosphate
  modified_base 5: mod_base = OTHER; note = 2'-deoxy-2'-fluorouridine-3'-phosphate
  modified_base 6: mod_base = OTHER; note = 2'-O-methyluridine-3'-phosphate
  modified_base 7: mod_base = OTHER; note = 2'-deoxy-2'-fluorocytidine-3'-phosphate
  modified_base 8: mod_base = OTHER; note = 2'-O-methyladenosine-3'-phosphate
  modified_base 9: mod_base = OTHER; note = 2'-deoxy-2'-fluorouridine-3'-phosphate
  modified_base 10: mod_base = OTHER; note = 2'-deoxy-2'-fluorocytidine-3'-phosphate
  modified_base 11: mod_base = OTHER; note = 2'-deoxy-2'-fluorocytidine-3'-phosphate
  modified_base 12: mod_base = OTHER; note = 2'-O-methyluridine-3'-phosphate
  modified_base 13: mod_base = OTHER; note = 2'-deoxy-2'-fluoroguanosine-3'-phosphate
  modified_base 14: mod_base = OTHER; note = 2'-O-methylguanosine-3'-phosphate
  modified_base 15: mod_base = OTHER; note = 2'-deoxy-2'-fluoroadenosine-3'-phosphate
  modified_base 16: mod_base = OTHER; note = 2'-O-methyladenosine-3'-phosphate
  modified_base 17: mod_base = OTHER; note = 2'-deoxy-2'-fluoroadenosine-3'-phosphate
  modified_base 18: mod_base = OTHER; note = 2'-O-methyluridine-3'-phosphate
  modified_base 19: mod_base = OTHER; note = 2'-deoxy-2'-fluoroadenosine-3'-phosphate
  modified_base 20: mod_base = OTHER; note = 2'-O-methyluridine-3'-phosphate
  modified_base 21: mod_base = OTHER; note = 2'-deoxy-2'-fluoroadenosine-3'-phosphate ((2S,4R)-1-[29-[[2-(acetylamino)-2-deoxy-beta-D-galactopyra nosyl]oxy]-14,14-bis[[3-[[3-[[5-[[2-(acetylamino)-2-deoxy-b eta-D-galactopyranosyl]oxy]-1-oxopentyl]amino]propyl]amino] -3-oxopropoxy]methyl]-1,12,19,25-tetraoxo-16-oxa-13,20,24-t riazanonacos-1-yl]-4-hydroxy-2-pyrrolidinyl)methyl ester
gactttcatcctggaaatata

SEQ ID NO: 235 - RNA, 21 nt, synthetic construct
  source 1..21: mol_type = other RNA
  modified_base 1: mod_base = OTHER; note = 2'-deoxy-2'-fluoroguanosine-3'-phosphorothioate
  modified_base 2: mod_base = OTHER; note = 2'-O-methyladenosine-3'-phosphorothioate
  modified_base 3: mod_base = OTHER; note = 2'-deoxy-2'-fluorocytidine-3'-phosphate
  modified_base 4: mod_base = OTHER; note = 2'-O-methyluridine-3'-phosphate
  modified_base 5: mod_base = OTHER; note = 2'-deoxy-2'-fluorouridine-3'-phosphate
  modified_base 6: mod_base = OTHER; note = 2'-O-methyluridine-3'-phosphate
  modified_base 7: mod_base = OTHER; note = 2'-deoxy-2'-fluorocytidine-3'-phosphate
  modified_base 8: mod_base = OTHER; note = 2'-O-methyladenosine-3'-phosphate
  modified_base 9: mod_base = OTHER; note = 2'-deoxy-2'-fluorouridine-3'-phosphate
  modified_base 10: mod_base = OTHER; note = 2'-deoxy-2'-fluorocytidine-3'-phosphate
  modified_base 11: mod_base = OTHER; note = 2'-deoxy-2'-fluorocytidine-3'-phosphate
  modified_base 12: mod_base = OTHER; note = 2'-O-methyluridine-3'-phosphate
  modified_base 13: mod_base = OTHER; note = 2'-deoxy-2'-fluoroguanosine-3'-phosphate
  modified_base 14: mod_base = OTHER; note = 2'-O-methylguanosine-3'-phosphate
  modified_base 15: mod_base = OTHER; note = 2'-deoxy-2'-fluoroadenosine-3'-phosphate
  modified_base 16: mod_base = OTHER; note = 2'-O-methyladenosine-3'-phosphate
  modified_base 17: mod_base = OTHER; note = 2'-deoxy-2'-fluoroadenosine-3'-phosphate
  modified_base 18: mod_base = OTHER; note = 2'-O-methyluridine-3'-phosphate
  modified_base 19: mod_base = OTHER; note = 2'-deoxy-2'-fluoroadenosine-3'-phosphate
  modified_base 20: mod_base = OTHER; note = 2'-O-methyluridine-3'-phosphate
  modified_base 21: mod_base = OTHER; note = 2'-deoxy-2'-fluoroadenosine-3'-phosphate ((2S,4R)-1-[29-[[2-(acetylamino)-2-deoxy-beta-D-galactopyra nosyl]oxy]-14,14-bis[[3-[[3-[[5-[[2-(acetylamino)-2-deoxy-b eta-D-galactopyranosyl]oxy]-1-oxopentyl]amino]propyl]amino] -3-oxopropoxy]methyl]-1,12,19,25-tetraoxo-16-oxa-13,20,24-t riazanonacos-1-yl]-4-hydroxy-2-pyrrolidinyl)methyl ester
gactttcatcctggaaatata

SEQ ID NO: 236 - RNA, 21 nt, synthetic construct
  source 1..21: mol_type = other RNA
  modified_base 1: mod_base = OTHER; note = 2'-deoxy-2'-fluoroguanosine-3'-phosphorothioate
  modified_base 2: mod_base = OTHER; note = 2'-O-methyladenosine-3'-phosphorothioate
  modified_base 3: mod_base = OTHER; note = 2'-deoxy-2'-fluorocytidine-3'-phosphate
  modified_base 4: mod_base = OTHER; note = 2'-O-methyluridine-3'-phosphate
  modified_base 5: mod_base = OTHER; note = 2'-deoxy-2'-fluorouridine-3'-phosphate
  modified_base 6: mod_base = OTHER; note = 2'-O-methyluridine-3'-phosphate
  modified_base 7: mod_base = OTHER; note = 2'-deoxy-2'-fluorocytidine-3'-phosphate
  modified_base 8: mod_base = OTHER; note = 2'-O-methyladenosine-3'-phosphate
  modified_base 9: mod_base = OTHER; note = 2'-deoxy-2'-fluorouridine-3'-phosphate
  modified_base 10: mod_base = OTHER; note = 2'-deoxy-2'-fluorocytidine-3'-phosphate
  modified_base 11: mod_base = OTHER; note = 2'-deoxy-2'-fluorocytidine-3'-phosphate
  modified_base 12: mod_base = OTHER; note = 2'-O-methyluridine-3'-phosphate
  modified_base 13: mod_base = OTHER; note = 2'-deoxy-2'-fluoroguanosine-3'-phosphate
  modified_base 14: mod_base = OTHER; note = 2'-O-methylguanosine-3'-phosphate
  modified_base 15: mod_base = OTHER; note = 2'-deoxy-2'-fluoroadenosine-3'-phosphate
  modified_base 16: mod_base = OTHER; note = 2'-O-methyladenosine-3'-phosphate
  modified_base 17: mod_base = OTHER; note = 2'-deoxy-2'-fluoroadenosine-3'-phosphate
  modified_base 18: mod_base = OTHER; note = 2'-O-methyluridine-3'-phosphate
  modified_base 19: mod_base = OTHER; note = 2'-deoxy-2'-fluoroadenosine-3'-phosphate
  modified_base 20: mod_base = OTHER; note = 2'-O-methyluridine-3'-phosphate
  modified_base 21: mod_base = OTHER; note = 2'-deoxy-2'-fluoroadenosine-3'-phosphate ((2S,4R)-1-[29-[[2-(acetylamino)-2-deoxy-beta-D-galactopyra nosyl]oxy]-14,14-bis[[3-[[3-[[5-[[2-(acetylamino)-2-deoxy-b eta-D-galactopyranosyl]oxy]-1-oxopentyl]amino]propyl]amino] -3-oxopropoxy]methyl]-1,12,19,25-tetraoxo-16-oxa-13,20,24-t riazanonacos-1-yl]-4-hydroxy-2-pyrrolidinyl)methyl ester
gactttcatcctggaaatata

SEQ ID NO: 237 - DNA, 21 bp, synthetic construct
  source 1..21: mol_type = other DNA
  modified_base 1: mod_base = OTHER; note = 2'-O-methylguanosine-3'-phosphorothioate
  modified_base 2: mod_base = OTHER; note = 2'-O-methyladenosine-3'-phosphorothioate
  modified_base 3: mod_base = OTHER; note = 2'-O-methylcytidine-3'-phosphate
  modified_base 4: mod_base = OTHER; note = 2'-O-methyluridine-3'-phosphate
  modified_base 5: mod_base = OTHER; note = 2'-O-methyluridine-3'-phosphate
  modified_base 6: mod_base = OTHER; note = 2'-O-methyluridine-3'-phosphate
  modified_base 7: mod_base = OTHER; note = 2'-O-methylcytidine-3'-phosphate
  modified_base 8: mod_base = OTHER; note = 2'-O-methyladenosine-3'-phosphate
  modified_base 9: mod_base = OTHER; note = 2'-O-methyluridine-3'-phosphate
  modified_base 10: mod_base = OTHER; note = 2'-O-methylcytidine-3'-phosphate
  modified_base 12: mod_base = OTHER; note = 2'-O-methyluridine-3'-phosphate
  modified_base 13: mod_base = OTHER; note = 2'-O-methylguanosine-3'-phosphate
  modified_base 14: mod_base = OTHER; note = 2'-O-methylguanosine-3'-phosphate
  modified_base 15: mod_base = OTHER; note = 2'-O-methyladenosine-3'-phosphate
  modified_base 16: mod_base = OTHER; note = 2'-O-methyladenosine-3'-phosphate
  modified_base 17: mod_base = OTHER; note = Adenosine-glycol nucleic acid (GNA), S-isomer
  modified_base 18: mod_base = OTHER; note = 2'-O-methyluridine-3'-phosphate
  modified_base 19: mod_base = OTHER; note = 2'-O-methyladenosine-3'-phosphate
  modified_base 20: mod_base = OTHER; note = 2'-O-methyluridine-3'-phosphate
  modified_base 21: mod_base = OTHER; note = 2'-O-methyladenosine-3'-phosphate ((2S,4R)-1-[29-[[2-(acetylamino)-2-deoxy-beta-D-galactopyra nosyl]oxy]-14,14-bis[[3-[[3-[[5-[[2-(acetylamino)-2-deoxy-b eta-D-galactopyranosyl]oxy]-1-oxopentyl]amino]propyl]amino] -3-oxopropoxy]methyl]-1,12,19,25-tetraoxo-16-oxa-13,20,24-t riazanonacos-1-yl]-4-hydroxy-2-pyrrolidinyl)methyl ester
  misc_feature 1..10: note = RNA
  misc_feature 12..21: note = RNA
  misc_feature 11: note = DNA
gactttcatcctggaaatata

SEQ ID NO: 238 - RNA, 21 nt, synthetic construct
  source 1..21: mol_type = other RNA
  modified_base 1: mod_base = OTHER; note = 2'-O-methyladenosine-3'-phosphorothioate
  modified_base 2: mod_base = OTHER; note = 2'-O-methylguanosine-3'-phosphorothioate
  modified_base 3: mod_base = OTHER; note = 2'-O-methyladenosine-3'-phosphate
  modified_base 4: mod_base = OTHER; note = 2'-O-methyladenosine-3'-phosphate
  modified_base 5: mod_base = OTHER; note = 2'-O-methyladenosine-3'-phosphate
  modified_base 6: mod_base = OTHER; note = 2'-O-methylguanosine-3'-phosphate
  modified_base 7: mod_base = OTHER; note = 2'-deoxy-2'-fluoroguanosine-3'-phosphate
  modified_base 8: mod_base = OTHER; note = 2'-O-methyluridine-3'-phosphate
  modified_base 9: mod_base = OTHER; note = 2'-deoxy-2'-fluoroguanosine-3'-phosphate
  modified_base 10: mod_base = OTHER; note = 2'-deoxy-2'-fluorouridine-3'-phosphate
  modified_base 11: mod_base = OTHER; note = 2'-deoxy-2'-fluorouridine-3'-phosphate
  modified_base 12: mod_base = OTHER; note = 2'-O-methylcytidine-3'-phosphate
  modified_base 13: mod_base = OTHER; note = 2'-O-methyladenosine-3'-phosphate
  modified_base 14: mod_base = OTHER; note = 2'-O-methyladenosine-3'-phosphate
  modified_base 15: mod_base = OTHER; note = 2'-O-methylguanosine-3'-phosphate
  modified_base 16: mod_base = OTHER; note = 2'-O-methyladenosine-3'-phosphate
  modified_base 17: mod_base = OTHER; note = 2'-O-methyluridine-3'-phosphate
  modified_base 18: mod_base = OTHER; note = 2'-O-methylguanosine-3'-phosphate
  modified_base 19: mod_base = OTHER; note = 2'-O-methyluridine-3'-phosphate
  modified_base 20: mod_base = OTHER; note = 2'-O-methylcytidine-3'-phosphate
  modified_base 21: mod_base = OTHER; note = 2'-O-methyladenosine-3'-phosphate ((2S,4R)-1-[29-[[2-(acetylamino)-2-deoxy-beta-D-galactopyra nosyl]oxy]-14,14-bis[[3-[[3-[[5-[[2-(acetylamino)-2-deoxy-b eta-D-galactopyranosyl]oxy]-1-oxopentyl]amino]propyl]amino] -3-oxopropoxy]methyl]-1,12,19,25-tetraoxo-16-oxa-13,20,24-t riazanonacos-1-yl]-4-hydroxy-2-pyrrolidinyl)methyl ester
agaaaggtgttcaagatgtca

SEQ ID NO: 239 - RNA, 21 nt, synthetic construct
  source 1..21: mol_type = other RNA
  modified_base 1: mod_base = OTHER; note = 2'-O-methylcytidine-3'-phosphorothioate
  modified_base 2: mod_base = OTHER; note = 2'-O-methyladenosine-3'-phosphorothioate
  modified_base 3: mod_base = OTHER; note = 2'-O-methyluridine-3'-phosphate
  modified_base 4: mod_base = OTHER; note = 2'-O-methylcytidine-3'-phosphate
  modified_base 5: mod_base = OTHER; note = 2'-O-methylcytidine-3'-phosphate
  modified_base 6: mod_base = OTHER; note = 2'-O-methyluridine-3'-phosphate
  modified_base 7: mod_base = OTHER; note = 2'-deoxy-2'-fluoroguanosine-3'-phosphate
  modified_base 8: mod_base = OTHER; note = 2'-O-methylguanosine-3'-phosphate
  modified_base 9: mod_base = OTHER; note = 2'-deoxy-2'-fluoroadenosine-3'-phosphate
  modified_base 10: mod_base = OTHER; note = 2'-deoxy-2'-fluoroadenosine-3'-phosphate
  modified_base 11: mod_base = OTHER; note = 2'-deoxy-2'-fluoroadenosine-3'-phosphate
  modified_base 12: mod_base = OTHER; note = 2'-O-methyluridine-3'-phosphate
  modified_base 13: mod_base = OTHER; note = 2'-O-methyladenosine-3'-phosphate
  modified_base 14: mod_base = OTHER; note = 2'-O-methyluridine-3'-phosphate
  modified_base 15: mod_base = OTHER; note = 2'-O-methyladenosine-3'-phosphate
  modified_base 16: mod_base = OTHER; note = 2'-O-methyluridine-3'-phosphate
  modified_base 17: mod_base = OTHER; note = 2'-O-methyluridine-3'-phosphate
  modified_base 18: mod_base = OTHER; note = 2'-O-methyladenosine-3'-phosphate
  modified_base 19: mod_base = OTHER; note = 2'-O-methyladenosine-3'-phosphate
  modified_base 20: mod_base = OTHER; note = 2'-O-methylcytidine-3'-phosphate
  modified_base 21: mod_base = OTHER; note = 2'-O-methyluridine-3'-phosphate ((2S,4R)-1-[29-[[2-(acetylamino)-2-deoxy-beta-D-galactopyra nosyl]oxy]-14,14-bis[[3-[[3-[[5-[[2-(acetylamino)-2-deoxy-b eta-D-galactopyranosyl]oxy]-1-oxopentyl]amino]propyl]amino] -3-oxopropoxy]methyl]-1,12,19,25-tetraoxo-16-oxa-13,20,24-t riazanonacos-1-yl]-4-hydroxy-2-pyrrolidinyl)methyl ester
catcctggaaatatattaact

SEQ ID NO: 240 - RNA, 21 nt, synthetic construct
  source 1..21: mol_type = other RNA
  modified_base 1: mod_base = OTHER; note = 2'-O-methylguanosine-3'-phosphorothioate
  modified_base 2: mod_base = OTHER; note = 2'-O-methyladenosine-3'-phosphorothioate
  modified_base 3: mod_base = OTHER; note = 2'-O-methyladenosine-3'-phosphate
  modified_base 4: mod_base = OTHER; note = 2'-O-methyluridine-3'-phosphate
  modified_base 5: mod_base = OTHER; note = 2'-O-methylguanosine-3'-phosphate
  modified_base 6: mod_base = OTHER; note = 2'-O-methyluridine-3'-phosphate
  modified_base 7: mod_base = OTHER; note = 2'-deoxy-2'-fluoroguanosine-3'-phosphate
  modified_base 8: mod_base = OTHER; note = 2'-O-methyladenosine-3'-phosphate
  modified_base 9: mod_base = OTHER; note = 2'-deoxy-2'-fluoroadenosine-3'-phosphate
  modified_base 10: mod_base = OTHER; note = 2'-deoxy-2'-fluoroadenosine-3'-phosphate
  modified_base 11: mod_base = OTHER; note = 2'-deoxy-2'-fluoroguanosine-3'-phosphate
  modified_base 12: mod_base = OTHER; note = 2'-O-methyluridine-3'-phosphate
  modified_base 13: mod_base = OTHER; note = 2'-O-methylcytidine-3'-phosphate
  modified_base 14: mod_base = OTHER; note = 2'-O-methyladenosine-3'-phosphate
  modified_base 15: mod_base = OTHER; note = 2'-O-methyluridine-3'-phosphate
  modified_base 16: mod_base = OTHER; note = 2'-O-methylcytidine-3'-phosphate
  modified_base 17: mod_base = OTHER; note = 2'-O-methylguanosine-3'-phosphate
  modified_base 18: mod_base = OTHER; note = 2'-O-methyladenosine-3'-phosphate
  modified_base 19: mod_base = OTHER; note = 2'-O-methylcytidine-3'-phosphate
  modified_base 20: mod_base = OTHER; note = 2'-O-methyladenosine-3'-phosphate
  modified_base 21: mod_base = OTHER; note = 2'-O-methyladenosine-3'-phosphate ((2S,4R)-1-[29-[[2-(acetylamino)-2-deoxy-beta-D-galactopyra nosyl]oxy]-14,14-bis[[3-[[3-[[5-[[2-(acetylamino)-2-deoxy-b eta-D-galactopyranosyl]oxy]-1-oxopentyl]amino]propyl]amino] -3-oxopropoxy]methyl]-1,12,19,25-tetraoxo-16-oxa-13,20,24-t riazanonacos-1-yl]-4-hydroxy-2-pyrrolidinyl)methyl ester
gaatgtgaaagtcatcgacaa

SEQ ID NO: 241 - RNA, 21 nt, synthetic construct
  source 1..21: mol_type = other RNA
  modified_base 1: mod_base = OTHER; note = 2'-O-methyladenosine-3'-phosphorothioate
  modified_base 2: mod_base = OTHER; note = 2'-O-methylguanosine-3'-phosphorothioate
  modified_base 3: mod_base = OTHER; note = 2'-O-methyluridine-3'-phosphate
  modified_base 4: mod_base = OTHER; note = 2'-O-methylguanosine-3'-phosphate
  modified_base 5: mod_base = OTHER; note = 2'-O-methylcytidine-3'-phosphate
  modified_base 6: mod_base = OTHER; note = 2'-O-methyladenosine-3'-phosphate
  modified_base 7: mod_base = OTHER; note = 2'-deoxy-2'-fluorocytidine-3'-phosphate
  modified_base 8: mod_base = OTHER; note = 2'-O-methyladenosine-3'-phosphate
  modified_base 9: mod_base = OTHER; note = 2'-deoxy-2'-fluoroadenosine-3'-phosphate
  modified_base 10: mod_base = OTHER; note = 2'-deoxy-2'-fluorouridine-3'-phosphate
  modified_base 11: mod_base = OTHER; note = 2'-deoxy-2'-fluoroadenosine-3'-phosphate
  modified_base 12: mod_base = OTHER; note = 2'-O-methyluridine-3'-phosphate
  modified_base 13: mod_base = OTHER; note = 2'-O-methyluridine-3'-phosphate
  modified_base 14: mod_base = OTHER; note = 2'-O-methyluridine-3'-phosphate
  modified_base 15: mod_base = OTHER; note = 2'-O-methyluridine-3'-phosphate
  modified_base 16: mod_base = OTHER; note = 2'-O-methylcytidine-3'-phosphate
  modified_base 17: mod_base = OTHER; note = 2'-O-methylcytidine-3'-phosphate
  modified_base 18: mod_base = OTHER; note = 2'-O-methylcytidine-3'-phosphate
  modified_base 19: mod_base = OTHER; note = 2'-O-methyladenosine-3'-phosphate
  modified_base 20: mod_base = OTHER; note = 2'-O-methyluridine-3'-phosphate
  modified_base 21: mod_base = OTHER; note = 2'-O-methyladenosine-3'-phosphate ((2S,4R)-1-[29-[[2-(acetylamino)-2-deoxy-beta-D-galactopyra nosyl]oxy]-14,14-bis[[3-[[3-[[5-[[2-(acetylamino)-2-deoxy-b eta-D-galactopyranosyl]oxy]-1-oxopentyl]amino]propyl]amino] -3-oxopropoxy]methyl]-1,12,19,25-tetraoxo-16-oxa-13,20,24-t riazanonacos-1-yl]-4-hydroxy-2-pyrrolidinyl)methyl ester
agtgcacaatattttcccata

SEQ ID NO: 242 - RNA, 21 nt, synthetic construct
  source 1..21: mol_type = other RNA
  modified_base 1: mod_base = OTHER; note = 2'-O-methylguanosine-3'-phosphorothioate
  modified_base 2: mod_base = OTHER; note = 2'-O-methyladenosine-3'-phosphorothioate
  modified_base 3: mod_base = OTHER; note = 2'-O-methyladenosine-3'-phosphate
  modified_base 4: mod_base = OTHER; note = 2'-O-methyladenosine-3'-phosphate
  modified_base 5: mod_base = OTHER; note = 2'-O-methylguanosine-3'-phosphate
  modified_base 6: mod_base = OTHER; note = 2'-O-methyluridine-3'-phosphate
  modified_base 7: mod_base = OTHER; note = 2'-deoxy-2'-fluorocytidine-3'-phosphate
  modified_base 8: mod_base = OTHER; note = 2'-O-methyladenosine-3'-phosphate
  modified_base 9: mod_base = OTHER; note = 2'-deoxy-2'-fluorouridine-3'-phosphate
  modified_base 10: mod_base = OTHER; note = 2'-deoxy-2'-fluorocytidine-3'-phosphate
  modified_base 11: mod_base = OTHER; note = 2'-deoxy-2'-fluoroguanosine-3'-phosphate
  modified_base 12: mod_base = OTHER; note = 2'-O-methyladenosine-3'-phosphate
  modified_base 13: mod_base = OTHER; note = 2'-O-methylcytidine-3'-phosphate
  modified_base 14: mod_base = OTHER; note = 2'-O-methyladenosine-3'-phosphate
  modified_base 15: mod_base = OTHER; note = 2'-O-methyladenosine-3'-phosphate
  modified_base 16: mod_base = OTHER; note = 2'-O-methylguanosine-3'-phosphate
  modified_base 17: mod_base = OTHER; note = 2'-O-methyladenosine-3'-phosphate
  modified_base 18: mod_base = OTHER; note = 2'-O-methylcytidine-3'-phosphate
  modified_base 19: mod_base = OTHER; note = 2'-O-methyladenosine-3'-phosphate
  modified_base 20: mod_base = OTHER; note = 2'-O-methyluridine-3'-phosphate
  modified_base 21: mod_base = OTHER; note = 2'-O-methyluridine-3'-phosphate ((2S,4R)-1-[29-[[2-(acetylamino)-2-deoxy-beta-D-galactopyra nosyl]oxy]-14,14-bis[[3-[[3-[[5-[[2-(acetylamino)-2-deoxy-b eta-D-galactopyranosyl]oxy]-1-oxopentyl]amino]propyl]amino] -3-oxopropoxy]methyl]-1,12,19,25-tetraoxo-16-oxa-13,20,24-t riazanonacos-1-yl]-4-hydroxy-2-pyrrolidinyl)methyl ester
gaaagtcatcgacaagacatt

SEQ ID NO: 243 - RNA, 21 nt, synthetic construct
  source 1..21: mol_type = other RNA
  modified_base 1: mod_base = OTHER; note = 2'-O-methyladenosine-3'-phosphorothioate
  modified_base 2: mod_base = OTHER; note = 2'-O-methyladenosine-3'-phosphorothioate
  modified_base 3: mod_base = OTHER; note = 2'-O-methyluridine-3'-phosphate
  modified_base 4: mod_base = OTHER; note = 2'-O-methylguanosine-3'-phosphate
  modified_base 5: mod_base = OTHER; note = 2'-O-methyluridine-3'-phosphate
  modified_base 6: mod_base = OTHER; note = 2'-O-methylguanosine-3'-phosphate
  modified_base 7: mod_base = OTHER; note = 2'-deoxy-2'-fluoroadenosine-3'-phosphate
  modified_base 8: mod_base = OTHER; note = 2'-O-methyladenosine-3'-phosphate
  modified_base 9: mod_base = OTHER; note = 2'-deoxy-2'-fluoroadenosine-3'-phosphate
  modified_base 10: mod_base = OTHER; note = 2'-deoxy-2'-fluoroguanosine-3'-phosphate
  modified_base 11: mod_base = OTHER; note = 2'-deoxy-2'-fluorouridine-3'-phosphate
  modified_base 12: mod_base = OTHER; note = 2'-O-methylcytidine-3'-phosphate
  modified_base 13: mod_base = OTHER; note = 2'-O-methyladenosine-3'-phosphate
  modified_base 14: mod_base = OTHER; note = 2'-O-methyluridine-3'-phosphate
  modified_base 15: mod_base = OTHER; note = 2'-O-methylcytidine-3'-phosphate
  modified_base 16: mod_base = OTHER; note = 2'-O-methylguanosine-3'-phosphate
  modified_base 17: mod_base = OTHER; note = 2'-O-methyladenosine-3'-phosphate
  modified_base 18: mod_base = OTHER; note = 2'-O-methylcytidine-3'-phosphate
  modified_base 19: mod_base = OTHER; note = 2'-O-methyladenosine-3'-phosphate
  modified_base 20: mod_base = OTHER; note = 2'-O-methyladenosine-3'-phosphate
  modified_base 21: mod_base = OTHER; note = 2'-O-methyladenosine-3'-phosphate ((2S,4R)-1-[29-[[2-(acetylamino)-2-deoxy-beta-D-galactopyra nosyl]oxy]-14,14-bis[[3-[[3-[[5-[[2-(acetylamino)-2-deoxy-b eta-D-galactopyranosyl]oxy]-1-oxopentyl]amino]propyl]amino] -3-oxopropoxy]methyl]-1,12,19,25-tetraoxo-16-oxa-13,20,24-t riazanonacos-1-yl]-4-hydroxy-2-pyrrolidinyl)methyl ester
aatgtgaaagtcatcgacaaa

SEQ ID NO: 244 - RNA, 21 nt, synthetic construct
  source 1..21: mol_type = other RNA
  modified_base 1: mod_base = OTHER; note = 2'-O-methylcytidine-3'-phosphorothioate
  modified_base 2: mod_base = OTHER; note = 2'-O-methyluridine-3'-phosphorothioate
  modified_base 3: mod_base = OTHER; note = 2'-O-methylguanosine-3'-phosphate
  modified_base 4: mod_base = OTHER; note = 2'-O-methylguanosine-3'-phosphate
  modified_base 5: mod_base = OTHER; note = 2'-O-methyladenosine-3'-phosphate
  modified_base 6: mod_base = OTHER; note = 2'-O-methyladenosine-3'-phosphate
  modified_base 7: mod_base = OTHER; note = 2'-deoxy-2'-fluoroadenosine-3'-phosphate
  modified_base 8: mod_base = OTHER; note = 2'-O-methyluridine-3'-phosphate
  modified_base 9: mod_base = OTHER; note = 2'-deoxy-2'-fluoroadenosine-3'-phosphate
  modified_base 10: mod_base = OTHER; note = 2'-deoxy-2'-fluorouridine-3'-phosphate
  modified_base 11: mod_base = OTHER; note = 2'-deoxy-2'-fluoroadenosine-3'-phosphate
  modified_base 12: mod_base = OTHER; note = 2'-O-methyluridine-3'-phosphate
  modified_base 13: mod_base = OTHER; note = 2'-O-methyluridine-3'-phosphate
  modified_base 14: mod_base = OTHER; note = 2'-O-methyladenosine-3'-phosphate
  modified_base 15: mod_base = OTHER; note = 2'-O-methyladenosine-3'-phosphate
  modified_base 16: mod_base = OTHER; note = 2'-O-methylcytidine-3'-phosphate
  modified_base 17: mod_base = OTHER; note = 2'-O-methyluridine-3'-phosphate
  modified_base 18: mod_base = OTHER; note = 2'-O-methylguanosine-3'-phosphate
  modified_base 19: mod_base = OTHER; note = 2'-O-methyluridine-3'-phosphate
  modified_base 20: mod_base = OTHER; note = 2'-O-methyluridine-3'-phosphate
  modified_base 21: mod_base = OTHER; note = 2'-O-methyladenosine-3'-phosphate ((2S,4R)-1-[29-[[2-(acetylamino)-2-deoxy-beta-D-galactopyra nosyl]oxy]-14,14-bis[[3-[[3-[[5-[[2-(acetylamino)-2-deoxy-b eta-D-galactopyranosyl]oxy]-1-oxopentyl]amino]propyl]amino] -3-oxopropoxy]methyl]-1,12,19,25-tetraoxo-16-oxa-13,20,24-t riazanonacos-1-yl]-4-hydroxy-2-pyrrolidinyl)methyl ester
ctggaaatatattaactgtta

SEQ ID NO: 245 - RNA, 21 nt, synthetic construct
  source 1..21: mol_type = other RNA
  modified_base 1: mod_base = OTHER; note = 2'-O-methyladenosine-3'-phosphorothioate
  modified_base 2: mod_base = OTHER; note = 2'-O-methyluridine-3'-phosphorothioate
  modified_base 3: mod_base = OTHER; note = 2'-O-methyluridine-3'-phosphate
  modified_base 4: mod_base = OTHER; note = 2'-O-methyluridine-3'-phosphate
  modified_base 5: mod_base = OTHER; note = 2'-O-methyluridine-3'-phosphate
  modified_base 6: mod_base = OTHER; note = 2'-O-methylcytidine-3'-phosphate
  modified_base 7: mod_base = OTHER; note = 2'-deoxy-2'-fluorocytidine-3'-phosphate
  modified_base 8: mod_base = OTHER; note = 2'-O-methylcytidine-3'-phosphate
  modified_base 9: mod_base = OTHER; note = 2'-deoxy-2'-fluoroadenosine-3'-phosphate
  modified_base 10: mod_base = OTHER; note = 2'-deoxy-2'-fluorouridine-3'-phosphate
  modified_base 11: mod_base = OTHER; note = 2'-deoxy-2'-fluorocytidine-3'-phosphate
  modified_base 12: mod_base = OTHER; note = 2'-O-methyluridine-3'-phosphate
  modified_base 13: mod_base = OTHER; note = 2'-O-methylguanosine-3'-phosphate
  modified_base 14: mod_base = OTHER; note = 2'-O-methyluridine-3'-phosphate
  modified_base 15: mod_base = OTHER; note = 2'-O-methyladenosine-3'-phosphate
  modified_base 16: mod_base = OTHER; note = 2'-O-methyluridine-3'-phosphate
  modified_base 17: mod_base = OTHER; note = 2'-O-methyluridine-3'-phosphate
  modified_base 18: mod_base = OTHER; note = 2'-O-methyladenosine-3'-phosphate
  modified_base 19: mod_base = OTHER; note = 2'-O-methyluridine-3'-phosphate
  modified_base 20: mod_base = OTHER; note = 2'-O-methyluridine-3'-phosphate
  modified_base 21: mod_base = OTHER; note = 2'-O-methyluridine-3'-phosphate ((2S,4R)-1-[29-[[2-(acetylamino)-2-deoxy-beta-D-galactopyra nosyl]oxy]-14,14-bis[[3-[[3-[[5-[[2-(acetylamino)-2-deoxy-b eta-D-galactopyranosyl]oxy]-1-oxopentyl]amino]propyl]amino] -3-oxopropoxy]methyl]-1,12,19,25-tetraoxo-16-oxa-13,20,24-t riazanonacos-1-yl]-4-hydroxy-2-pyrrolidinyl)methyl ester
attttcccatctgtattattt

SEQ ID NO: 246 - RNA, 21 nt, synthetic construct
  source 1..21: mol_type = other RNA
  modified_base 1: mod_base = OTHER; note = 2'-O-methyluridine-3'-phosphorothioate
  modified_base 2: mod_base = OTHER; note = 2'-O-methylguanosine-3'-phosphorothioate
  modified_base 3: mod_base = OTHER; note = 2'-O-methyluridine-3'-phosphate
  modified_base 4: mod_base = OTHER; note = 2'-O-methylcytidine-3'-phosphate
  modified_base 5: mod_base = OTHER; note = 2'-O-methylguanosine-3'-phosphate
  modified_base 6: mod_base = OTHER; note = 2'-O-methyluridine-3'-phosphate
  modified_base 7: mod_base = OTHER; note = 2'-deoxy-2'-fluorouridine-3'-phosphate
  modified_base 8: mod_base = OTHER; note = 2'-O-methylcytidine-3'-phosphate
  modified_base 9: mod_base = OTHER; note = 2'-deoxy-2'-fluorouridine-3'-phosphate
  modified_base 10: mod_base = OTHER; note = 2'-deoxy-2'-fluorouridine-3'-phosphate
  modified_base 11: mod_base = OTHER; note = 2'-deoxy-2'-fluorouridine-3'-phosphate
  modified_base 12: mod_base = OTHER; note = 2'-O-methyluridine-3'-phosphate
  modified_base 13: mod_base = OTHER; note = 2'-O-methylcytidine-3'-phosphate
  modified_base 14: mod_base = OTHER; note = 2'-O-methylcytidine-3'-phosphate
  modified_base 15: mod_base = OTHER; note = 2'-O-methyladenosine-3'-phosphate
  modified_base 16: mod_base = OTHER; note = 2'-O-methyladenosine-3'-phosphate
  modified_base 17: mod_base = OTHER; note = 2'-O-methylcytidine-3'-phosphate
  modified_base 18: mod_base = OTHER; note = 2'-O-methyladenosine-3'-phosphate
  modified_base 19: mod_base = OTHER; note = 2'-O-methyladenosine-3'-phosphate
  modified_base 20: mod_base = OTHER; note = 2'-O-methyladenosine-3'-phosphate
  modified_base 21: mod_base = OTHER; note = 2'-O-methyladenosine-3'-phosphate ((2S,4R)-1-[29-[[2-(acetylamino)-2-deoxy-beta-D-galactopyra nosyl]oxy]-14,14-bis[[3-[[3-[[5-[[2-(acetylamino)-2-deoxy-b eta-D-galactopyranosyl]oxy]-1-oxopentyl]amino]propyl]amino] -3-oxopropoxy]methyl]-1,12,19,25-tetraoxo-16-oxa-13,20,24-t riazanonacos-1-yl]-4-hydroxy-2-pyrrolidinyl)methyl ester
tgtcgttcttttccaacaaaa

SEQ ID NO: 247 - RNA, 21 nt, synthetic construct
  source 1..21: mol_type = other RNA
  modified_base 1: mod_base = OTHER; note = 2'-O-methyladenosine-3'-phosphorothioate
  modified_base 2: mod_base = OTHER; note = 2'-O-methyluridine-3'-phosphorothioate
  modified_base 3: mod_base = OTHER; note = 2'-O-methylcytidine-3'-phosphate
  modified_base 4: mod_base = OTHER; note = 2'-O-methylcytidine-3'-phosphate
  modified_base 5: mod_base = OTHER; note = 2'-O-methyluridine-3'-phosphate
  modified_base 6: mod_base = OTHER; note = 2'-O-methylguanosine-3'-phosphate
  modified_base 7: mod_base = OTHER; note = 2'-deoxy-2'-fluoroguanosine-3'-phosphate
  modified_base 8: mod_base = OTHER; note = 2'-O-methyladenosine-3'-phosphate
  modified_base 9: mod_base = OTHER; note = 2'-deoxy-2'-fluoroadenosine-3'-phosphate
  modified_base 10: mod_base = OTHER; note = 2'-deoxy-2'-fluoroadenosine-3'-phosphate
  modified_base 11: mod_base = OTHER; note = 2'-deoxy-2'-fluorouridine-3'-phosphate
  modified_base 12: mod_base = OTHER; note = 2'-O-methyladenosine-3'-phosphate
  modified_base 13: mod_base = OTHER; note = 2'-O-methyluridine-3'-phosphate
  modified_base 14: mod_base = OTHER; note = 2'-O-methyladenosine-3'-phosphate
  modified_base 15: mod_base = OTHER; note = 2'-O-methyluridine-3'-phosphate
  modified_base 16: mod_base = OTHER; note = 2'-O-methyluridine-3'-phosphate
  modified_base 17: mod_base = OTHER; note = 2'-O-methyladenosine-3'-phosphate
  modified_base 18: mod_base = OTHER; note = 2'-O-methyladenosine-3'-phosphate
  modified_base 19: mod_base = OTHER; note = 2'-O-methylcytidine-3'-phosphate
  modified_base 20: mod_base = OTHER; note = 2'-O-methyluridine-3'-phosphate
  modified_base 21: mod_base = OTHER; note = 2'-O-methyladenosine-3'-phosphate ((2S,4R)-1-[29-[[2-(acetylamino)-2-deoxy-beta-D-galactopyra nosyl]oxy]-14,14-bis[[3-[[3-[[5-[[2-(acetylamino)-2-deoxy-b eta-D-galactopyranosyl]oxy]-1-oxopentyl]amino]propyl]amino] -3-oxopropoxy]methyl]-1,12,19,25-tetraoxo-16-oxa-13,20,24-t riazanonacos-1-yl]-4-hydroxy-2-pyrrolidinyl)methyl ester
atcctggaaatatattaacta

SEQ ID NO: 248 - RNA, 21 nt, synthetic construct
  source 1..21: mol_type = other RNA
  modified_base 1: mod_base = OTHER; note = 2'-O-methylguanosine-3'-phosphorothioate
  modified_base 2: mod_base = OTHER; note = 2'-O-methylcytidine-3'-phosphorothioate
  modified_base 3: mod_base = OTHER; note = 2'-O-methyladenosine-3'-phosphate
  modified_base 4: mod_base = OTHER; note = 2'-O-methyluridine-3'-phosphate
  modified_base 5: mod_base = OTHER; note = 2'-O-methyluridine-3'-phosphate
  modified_base 6: mod_base = OTHER; note = 2'-O-methyluridine-3'-phosphate
  modified_base 7: mod_base = OTHER; note = 2'-deoxy-2'-fluorouridine-3'-phosphate
  modified_base 8: mod_base = OTHER; note = 2'-O-methylguanosine-3'-phosphate
  modified_base 9: mod_base = OTHER; note = 2'-deoxy-2'-fluoroadenosine-3'-phosphate
  modified_base 10: mod_base = OTHER; note = 2'-deoxy-2'-fluoroguanosine-3'-phosphate
  modified_base 11: mod_base = OTHER; note = 2'-deoxy-2'-fluoroadenosine-3'-phosphate
  modified_base 12: mod_base = OTHER; note = 2'-O-methylguanosine-3'-phosphate
  modified_base 13: mod_base = OTHER; note = 2'-O-methylguanosine-3'-phosphate
  modified_base 14: mod_base = OTHER; note = 2'-O-methyluridine-3'-phosphate
  modified_base 15: mod_base = OTHER; note = 2'-O-methylguanosine-3'-phosphate
  modified_base 16: mod_base = OTHER; note = 2'-O-methyladenosine-3'-phosphate
  modified_base 17: mod_base = OTHER; note = 2'-O-methyluridine-3'-phosphate
  modified_base 18: mod_base = OTHER; note = 2'-O-methylguanosine-3'-phosphate
  modified_base 19: mod_base = OTHER; note = 2'-O-methyladenosine-3'-phosphate
  modified_base 20: mod_base = OTHER; note = 2'-O-methyluridine-3'-phosphate
  modified_base 21: mod_base = OTHER; note = 2'-O-methyladenosine-3'-phosphate ((2S,4R)-1-[29-[[2-(acetylamino)-2-deoxy-beta-D-galactopyra nosyl]oxy]-14,14-bis[[3-[[3-[[5-[[2-(acetylamino)-2-deoxy-b eta-D-galactopyranosyl]oxy]-1-oxopentyl]amino]propyl]amino] -3-oxopropoxy]methyl]-1,12,19,25-tetraoxo-16-oxa-13,20,24-t riazanonacos-1-yl]-4-hydroxy-2-pyrrolidinyl)methyl ester
gcattttgagaggtgatgata

SEQ ID NO: 249 - RNA, 21 nt, synthetic construct
  source 1..21: mol_type = other RNA
  modified_base 1: mod_base = OTHER; note = 2'-O-methylcytidine-3'-phosphorothioate
  modified_base 2: mod_base = OTHER; note = 2'-O-methyladenosine-3'-phosphorothioate
  modified_base 3: mod_base = OTHER; note = 2'-O-methylguanosine-3'-phosphate
  modified_base 4: mod_base = OTHER; note = 2'-O-methylguanosine-3'-phosphate
  modified_base 5: mod_base = OTHER; note = 2'-O-methylguanosine-3'-phosphate
  modified_base 6: mod_base = OTHER; note = 2'-O-methylguanosine-3'-phosphate
  modified_base 7: mod_base = OTHER; note = 2'-deoxy-2'-fluoroguanosine-3'-phosphate
  modified_base 8: mod_base = OTHER; note = 2'-O-methyladenosine-3'-phosphate
  modified_base 9: mod_base = OTHER; note = 2'-deoxy-2'-fluoroguanosine-3'-phosphate
  modified_base 10: mod_base = OTHER; note = 2'-deoxy-2'-fluoroadenosine-3'-phosphate
  modified_base 11: mod_base = OTHER; note = 2'-deoxy-2'-fluoroadenosine-3'-phosphate
  modified_base 12: mod_base = OTHER; note = 2'-O-methyladenosine-3'-phosphate
  modified_base 13: mod_base = OTHER; note = 2'-O-methylguanosine-3'-phosphate
  modified_base 14: mod_base = OTHER; note = 2'-O-methylguanosine-3'-phosphate
  modified_base 15: mod_base = OTHER; note = 2'-O-methyluridine-3'-phosphate
  modified_base 16: mod_base = OTHER; note = 2'-O-methylguanosine-3'-phosphate
  modified_base 17: mod_base = OTHER; note = 2'-O-methyluridine-3'-phosphate
  modified_base 18: mod_base = OTHER; note = 2'-O-methyluridine-3'-phosphate
  modified_base 19: mod_base = OTHER; note = 2'-O-methylcytidine-3'-phosphate
  modified_base 20: mod_base = OTHER; note = 2'-O-methyladenosine-3'-phosphate
  modified_base 21: mod_base = OTHER; note = 2'-O-methyladenosine-3'-phosphate ((2S,4R)-1-[29-[[2-(acetylamino)-2-deoxy-beta-D-galactopyra nosyl]oxy]-14,14-bis[[3-[[3-[[5-[[2-(acetylamino)-2-deoxy-b eta-D-galactopyranosyl]oxy]-1-oxopentyl]amino]propyl]amino] -3-oxopropoxy]methyl]-1,12,19,25-tetraoxo-16-oxa-13,20,24-t riazanonacos-1-yl]-4-hydroxy-2-pyrrolidinyl)methyl ester
cagggggagaaaggtgttcaa

SEQ ID NO: 250 - RNA, 21 nt, synthetic construct
  source 1..21: mol_type = other RNA
  modified_base 1: mod_base = OTHER; note = 2'-O-methylguanosine-3'-phosphorothioate
  modified_base 2: mod_base = OTHER; note = 2'-O-methylguanosine-3'-phosphorothioate
  modified_base 3: mod_base = OTHER; note = 2'-O-methyladenosine-3'-phosphate
  modified_base 4: mod_base = OTHER; note = 2'-O-methyladenosine-3'-phosphate
  modified_base 5: mod_base = OTHER; note = 2'-O-methyladenosine-3'-phosphate
  modified_base 6: mod_base = OTHER; note = 2'-O-methyluridine-3'-phosphate
  modified_base 7: mod_base = OTHER; note = 2'-deoxy-2'-fluoroadenosine-3'-phosphate
  modified_base 8: mod_base = OTHER; note = 2'-O-methyluridine-3'-phosphate
  modified_base 9: mod_base = OTHER; note = 2'-deoxy-2'-fluoroadenosine-3'-phosphate
  modified_base 10: mod_base = OTHER; note = 2'-deoxy-2'-fluorouridine-3'-phosphate
  modified_base 11: mod_base = OTHER; note = 2'-deoxy-2'-fluorouridine-3'-phosphate
  modified_base 12: mod_base = OTHER; note = 2'-O-methyladenosine-3'-phosphate
  modified_base 13: mod_base = OTHER; note = 2'-O-methyladenosine-3'-phosphate
  modified_base 14: mod_base = OTHER; note = 2'-O-methylcytidine-3'-phosphate
  modified_base 15: mod_base = OTHER; note = 2'-O-methyluridine-3'-phosphate
  modified_base 16: mod_base = OTHER; note = 2'-O-methylguanosine-3'-phosphate
  modified_base 17: mod_base = OTHER; note = 2'-O-methyluridine-3'-phosphate
  modified_base 18: mod_base = OTHER; note = 2'-O-methyluridine-3'-phosphate
  modified_base 19: mod_base = OTHER; note = 2'-O-methyladenosine-3'-phosphate
  modified_base 20: mod_base = OTHER; note = 2'-O-methyladenosine-3'-phosphate
  modified_base 21: mod_base = OTHER; note = 2'-O-methyladenosine-3'-phosphate ((2S,4R)-1-[29-[[2-(acetylamino)-2-deoxy-beta-D-galactopyra nosyl]oxy]-14,14-bis[[3-[[3-[[5-[[2-(acetylamino)-2-deoxy-b eta-D-galactopyranosyl]oxy]-1-oxopentyl]amino]propyl]amino] -3-oxopropoxy]methyl]-1,12,19,25-tetraoxo-16-oxa-13,20,24-t riazanonacos-1-yl]-4-hydroxy-2-pyrrolidinyl)methyl ester
ggaaatatattaactgttaaa

SEQ ID NO: 251 - RNA, 21 nt, synthetic construct
  source 1..21: mol_type = other RNA
  modified_base 1: mod_base = OTHER; note = 2'-O-methylcytidine-3'-phosphorothioate
  modified_base 2: mod_base = OTHER; note = 2'-O-methyladenosine-3'-phosphorothioate
  modified_base 3: mod_base = OTHER; note = 2'-O-methyluridine-3'-phosphate
  modified_base 4: mod_base = OTHER; note = 2'-O-methyluridine-3'-phosphate
  modified_base 5: mod_base = OTHER; note = 2'-O-methylguanosine-3'-phosphate
  modified_base 6: mod_base = OTHER; note = 2'-O-methylguanosine-3'-phosphate
  modified_base 7: mod_base = OTHER; note = 2'-deoxy-2'-fluorouridine-3'-phosphate
  modified_base 8: mod_base = OTHER; note = 2'-O-methylguanosine-3'-phosphate
  modified_base 9: mod_base = OTHER; note = 2'-deoxy-2'-fluoroadenosine-3'-phosphate
  modified_base 10: mod_base = OTHER; note = 2'-deoxy-2'-fluoroguanosine-3'-phosphate
  modified_base 11: mod_base = OTHER; note = 2'-deoxy-2'-fluoroguanosine-3'-phosphate
  modified_base 12: mod_base = OTHER; note = 2'-O-methyladenosine-3'-phosphate
  modified_base 13: mod_base = OTHER; note = 2'-O-methyladenosine-3'-phosphate
  modified_base 14: mod_base = OTHER; note = 2'-O-methyladenosine-3'-phosphate
  modified_base 15: mod_base = OTHER; note = 2'-O-methyladenosine-3'-phosphate
  modified_base 16: mod_base = OTHER; note = 2'-O-methyladenosine-3'-phosphate
  modified_base 17: mod_base = OTHER; note = 2'-O-methyluridine-3'-phosphate
  modified_base 18: mod_base = OTHER; note = 2'-O-methylcytidine-3'-phosphate
  modified_base 19: mod_base = OTHER; note = 2'-O-methylcytidine-3'-phosphate
  modified_base 20: mod_base = OTHER; note = 2'-O-methyluridine-3'-phosphate
  modified_base 21: mod_base = OTHER; note = 2'-O-methyluridine-3'-phosphate ((2S,4R)-1-[29-[[2-(acetylamino)-2-deoxy-beta-D-galactopyra nosyl]oxy]-14,14-bis[[3-[[3-[[5-[[2-(acetylamino)-2-deoxy-b eta-D-galactopyranosyl]oxy]-1-oxopentyl]amino]propyl]amino] -3-oxopropoxy]methyl]-1,12,19,25-tetraoxo-16-oxa-13,20,24-t riazanonacos-1-yl]-4-hydroxy-2-pyrrolidinyl)methyl ester
cattggtgaggaaaaatcctt

SEQ ID NO: 252 - RNA, 21 nt, synthetic construct
  source 1..21: mol_type = other RNA
  modified_base 1: mod_base = OTHER; note = 2'-O-methylguanosine-3'-phosphorothioate
  modified_base 2: mod_base = OTHER; note = 2'-O-methylguanosine-3'-phosphorothioate
  modified_base 3: mod_base = OTHER; note = 2'-O-methylguanosine-3'-phosphate
  modified_base 4: mod_base = OTHER; note = 2'-O-methyladenosine-3'-phosphate
  modified_base 5: mod_base = OTHER; note = 2'-O-methylguanosine-3'-phosphate
  modified_base 6: mod_base = OTHER; note = 2'-O-methyladenosine-3'-phosphate
  modified_base 7: mod_base = OTHER; note = 2'-deoxy-2'-fluoroadenosine-3'-phosphate
  modified_base 8: mod_base = OTHER; note = 2'-O-methyladenosine-3'-phosphate
  modified_base 9: mod_base = OTHER; note = 2'-deoxy-2'-fluoroguanosine-3'-phosphate
  modified_base 10: mod_base = OTHER; note = 2'-deoxy-2'-fluoroguanosine-3'-phosphate
  modified_base 11: mod_base = OTHER; note = 2'-deoxy-2'-fluorouridine-3'-phosphate
  modified_base 12: mod_base = OTHER; note = 2'-O-methylguanosine-3'-phosphate
  modified_base 13: mod_base = OTHER; note = 2'-O-methyluridine-3'-phosphate
  modified_base 14: mod_base = OTHER; note = 2'-O-methyluridine-3'-phosphate
  modified_base 15: mod_base = OTHER; note = 2'-O-methylcytidine-3'-phosphate
  modified_base 16: mod_base = OTHER; note = 2'-O-methyladenosine-3'-phosphate
  modified_base 17: mod_base = OTHER; note = 2'-O-methyladenosine-3'-phosphate
  modified_base 18: mod_base = OTHER; note = 2'-O-methylguanosine-3'-phosphate
  modified_base 19: mod_base = OTHER; note = 2'-O-methyladenosine-3'-phosphate
  modified_base 20: mod_base = OTHER; note = 2'-O-methyluridine-3'-phosphate
  modified_base 21: mod_base = OTHER; note = 2'-O-methyladenosine-3'-phosphate ((2S,4R)-1-[29-[[2-(acetylamino)-2-deoxy-beta-D-galactopyra nosyl]oxy]-14,14-bis[[3-[[3-[[5-[[2-(acetylamino)-2-deoxy-b eta-D-galactopyranosyl]oxy]-1-oxopentyl]amino]propyl]amino] -3-oxopropoxy]methyl]-1,12,19,25-tetraoxo-16-oxa-13,20,24-t riazanonacos-1-yl]-4-hydroxy-2-pyrrolidinyl)methyl ester
gggagaaaggtgttcaagata

SEQ ID NO: 253 - RNA, 21 nt, synthetic construct
  source 1..21: mol_type = other RNA
  modified_base 1: mod_base = OTHER; note = 2'-O-methylguanosine-3'-phosphorothioate
  modified_base 2: mod_base = OTHER; note = 2'-O-methylguanosine-3'-phosphorothioate
  modified_base 3: mod_base = OTHER; note = 2'-O-methylcytidine-3'-phosphate
  modified_base 4: mod_base = OTHER; note = 2'-O-methyladenosine-3'-phosphate
  modified_base 5: mod_base = OTHER; note = 2'-O-methyluridine-3'-phosphate
  modified_base 6: mod_base = OTHER; note = 2'-O-methyluridine-3'-phosphate
  modified_base 7: mod_base = OTHER; note = 2'-deoxy-2'-fluorouridine-3'-phosphate
  modified_base 8: mod_base = OTHER; note = 2'-O-methyluridine-3'-phosphate
  modified_base 9: mod_base = OTHER; note = 2'-deoxy-2'-fluoroguanosine-3'-phosphate
  modified_base 10: mod_base = OTHER; note = 2'-deoxy-2'-fluoroadenosine-3'-phosphate
  modified_base 11: mod_base = OTHER; note = 2'-deoxy-2'-fluoroguanosine-3'-phosphate
  modified_base 12: mod_base = OTHER; note = 2'-O-methyladenosine-3'-phosphate
  modified_base 13: mod_base = OTHER; note = 2'-O-methylguanosine-3'-phosphate
  modified_base 14: mod_base = OTHER; note = 2'-O-methylguanosine-3'-phosphate
  modified_base 15: mod_base = OTHER; note = 2'-O-methyluridine-3'-phosphate
  modified_base 16: mod_base = OTHER; note = 2'-O-methylguanosine-3'-phosphate
  modified_base 17: mod_base = OTHER; note = 2'-O-methyladenosine-3'-phosphate
  modified_base 18: mod_base = OTHER; note = 2'-O-methyluridine-3'-phosphate
  modified_base 19: mod_base = OTHER; note = 2'-O-methylguanosine-3'-phosphate
  modified_base 20: mod_base = OTHER; note = 2'-O-methyladenosine-3'-phosphate
  modified_base 21: mod_base = OTHER; note = 2'-O-methyluridine-3'-phosphate ((2S,4R)-1-[29-[[2-(acetylamino)-2-deoxy-beta-D-galactopyra nosyl]oxy]-14,14-bis[[3-[[3-[[5-[[2-(acetylamino)-2-deoxy-b eta-D-galactopyranosyl]oxy]-1-oxopentyl]amino]propyl]amino] -3-oxopropoxy]methyl]-1,12,19,25-tetraoxo-16-oxa-13,20,24-t riazanonacos-1-yl]-4-hydroxy-2-pyrrolidinyl)methyl ester
ggcattttgagaggtgatgat

SEQ ID NO: 254 - RNA, 21 nt, synthetic construct
  source 1..21: mol_type = other RNA
  modified_base 1: mod_base = OTHER; note = 2'-O-methyluridine-3'-phosphorothioate
  modified_base 2: mod_base = OTHER; note = 2'-O-methyladenosine-3'-phosphorothioate
  modified_base 3: mod_base = OTHER; note = 2'-O-methylcytidine-3'-phosphate
  modified_base 4: mod_base = OTHER; note = 2'-O-methyladenosine-3'-phosphate
  modified_base 5: mod_base = OTHER; note = 2'-O-methyladenosine-3'-phosphate
  modified_base 6: mod_base = OTHER; note = 2'-O-methyladenosine-3'-phosphate
  modified_base 7: mod_base = OTHER; note = 2'-deoxy-2'-fluoroguanosine-3'-phosphate
  modified_base 8: mod_base = OTHER; note = 2'-O-methylguanosine-3'-phosphate
  modified_base 9: mod_base = OTHER; note = 2'-deoxy-2'-fluoroguanosine-3'-phosphate
  modified_base 10: mod_base = OTHER; note = 2'-deoxy-2'-fluorouridine-3'-phosphate
  modified_base 11: mod_base = OTHER; note = 2'-deoxy-2'-fluoroguanosine-3'-phosphate
  modified_base 12: mod_base = OTHER; note = 2'-O-methyluridine-3'-phosphate
  modified_base 13: mod_base = OTHER; note = 2'-O-methylcytidine-3'-phosphate
  modified_base 14: mod_base = OTHER; note = 2'-O-methylguanosine-3'-phosphate
  modified_base 15: mod_base = OTHER; note = 2'-O-methyluridine-3'-phosphate
  modified_base 16: mod_base = OTHER; note = 2'-O-methyluridine-3'-phosphate
  modified_base 17: mod_base = OTHER; note = 2'-O-methylcytidine-3'-phosphate
  modified_base 18: mod_base = OTHER; note = 2'-O-methyluridine-3'-phosphate
  modified_base 19: mod_base = OTHER; note = 2'-O-methyluridine-3'-phosphate
  modified_base 20: mod_base = OTHER; note = 2'-O-methyluridine-3'-phosphate
  modified_base 21: mod_base = OTHER; note = 2'-O-methyluridine-3'-phosphate ((2S,4R)-1-[29-[[2-(acetylamino)-2-deoxy-beta-D-galactopyra nosyl]oxy]-14,14-bis[[3-[[3-[[5-[[2-(acetylamino)-2-deoxy-b eta-D-galactopyranosyl]oxy]-1-oxopentyl]amino]propyl]amino] -3-oxopropoxy]methyl]-1,12,19,25-tetraoxo-16-oxa-13,20,24-t riazanonacos-1-yl]-4-hydroxy-2-pyrrolidinyl)methyl ester
tacaaagggtgtcgttctttt

SEQ ID NO: 255 - RNA, 21 nt, synthetic construct
  source 1..21: mol_type = other RNA
  modified_base 1: mod_base = OTHER; note = 2'-O-methyluridine-3'-phosphorothioate
  modified_base 2: mod_base = OTHER; note = 2'-O-methylguanosine-3'-phosphorothioate
  modified_base 3: mod_base = OTHER; note = 2'-O-methylguanosine-3'-phosphate
  modified_base 4: mod_base = OTHER; note = 2'-O-methylguanosine-3'-phosphate
  modified_base 5: mod_base = OTHER; note = 2'-O-methyladenosine-3'-phosphate
  modified_base 6: mod_base = OTHER; note = 2'-O-methyluridine-3'-phosphate
  modified_base 7: mod_base = OTHER; note = 2'-deoxy-2'-fluorocytidine-3'-phosphate
  modified_base 8: mod_base = OTHER; note = 2'-O-methyluridine-3'-phosphate
  modified_base 9: mod_base = OTHER; note = 2'-deoxy-2'-fluorouridine-3'-phosphate
  modified_base 10: mod_base = OTHER; note = 2'-deoxy-2'-fluoroguanosine-3'-phosphate
  modified_base 11: mod_base = OTHER; note = 2'-deoxy-2'-fluoroguanosine-3'-phosphate
  modified_base 12: mod_base = OTHER; note = 2'-O-methyluridine-3'-phosphate
  modified_base 13: mod_base = OTHER; note = 2'-O-methylguanosine-3'-phosphate
  modified_base 14: mod_base = OTHER; note = 2'-O-methyluridine-3'-phosphate
  modified_base 15: mod_base = OTHER; note = 2'-O-methylcytidine-3'-phosphate
  modified_base 16: mod_base = OTHER; note = 2'-O-methylguanosine-3'-phosphate
  modified_base 17: mod_base = OTHER; note = 2'-O-methyladenosine-3'-phosphate
  modified_base 18: mod_base = OTHER; note = 2'-O-methyladenosine-3'-phosphate
  modified_base 19: mod_base = OTHER; note = 2'-O-methyluridine-3'-phosphate
  modified_base 20: mod_base = OTHER; note = 2'-O-methylcytidine-3'-phosphate
  modified_base 21: mod_base = OTHER; note = 2'-O-methyladenosine-3'-phosphate ((2S,4R)-1-[29-[[2-(acetylamino)-2-deoxy-beta-D-galactopyra nosyl]oxy]-14,14-bis[[3-[[3-[[5-[[2-(acetylamino)-2-deoxy-b eta-D-galactopyranosyl]oxy]-1-oxopentyl]amino]propyl]amino] -3-oxopropoxy]methyl]-1,12,19,25-tetraoxo-16-oxa-13,20,24-t riazanonacos-1-yl]-4-hydroxy-2-pyrrolidinyl)methyl ester
tgggatcttggtgtcgaatca

SEQ ID NO: 256 - RNA, 21 nt, synthetic construct
  source 1..21: mol_type = other RNA
  modified_base 1: mod_base = OTHER; note = 2'-O-methylcytidine-3'-phosphorothioate
  modified_base 2: mod_base = OTHER; note = 2'-O-methyluridine-3'-phosphorothioate
  modified_base 3: mod_base = OTHER; note = 2'-O-methylguanosine-3'-phosphate
  modified_base 4: mod_base = OTHER; note = 2'-O-methyladenosine-3'-phosphate
  modified_base 5: mod_base = OTHER; note = 2'-O-methylcytidine-3'-phosphate
  modified_base 6: mod_base = OTHER; note = 2'-O-methyladenosine-3'-phosphate
  modified_base 7: mod_base = OTHER; note = 2'-deoxy-2'-fluoroguanosine-3'-phosphate
  modified_base 8: mod_base = OTHER; note = 2'-O-methyluridine-3'-phosphate
  modified_base 9: mod_base = OTHER; note = 2'-deoxy-2'-fluoroguanosine-3'-phosphate
  modified_base 10: mod_base = OTHER; note = 2'-deoxy-2'-fluorocytidine-3'-phosphate
  modified_base 11: mod_base = OTHER; note = 2'-deoxy-2'-fluoroadenosine-3'-phosphate
  modified_base 12: mod_base = OTHER; note = 2'-O-methylcytidine-3'-phosphate
  modified_base 13: mod_base = OTHER; note = 2'-O-methyladenosine-3'-phosphate
  modified_base 14: mod_base = OTHER; note = 2'-O-methyladenosine-3'-phosphate
  modified_base 15: mod_base = OTHER; note = 2'-O-methyluridine-3'-phosphate
  modified_base 16: mod_base = OTHER; note = 2'-O-methyladenosine-3'-phosphate
  modified_base 17: mod_base = OTHER; note = 2'-O-methyluridine-3'-phosphate
  modified_base 18: mod_base = OTHER; note = 2'-O-methyluridine-3'-phosphate
  modified_base 19: mod_base = OTHER; note = 2'-O-methyluridine-3'-phosphate
  modified_base 20: mod_base = OTHER; note = 2'-O-methyluridine-3'-phosphate
  modified_base 21: mod_base = OTHER; note = 2'-O-methyladenosine-3'-phosphate ((2S,4R)-1-[29-[[2-(acetylamino)-2-deoxy-beta-D-galactopyra nosyl]oxy]-14,14-bis[[3-[[3-[[5-[[2-(acetylamino)-2-deoxy-b eta-D-galactopyranosyl]oxy]-1-oxopentyl]amino]propyl]amino] -3-oxopropoxy]methyl]-1,12,19,25-tetraoxo-16-oxa-13,20,24-t riazanonacos-1-yl]-4-hydroxy-2-pyrrolidinyl)methyl ester
ctgacagtgcacaatatttta

SEQ ID NO: 257 - RNA, 21 nt, synthetic construct
  source 1..21: mol_type = other RNA
  modified_base 1: mod_base = OTHER; note = 2'-O-methylcytidine-3'-phosphorothioate
  modified_base 2: mod_base = OTHER; note = 2'-O-methyladenosine-3'-phosphorothioate
  modified_base 3: mod_base = OTHER; note = 2'-O-methylguanosine-3'-phosphate
  modified_base 4: mod_base = OTHER; note = 2'-O-methyluridine-3'-phosphate
  modified_base 5: mod_base = OTHER; note = 2'-O-methylguanosine-3'-phosphate
  modified_base 6: mod_base = OTHER; note = 2'-O-methylcytidine-3'-phosphate
  modified_base 7: mod_base = OTHER; note = 2'-deoxy-2'-fluoroadenosine-3'-phosphate
  modified_base 8: mod_base = OTHER; note = 2'-O-methylcytidine-3'-phosphate
  modified_base 9: mod_base = OTHER; note = 2'-deoxy-2'-fluoroadenosine-3'-phosphate
  modified_base 10: mod_base = OTHER; note = 2'-deoxy-2'-fluoroadenosine-3'-phosphate
  modified_base 11: mod_base = OTHER; note = 2'-deoxy-2'-fluorouridine-3'-phosphate
  modified_base 12: mod_base = OTHER; note = 2'-O-methyladenosine-3'-phosphate
  modified_base 13: mod_base = OTHER; note = 2'-O-methyluridine-3'-phosphate
  modified_base 14: mod_base = OTHER; note = 2'-O-methyluridine-3'-phosphate
  modified_base 15: mod_base = OTHER; note = 2'-O-methyluridine-3'-phosphate
  modified_base 16: mod_base = OTHER; note = 2'-O-methyluridine-3'-phosphate
  modified_base 17: mod_base = OTHER; note = 2'-O-methylcytidine-3'-phosphate
  modified_base 18: mod_base = OTHER; note = 2'-O-methylcytidine-3'-phosphate
  modified_base 19: mod_base = OTHER; note = 2'-O-methylcytidine-3'-phosphate
  modified_base 20: mod_base = OTHER; note = 2'-O-methyladenosine-3'-phosphate
  modified_base 21: mod_base = OTHER; note = 2'-O-methyluridine-3'-phosphate ((2S,4R)-1-[29-[[2-(acetylamino)-2-deoxy-beta-D-galactopyra nosyl]oxy]-14,14-bis[[3-[[3-[[5-[[2-(acetylamino)-2-deoxy-b eta-D-galactopyranosyl]oxy]-1-oxopentyl]amino]propyl]amino] -3-oxopropoxy]methyl]-1,12,19,25-tetraoxo-16-oxa-13,20,24-t riazanonacos-1-yl]-4-hydroxy-2-pyrrolidinyl)methyl ester
cagtgcacaatattttcccat

SEQ ID NO: 258 - RNA, 21 nt, synthetic construct
  source 1..21: mol_type = other RNA
  modified_base 1: mod_base = OTHER; note = 2'-O-methyladenosine-3'-phosphorothioate
  modified_base 2: mod_base = OTHER; note = 2'-O-methylcytidine-3'-phosphorothioate
  modified_base 3: mod_base = OTHER; note = 2'-O-methyluridine-3'-phosphate
  modified_base 4: mod_base = OTHER; note = 2'-O-methyluridine-3'-phosphate
  modified_base 5: mod_base = OTHER; note = 2'-O-methyluridine-3'-phosphate
  modified_base 6: mod_base = OTHER; note = 2'-O-methyluridine-3'-phosphate
  modified_base 7: mod_base = OTHER; note = 2'-deoxy-2'-fluorocytidine-3'-phosphate
  modified_base 8: mod_base = OTHER; note = 2'-O-methyladenosine-3'-phosphate
  modified_base 9: mod_base = OTHER; note = 2'-deoxy-2'-fluoroadenosine-3'-phosphate
  modified_base 10: mod_base = OTHER; note = 2'-deoxy-2'-fluorouridine-3'-phosphate
  modified_base 11: mod_base = OTHER; note = 2'-deoxy-2'-fluoroguanosine-3'-phosphate
  modified_base 12: mod_base = OTHER; note = 2'-O-methylguanosine-3'-phosphate
  modified_base 13: mod_base = OTHER; note = 2'-O-methylguanosine-3'-phosphate
  modified_base 14: mod_base = OTHER; note = 2'-O-methyluridine-3'-phosphate
  modified_base 15: mod_base = OTHER; note = 2'-O-methylguanosine-3'-phosphate
  modified_base 16: mod_base = OTHER; note = 2'-O-methyluridine-3'-phosphate
  modified_base 17: mod_base = OTHER; note = 2'-O-methylcytidine-3'-phosphate
  modified_base 18: mod_base = OTHER; note = 2'-O-methylcytidine-3'-phosphate
  modified_base 19: mod_base = OTHER; note = 2'-O-methyluridine-3'-phosphate
  modified_base 20: mod_base = OTHER; note = 2'-O-methyladenosine-3'-phosphate
  modified_base 21: mod_base = OTHER; note = 2'-O-methyladenosine-3'-phosphate ((2S,4R)-1-[29-[[2-(acetylamino)-2-deoxy-beta-D-galactopyra nosyl]oxy]-14,14-bis[[3-[[3-[[5-[[2-(acetylamino)-2-deoxy-b eta-D-galactopyranosyl]oxy]-1-oxopentyl]amino]propyl]amino] -3-oxopropoxy]methyl]-1,12,19,25-tetraoxo-16-oxa-13,20,24-t riazanonacos-1-yl]-4-hydroxy-2-pyrrolidinyl)methyl ester
acttttcaatgggtgtcctaa

SEQ ID NO: 259 - RNA, 21 nt, synthetic construct
  source 1..21: mol_type = other RNA
  modified_base 1: mod_base = OTHER; note = 2'-O-methyladenosine-3'-phosphorothioate
  modified_base 2: mod_base = OTHER; note = 2'-O-methylcytidine-3'-phosphorothioate
  modified_base 3: mod_base = OTHER; note = 2'-O-methyladenosine-3'-phosphate
  modified_base 4: mod_base = OTHER; note = 2'-O-methyluridine-3'-phosphate
  modified_base 5: mod_base = OTHER; note = 2'-O-methyluridine-3'-phosphate
  modified_base 6: mod_base = OTHER; note = 2'-O-methylguanosine-3'-phosphate
  modified_base 7: mod_base = OTHER; note = 2'-deoxy-2'-fluoroguanosine-3'-phosphate
  modified_base 8: mod_base = OTHER; note = 2'-O-methyluridine-3'-phosphate
  modified_base 9: mod_base = OTHER; note = 2'-deoxy-2'-fluoroguanosine-3'-phosphate
  modified_base 10: mod_base = OTHER; note = 2'-deoxy-2'-fluoroadenosine-3'-phosphate
  modified_base 11: mod_base = OTHER; note = 2'-deoxy-2'-fluoroguanosine-3'-phosphate
  modified_base 12: mod_base = OTHER; note = 2'-O-methylguanosine-3'-phosphate
  modified_base 13: mod_base = OTHER; note = 2'-O-methyladenosine-3'-phosphate
  modified_base 14: mod_base = OTHER; note = 2'-O-methyladenosine-3'-phosphate
  modified_base 15: mod_base = OTHER; note = 2'-O-methyladenosine-3'-phosphate
  modified_base 16: mod_base = OTHER; note = 2'-O-methyladenosine-3'-phosphate
  modified_base 17: mod_base = OTHER; note = 2'-O-methyladenosine-3'-phosphate
  modified_base 18: mod_base = OTHER; note = 2'-O-methyluridine-3'-phosphate
  modified_base 19: mod_base = OTHER; note = 2'-O-methylcytidine-3'-phosphate
  modified_base 20: mod_base = OTHER; note = 2'-O-methylcytidine-3'-phosphate
  modified_base 21: mod_base = OTHER; note = 2'-O-methyluridine-3'-phosphate ((2S,4R)-1-[29-[[2-(acetylamino)-2-deoxy-beta-D-galactopyra nosyl]oxy]-14,14-bis[[3-[[3-[[5-[[2-(acetylamino)-2-deoxy-b eta-D-galactopyranosyl]oxy]-1-oxopentyl]amino]propyl]amino] -3-oxopropoxy]methyl]-1,12,19,25-tetraoxo-16-oxa-13,20,24-t riazanonacos-1-yl]-4-hydroxy-2-pyrrolidinyl)methyl ester
acattggtgaggaaaaatcct

SEQ ID NO: 260 - RNA, 21 nt, synthetic construct
  source 1..21: mol_type = other RNA
  modified_base 1: mod_base = OTHER; note = 2'-O-methyluridine-3'-phosphorothioate
  modified_base 2: mod_base = OTHER; note = 2'-O-methyluridine-3'-phosphorothioate
  modified_base 3: mod_base = OTHER; note = 2'-O-methylguanosine-3'-phosphate
  modified_base 4: mod_base = OTHER; note = 2'-O-methylcytidine-3'-phosphate
  modified_base 5: mod_base = OTHER; note = 2'-O-methyluridine-3'-phosphate
  modified_base 6: mod_base = OTHER; note = 2'-O-methyluridine-3'-phosphate
  modified_base 7: mod_base = OTHER; note = 2'-deoxy-2'-fluorouridine-3'-phosphate
  modified_base 8: mod_base = OTHER; note = 2'-O-methyluridine-3'-phosphate
  modified_base 9: mod_base = OTHER; note = 2'-deoxy-2'-fluoroguanosine-3'-phosphate
  modified_base 10: mod_base = OTHER; note = 2'-deoxy-2'-fluoroadenosine-3'-phosphate
  modified_base 11: mod_base = OTHER; note = 2'-deoxy-2'-fluorocytidine-3'-phosphate
  modified_base 12: mod_base = OTHER; note = 2'-O-methyluridine-3'-phosphate
  modified_base 13: mod_base = OTHER; note = 2'-O-methyluridine-3'-phosphate
  modified_base 14: mod_base = OTHER; note = 2'-O-methyluridine-3'-phosphate
  modified_base 15: mod_base = OTHER; note = 2'-O-methyluridine-3'-phosphate
  modified_base 16: mod_base = OTHER; note = 2'-O-methylcytidine-3'-phosphate
  modified_base 17: mod_base = OTHER; note = 2'-O-methyladenosine-3'-phosphate
  modified_base 18: mod_base = OTHER; note = 2'-O-methyladenosine-3'-phosphate
  modified_base 19: mod_base = OTHER; note = 2'-O-methyluridine-3'-phosphate
  modified_base 20: mod_base = OTHER; note = 2'-O-methylguanosine-3'-phosphate
  modified_base 21: mod_base = OTHER; note = 2'-O-methyladenosine-3'-phosphate ((2S,4R)-1-[29-[[2-(acetylamino)-2-deoxy-beta-D-galactopyra nosyl]oxy]-14,14-bis[[3-[[3-[[5-[[2-(acetylamino)-2-deoxy-b eta-D-galactopyranosyl]oxy]-1-oxopentyl]amino]propyl]amino] -3-oxopropoxy]methyl]-1,12,19,25-tetraoxo-16-oxa-13,20,24-t riazanonacos-1-yl]-4-hydroxy-2-pyrrolidinyl)methyl ester
ttgcttttgacttttcaatga

SEQ ID NO: 261 - RNA, 21 nt, synthetic construct
  source 1..21: mol_type = other RNA
  modified_base 1: mod_base = OTHER; note = 2'-O-methylcytidine-3'-phosphorothioate
  modified_base 2: mod_base = OTHER; note = 2'-O-methyladenosine-3'-phosphorothioate
  modified_base 3: mod_base = OTHER; note = 2'-O-methyluridine-3'-phosphate
  modified_base 4: mod_base = OTHER; note = 2'-O-methyluridine-3'-phosphate
  modified_base 5: mod_base = OTHER; note = 2'-O-methyluridine-3'-phosphate
  modified_base 6: mod_base = OTHER; note = 2'-O-methyluridine-3'-phosphate
  modified_base 7: mod_base = OTHER; note = 2'-deoxy-2'-fluoroguanosine-3'-phosphate
  modified_base 8: mod_base = OTHER; note = 2'-O-methyladenosine-3'-phosphate
  modified_base 9: mod_base = OTHER; note = 2'-deoxy-2'-fluoroguanosine-3'-phosphate
  modified_base 10: mod_base = OTHER; note = 2'-deoxy-2'-fluoroadenosine-3'-phosphate
  modified_base 11: mod_base = OTHER; note = 2'-deoxy-2'-fluoroguanosine-3'-phosphate
  modified_base 12: mod_base = OTHER; note = 2'-O-methylguanosine-3'-phosphate
  modified_base 13: mod_base = OTHER; note = 2'-O-methyluridine-3'-phosphate
  modified_base 14: mod_base = OTHER; note = 2'-O-methylguanosine-3'-phosphate
  modified_base 15: mod_base = OTHER; note = 2'-O-methyladenosine-3'-phosphate
  modified_base 16: mod_base = OTHER; note = 2'-O-methyluridine-3'-phosphate
  modified_base 17: mod_base = OTHER; note = 2'-O-methylguanosine-3'-phosphate
  modified_base 18: mod_base = OTHER; note = 2'-O-methyladenosine-3'-phosphate
  modified_base 19: mod_base = OTHER; note = 2'-O-methyluridine-3'-phosphate
  modified_base 20: mod_base = OTHER; note = 2'-O-methylguanosine-3'-phosphate
  modified_base 21: mod_base = OTHER; note = 2'-O-methyladenosine-3'-phosphate ((2S,4R)-1-[29-[[2-(acetylamino)-2-deoxy-beta-D-galactopyra nosyl]oxy]-14,14-bis[[3-[[3-[[5-[[2-(acetylamino)-2-deoxy-b eta-D-galactopyranosyl]oxy]-1-oxopentyl]amino]propyl]amino] -3-oxopropoxy]methyl]-1,12,19,25-tetraoxo-16-oxa-13,20,24-t riazanonacos-1-yl]-4-hydroxy-2-pyrrolidinyl)methyl ester
cattttgagaggtgatgatga

SEQ ID NO: 262 - RNA, 21 nt, synthetic construct
  source 1..21: mol_type = other RNA
  modified_base 1: mod_base = OTHER; note = 2'-O-methyluridine-3'-phosphorothioate
  modified_base 2: mod_base = OTHER; note = 2'-O-methyluridine-3'-phosphorothioate
  modified_base 3: mod_base = OTHER; note = 2'-O-methylguanosine-3'-phosphate
  modified_base 4: mod_base = OTHER; note = 2'-O-methyladenosine-3'-phosphate
  modified_base 5: mod_base = OTHER; note = 2'-O-methylcytidine-3'-phosphate
  modified_base 6: mod_base = OTHER; note = 2'-O-methyluridine-3'-phosphate
  modified_base 7: mod_base = OTHER; note = 2'-deoxy-2'-fluorouridine-3'-phosphate
  modified_base 8: mod_base = OTHER; note = 2'-O-methyluridine-3'-phosphate
  modified_base 9: mod_base = OTHER; note = 2'-deoxy-2'-fluorouridine-3'-phosphate
  modified_base 10: mod_base = OTHER; note = 2'-deoxy-2'-fluorocytidine-3'-phosphate
  modified_base 11: mod_base = OTHER; note = 2'-deoxy-2'-fluoroadenosine-3'-phosphate
  modified_base 12: mod_base = OTHER; note = 2'-O-methyladenosine-3'-phosphate
  modified_base 13: mod_base = OTHER; note = 2'-O-methyluridine-3'-phosphate
  modified_base 14: mod_base = OTHER; note = 2'-O-methylguanosine-3'-phosphate
  modified_base 15: mod_base = OTHER; note = 2'-O-methylguanosine-3'-phosphate
  modified_base 16: mod_base = OTHER; note = 2'-O-methylguanosine-3'-phosphate
  modified_base 17: mod_base = OTHER; note = 2'-O-methyluridine-3'-phosphate
  modified_base 18: mod_base = OTHER; note = 2'-O-methylguanosine-3'-phosphate
  modified_base 19: mod_base = OTHER; note = 2'-O-methyluridine-3'-phosphate
  modified_base 20: mod_base = OTHER; note = 2'-O-methylcytidine-3'-phosphate
  modified_base 21: mod_base = OTHER; note = 2'-O-methyladenosine-3'-phosphate ((2S,4R)-1-[29-[[2-(acetylamino)-2-deoxy-beta-D-galactopyra nosyl]oxy]-14,14-bis[[3-[[3-[[5-[[2-(acetylamino)-2-deoxy-b eta-D-galactopyranosyl]oxy]-1-oxopentyl]amino]propyl]amino] -3-oxopropoxy]methyl]-1,12,19,25-tetraoxo-16-oxa-13,20,24-t riazanonacos-1-yl]-4-hydroxy-2-pyrrolidinyl)methyl ester
ttgacttttcaatgggtgtca

SEQ ID NO: 263 - RNA, 21 nt, synthetic construct
  source 1..21: mol_type = other RNA
  modified_base 1: mod_base = OTHER; note = 2'-O-methylcytidine-3'-phosphorothioate
  modified_base 2: mod_base = OTHER; note = 2'-O-methylguanosine-3'-phosphorothioate
  modified_base 3: mod_base = OTHER; note = 2'-O-methyladenosine-3'-phosphate
  modified_base 4: mod_base = OTHER; note = 2'-O-methylcytidine-3'-phosphate
  modified_base 5: mod_base = OTHER; note = 2'-O-methyluridine-3'-phosphate
  modified_base 6: mod_base = OTHER; note = 2'-O-methyluridine-3'-phosphate
  modified_base 7: mod_base = OTHER; note = 2'-deoxy-2'-fluorocytidine-3'-phosphate
  modified_base 8: mod_base = OTHER; note = 2'-O-methyluridine-3'-phosphate
  modified_base 9: mod_base = OTHER; note = 2'-deoxy-2'-fluoroguanosine-3'-phosphate
  modified_base 10: mod_base = OTHER; note = 2'-deoxy-2'-fluorouridine-3'-phosphate
  modified_base 11: mod_base = OTHER; note = 2'-deoxy-2'-fluorouridine-3'-phosphate
  modified_base 12: mod_base = OTHER; note = 2'-O-methyluridine-3'-phosphate
  modified_base 13: mod_base = OTHER; note = 2'-O-methyluridine-3'-phosphate
  modified_base 14: mod_base = OTHER; note = 2'-O-methyladenosine-3'-phosphate
  modified_base 15: mod_base = OTHER; note = 2'-O-methylguanosine-3'-phosphate
  modified_base 16: mod_base = OTHER; note = 2'-O-methylguanosine-3'-phosphate
  modified_base 17: mod_base = OTHER; note = 2'-O-methyladenosine-3'-phosphate
  modified_base 18: mod_base = OTHER; note = 2'-O-methylcytidine-3'-phosphate
  modified_base 19: mod_base = OTHER; note = 2'-O-methyladenosine-3'-phosphate
  modified_base 20: mod_base = OTHER; note = 2'-O-methylguanosine-3'-phosphate
  modified_base 21: mod_base = OTHER; note = 2'-O-methyladenosine-3'-phosphate ((2S,4R)-1-[29-[[2-(acetylamino)-2-deoxy-beta-D-galactopyra nosyl]oxy]-14,14-bis[[3-[[3-[[5-[[2-(acetylamino)-2-deoxy-b eta-D-galactopyranosyl]oxy]-1-oxopentyl]amino]propyl]amino] -3-oxopropoxy]methyl]-1,12,19,25-tetraoxo-16-oxa-13,20,24-t riazanonacos-1-yl]-4-hydroxy-2-pyrrolidinyl)methyl ester
cgacttctgttttaggacaga

SEQ ID NO: 264 - RNA, 21 nt, synthetic construct
  source 1..21: mol_type = other RNA
  modified_base 1: mod_base = OTHER; note = 2'-O-methylcytidine-3'-phosphorothioate
  modified_base 2: mod_base = OTHER; note = 2'-O-methyluridine-3'-phosphorothioate
  modified_base 3: mod_base = OTHER; note = 2'-O-methylcytidine-3'-phosphate
  modified_base 4: mod_base = OTHER; note = 2'-O-methyluridine-3'-phosphate
  modified_base 5: mod_base = OTHER; note = 2'-O-methylguanosine-3'-phosphate
  modified_base 6: mod_base = OTHER; note = 2'-O-methyladenosine-3'-phosphate
  modified_base 7: mod_base = OTHER; note = 2'-deoxy-2'-fluoroguanosine-3'-phosphate
  modified_base 8: mod_base = OTHER; note = 2'-O-methyluridine-3'-phosphate
  modified_base 9: mod_base = OTHER; note = 2'-deoxy-2'-fluoroguanosine-3'-phosphate
  modified_base 10: mod_base = OTHER; note = 2'-deoxy-2'-fluoroguanosine-3'-phosphate
  modified_base 11: mod_base = OTHER; note = 2'-deoxy-2'-fluoroguanosine-3'-phosphate
  modified_base 12: mod_base = OTHER; note = 2'-O-methyluridine-3'-phosphate
  modified_base 13: mod_base = OTHER; note = 2'-O-methylguanosine-3'-phosphate
  modified_base 14: mod_base = OTHER; note = 2'-O-methylcytidine-3'-phosphate
  modified_base 15: mod_base = OTHER; note = 2'-O-methylcytidine-3'-phosphate
  modified_base 16: mod_base = OTHER; note = 2'-O-methyladenosine-3'-phosphate
  modified_base 17: mod_base = OTHER; note = 2'-O-methylguanosine-3'-phosphate
  modified_base 18: mod_base = OTHER; note = 2'-O-methyladenosine-3'-phosphate
  modified_base 19: mod_base = OTHER; note = 2'-O-methyladenosine-3'-phosphate
  modified_base 20: mod_base = OTHER; note = 2'-O-methyluridine-3'-phosphate
  modified_base 21: mod_base = OTHER; note = 2'-O-methyladenosine-3'-phosphate ((2S,4R)-1-[29-[[2-(acetylamino)-2-deoxy-beta-D-galactopyra nosyl]oxy]-14,14-bis[[3-[[3-[[5-[[2-(acetylamino)-2-deoxy-b eta-D-galactopyranosyl]oxy]-1-oxopentyl]amino]propyl]amino] -3-oxopropoxy]methyl]-1,12,19,25-tetraoxo-16-oxa-13,20,24-t riazanonacos-1-yl]-4-hydroxy-2-pyrrolidinyl)methyl ester
ctctgagtgggtgccagaata

SEQ ID NO: 265 - RNA, 21 nt, synthetic construct
  source 1..21: mol_type = other RNA
  modified_base 1: mod_base = OTHER; note = 2'-O-methylguanosine-3'-phosphorothioate
  modified_base 2: mod_base = OTHER; note = 2'-O-methylguanosine-3'-phosphorothioate
  modified_base 3: mod_base = OTHER; note = 2'-O-methylguanosine-3'-phosphate
  modified_base 4: mod_base = OTHER; note = 2'-O-methyluridine-3'-phosphate
  modified_base 5: mod_base = OTHER; note = 2'-O-methylguanosine-3'-phosphate
  modified_base 6: mod_base = OTHER; note = 2'-O-methylcytidine-3'-phosphate
  modified_base 7: mod_base = OTHER; note = 2'-deoxy-2'-fluorocytidine-3'-phosphate
  modified_base 8: mod_base = OTHER; note = 2'-O-methyladenosine-3'-phosphate
  modified_base 9: mod_base = OTHER; note = 2'-deoxy-2'-fluoroguanosine-3'-phosphate
  modified_base 10: mod_base = OTHER; note = 2'-deoxy-2'-fluoroadenosine-3'-phosphate
  modified_base 11: mod_base = OTHER; note = 2'-deoxy-2'-fluoroadenosine-3'-phosphate
  modified_base 12: mod_base = OTHER; note = 2'-O-methyluridine-3'-phosphate
  modified_base 13: mod_base = OTHER; note = 2'-O-methylguanosine-3'-phosphate
  modified_base 14: mod_base = OTHER; note = 2'-O-methyluridine-3'-phosphate
  modified_base 15: mod_base = OTHER; note = 2'-O-methylguanosine-3'-phosphate
  modified_base 16: mod_base = OTHER; note = 2'-O-methyladenosine-3'-phosphate
  modified_base 17: mod_base = OTHER; note = 2'-O-methyladenosine-3'-phosphate
  modified_base 18: mod_base = OTHER; note = 2'-O-methyladenosine-3'-phosphate
  modified_base 19: mod_base = OTHER; note = 2'-O-methylguanosine-3'-phosphate
  modified_base 20: mod_base = OTHER; note = 2'-O-methyluridine-3'-phosphate
  modified_base 21: mod_base = OTHER; note = 2'-O-methyladenosine-3'-phosphate ((2S,4R)-1-[29-[[2-(acetylamino)-2-deoxy-beta-D-galactopyra nosyl]oxy]-14,14-bis[[3-[[3-[[5-[[2-(acetylamino)-2-deoxy-b eta-D-galactopyranosyl]oxy]-1-oxopentyl]amino]propyl]amino] -3-oxopropoxy]methyl]-1,12,19,25-tetraoxo-16-oxa-13,20,24-t riazanonacos-1-yl]-4-hydroxy-2-pyrrolidinyl)methyl ester
gggtgccagaatgtgaaagta

SEQ ID NO: 266 - RNA, 21 nt, synthetic construct
  source 1..21: mol_type = other RNA
  modified_base 1: mod_base = OTHER; note = 2'-O-methyluridine-3'-phosphorothioate
  modified_base 2: mod_base = OTHER; note = 2'-O-methylcytidine-3'-phosphorothioate
  modified_base 3: mod_base = OTHER; note = 2'-O-methyladenosine-3'-phosphate
  modified_base 4: mod_base = OTHER; note = 2'-O-methyladenosine-3'-phosphate
  modified_base 5: mod_base = OTHER; note = 2'-O-methyluridine-3'-phosphate
  modified_base 6: mod_base = OTHER; note = 2'-O-methylguanosine-3'-phosphate
  modified_base 7: mod_base = OTHER; note = 2'-deoxy-2'-fluoroguanosine-3'-phosphate
  modified_base 8: mod_base = OTHER; note = 2'-O-methylguanosine-3'-phosphate
  modified_base 9: mod_base = OTHER; note = 2'-deoxy-2'-fluorouridine-3'-phosphate
  modified_base 10: mod_base = OTHER; note = 2'-deoxy-2'-fluoroguanosine-3'-phosphate
  modified_base 11: mod_base = OTHER; note = 2'-deoxy-2'-fluorouridine-3'-phosphate
  modified_base 12: mod_base = OTHER; note = 2'-O-methylcytidine-3'-phosphate
  modified_base 13: mod_base = OTHER; note = 2'-O-methylcytidine-3'-phosphate
  modified_base 14: mod_base = OTHER; note = 2'-O-methyluridine-3'-phosphate
  modified_base 15: mod_base = OTHER; note = 2'-O-methyladenosine-3'-phosphate
  modified_base 16: mod_base = OTHER; note = 2'-O-methylguanosine-3'-phosphate
  modified_base 17: mod_base = OTHER; note = 2'-O-methylguanosine-3'-phosphate
  modified_base 18: mod_base = OTHER; note = 2'-O-methyladenosine-3'-phosphate
  modified_base 19: mod_base = OTHER; note = 2'-O-methyladenosine-3'-phosphate
  modified_base 20: mod_base = OTHER; note = 2'-O-methylcytidine-3'-phosphate
  modified_base 21: mod_base = OTHER; note = 2'-O-methyladenosine-3'-phosphate ((2S,4R)-1-[29-[[2-(acetylamino)-2-deoxy-beta-D-galactopyra nosyl]oxy]-14,14-bis[[3-[[3-[[5-[[2-(acetylamino)-2-deoxy-b eta-D-galactopyranosyl]oxy]-1-oxopentyl]amino]propyl]amino] -3-oxopropoxy]methyl]-1,12,19,25-tetraoxo-16-oxa-13,20,24-t riazanonacos-1-yl]-4-hydroxy-2-pyrrolidinyl)methyl ester
tcaatgggtgtcctaggaaca

SEQ ID NO: 267 - RNA, 21 nt, synthetic construct
  source 1..21: mol_type = other RNA
  modified_base 1: mod_base = OTHER; note = 2'-O-methyladenosine-3'-phosphorothioate
  modified_base 2: mod_base = OTHER; note = 2'-O-methyladenosine-3'-phosphorothioate
  modified_base 3: mod_base = OTHER; note = 2'-O-methyladenosine-3'-phosphate
  modified_base 4: mod_base = OTHER; note = 2'-O-methylguanosine-3'-phosphate
  modified_base 5: mod_base = OTHER; note = 2'-O-methyluridine-3'-phosphate
  modified_base 6: mod_base = OTHER; note = 2'-O-methylcytidine-3'-phosphate
  modified_base 7: mod_base = OTHER; note = 2'-deoxy-2'-fluoroadenosine-3'-phosphate
  modified_base 8: mod_base = OTHER; note = 2'-O-methyluridine-3'-phosphate
  modified_base 9: mod_base = OTHER; note = 2'-deoxy-2'-fluorocytidine-3'-phosphate
  modified_base 10: mod_base = OTHER; note = 2'-deoxy-2'-fluoroguanosine-3'-phosphate
  modified_base 11: mod_base = OTHER; note = 2'-deoxy-2'-fluoroadenosine-3'-phosphate
  modified_base 12: mod_base = OTHER; note = 2'-O-methylcytidine-3'-phosphate
  modified_base 13: mod_base = OTHER; note = 2'-O-methyladenosine-3'-phosphate
  modified_base 14: mod_base = OTHER; note = 2'-O-methyladenosine-3'-phosphate
  modified_base 15: mod_base = OTHER; note = 2'-O-methylguanosine-3'-phosphate
  modified_base 16: mod_base = OTHER; note = 2'-O-methyladenosine-3'-phosphate
  modified_base 17: mod_base = OTHER; note = 2'-O-methylcytidine-3'-phosphate
  modified_base 18: mod_base = OTHER; note = 2'-O-methyladenosine-3'-phosphate
  modified_base 19: mod_base = OTHER; note = 2'-O-methyluridine-3'-phosphate
  modified_base 20: mod_base = OTHER; note = 2'-O-methyluridine-3'-phosphate
  modified_base 21: mod_base = OTHER; note = 2'-O-methyladenosine-3'-phosphate ((2S,4R)-1-[29-[[2-(acetylamino)-2-deoxy-beta-D-galactopyra nosyl]oxy]-14,14-bis[[3-[[3-[[5-[[2-(acetylamino)-2-deoxy-b eta-D-galactopyranosyl]oxy]-1-oxopentyl]amino]propyl]amino] -3-oxopropoxy]methyl]-1,12,19,25-tetraoxo-16-oxa-13,20,24-t riazanonacos-1-yl]-4-hydroxy-2-pyrrolidinyl)methyl ester
aaagtcatcgacaagacatta

SEQ ID NO: 268 - RNA, 21 nt, synthetic construct
  source 1..21: mol_type = other RNA
  modified_base 1: mod_base = OTHER; note = 2'-O-methyladenosine-3'-phosphorothioate
  modified_base 2: mod_base = OTHER; note = 2'-O-methyluridine-3'-phosphorothioate
  modified_base 3: mod_base = OTHER; note = 2'-O-methyluridine-3'-phosphate
  modified_base 4: mod_base = OTHER; note = 2'-O-methyluridine-3'-phosphate
  modified_base 5: mod_base = OTHER; note = 2'-O-methyluridine-3'-phosphate
  modified_base 6: mod_base = OTHER; note = 2'-O-methylguanosine-3'-phosphate
  modified_base 7: mod_base = OTHER; note = 2'-deoxy-2'-fluoroadenosine-3'-phosphate
  modified_base 8: mod_base = OTHER; note = 2'-O-methylguanosine-3'-phosphate
  modified_base 9: mod_base = OTHER; note = 2'-deoxy-2'-fluoroadenosine-3'-phosphate
  modified_base 10: mod_base = OTHER; note = 2'-deoxy-2'-fluoroguanosine-3'-phosphate
  modified_base 11: mod_base = OTHER; note = 2'-deoxy-2'-fluoroguanosine-3'-phosphate
  modified_base 12: mod_base = OTHER; note = 2'-O-methyluridine-3'-phosphate
  modified_base 13: mod_base = OTHER; note = 2'-O-methylguanosine-3'-phosphate
  modified_base 14: mod_base = OTHER; note = 2'-O-methyladenosine-3'-phosphate
  modified_base 15: mod_base = OTHER; note = 2'-O-methyluridine-3'-phosphate
  modified_base 16: mod_base = OTHER; note = 2'-O-methylguanosine-3'-phosphate
  modified_base 17: mod_base = OTHER; note = 2'-O-methyladenosine-3'-phosphate
  modified_base 18: mod_base = OTHER; note = 2'-O-methyluridine-3'-phosphate
  modified_base 19: mod_base = OTHER; note = 2'-O-methylguanosine-3'-phosphate
  modified_base 20: mod_base = OTHER; note = 2'-O-methylcytidine-3'-phosphate
  modified_base 21: mod_base = OTHER; note = 2'-O-methyladenosine-3'-phosphate ((2S,4R)-1-[29-[[2-(acetylamino)-2-deoxy-beta-D-galactopyra nosyl]oxy]-14,14-bis[[3-[[3-[[5-[[2-(acetylamino)-2-deoxy-b eta-D-galactopyranosyl]oxy]-1-oxopentyl]amino]propyl]amino] -3-oxopropoxy]methyl]-1,12,19,25-tetraoxo-16-oxa-13,20,24-t riazanonacos-1-yl]-4-hydroxy-2-pyrrolidinyl)methyl ester
attttgagaggtgatgatgca

SEQ ID NO: 269 - RNA, 21 nt, synthetic construct
  source 1..21: mol_type = other RNA
  modified_base 1: mod_base = OTHER; note = 2'-O-methyladenosine-3'-phosphorothioate
  modified_base 2: mod_base = OTHER; note = 2'-O-methyluridine-3'-phosphorothioate
  modified_base 3: mod_base = OTHER; note = 2'-O-methylcytidine-3'-phosphate
  modified_base 4: mod_base = OTHER; note = 2'-O-methylguanosine-3'-phosphate
  modified_base 5: mod_base = OTHER; note = 2'-O-methyladenosine-3'-phosphate
  modified_base 6: mod_base = OTHER; note = 2'-O-methylcytidine-3'-phosphate
  modified_base 7: mod_base = OTHER; note = 2'-deoxy-2'-fluoroadenosine-3'-phosphate
  modified_base 8: mod_base = OTHER; note = 2'-O-methyladenosine-3'-phosphate
  modified_base 9: mod_base = OTHER; note = 2'-deoxy-2'-fluoroguanosine-3'-phosphate
  modified_base 10: mod_base = OTHER; note = 2'-deoxy-2'-fluoroadenosine-3'-phosphate
  modified_base 11: mod_base = OTHER; note = 2'-deoxy-2'-fluorocytidine-3'-phosphate
  modified_base 12: mod_base = OTHER; note = 2'-O-methyladenosine-3'-phosphate
  modified_base 13: mod_base = OTHER; note = 2'-O-methyluridine-3'-phosphate
  modified_base 14: mod_base = OTHER; note = 2'-O-methyluridine-3'-phosphate
  modified_base 15: mod_base = OTHER; note = 2'-O-methylguanosine-3'-phosphate
  modified_base 16: mod_base = OTHER; note = 2'-O-methylguanosine-3'-phosphate
  modified_base 17: mod_base = OTHER; note = 2'-O-methyluridine-3'-phosphate
  modified_base 18: mod_base = OTHER; note = 2'-O-methylguanosine-3'-phosphate
  modified_base 19: mod_base = OTHER; note = 2'-O-methyladenosine-3'-phosphate
  modified_base 20: mod_base = OTHER; note = 2'-O-methylguanosine-3'-phosphate
  modified_base 21: mod_base = OTHER; note = 2'-O-methyladenosine-3'-phosphate ((2S,4R)-1-[29-[[2-(acetylamino)-2-deoxy-beta-D-galactopyra nosyl]oxy]-14,14-bis[[3-[[3-[[5-[[2-(acetylamino)-2-deoxy-b eta-D-galactopyranosyl]oxy]-1-oxopentyl]amino]propyl]amino] -3-oxopropoxy]methyl]-1,12,19,25-tetraoxo-16-oxa-13,20,24-t riazanonacos-1-yl]-4-hydroxy-2-pyrrolidinyl)methyl ester
atcgacaagacattggtgaga

SEQ ID NO: 270 - RNA, 21 nt, synthetic construct
  source 1..21: mol_type = other RNA
  modified_base 1: mod_base = OTHER; note = 2'-O-methylguanosine-3'-phosphorothioate
  modified_base 2: mod_base = OTHER; note = 2'-O-methylguanosine-3'-phosphorothioate
  modified_base 3: mod_base = OTHER; note = 2'-O-methyluridine-3'-phosphate
  modified_base 4: mod_base = OTHER; note = 2'-O-methylguanosine-3'-phosphate
  modified_base 5: mod_base = OTHER; note = 2'-O-methylcytidine-3'-phosphate
  modified_base 6: mod_base = OTHER; note = 2'-O-methylcytidine-3'-phosphate
  modified_base 7: mod_base = OTHER; note = 2'-deoxy-2'-fluoroadenosine-3'-phosphate
  modified_base 8: mod_base = OTHER; note = 2'-O-methylguanosine-3'-phosphate
  modified_base 9: mod_base = OTHER; note = 2'-deoxy-2'-fluoroadenosine-3'-phosphate
  modified_base 10: mod_base = OTHER; note = 2'-deoxy-2'-fluoroadenosine-3'-phosphate
  modified_base 11: mod_base = OTHER; note = 2'-deoxy-2'-fluorouridine-3'-phosphate
  modified_base 12: mod_base = OTHER; note = 2'-O-methylguanosine-3'-phosphate
  modified_base 13: mod_base = OTHER; note = 2'-O-methyluridine-3'-phosphate
  modified_base 14: mod_base = OTHER; note = 2'-O-methylguanosine-3'-phosphate
  modified_base 15: mod_base = OTHER; note = 2'-O-methyladenosine-3'-phosphate
  modified_base 16: mod_base = OTHER; note = 2'-O-methyladenosine-3'-phosphate
  modified_base 17: mod_base = OTHER; note = 2'-O-methyladenosine-3'-phosphate
  modified_base 18: mod_base = OTHER; note = 2'-O-methylguanosine-3'-phosphate
  modified_base 19: mod_base = OTHER; note = 2'-O-methyluridine-3'-phosphate
  modified_base 20: mod_base = OTHER; note = 2'-O-methylcytidine-3'-phosphate
  modified_base 21: mod_base = OTHER; note = 2'-O-methyladenosine-3'-phosphate ((2S,4R)-1-[29-[[2-(acetylamino)-2-deoxy-beta-D-galactopyra nosyl]oxy]-14,14-bis[[3-[[3-[[5-[[2-(acetylamino)-2-deoxy-b eta-D-galactopyranosyl]oxy]-1-oxopentyl]amino]propyl]amino] -3-oxopropoxy]methyl]-1,12,19,25-tetraoxo-16-oxa-13,20,24-t riazanonacos-1-yl]-4-hydroxy-2-pyrrolidinyl)methyl ester
ggtgccagaatgtgaaagtca

SEQ ID NO: 271 - RNA, 21 nt, synthetic construct
  source 1..21: mol_type = other RNA
  modified_base 1: mod_base = OTHER; note = 2'-O-methylguanosine-3'-phosphorothioate
  modified_base 2: mod_base = OTHER; note = 2'-O-methyladenosine-3'-phosphorothioate
  modified_base 3: mod_base = OTHER; note = 2'-O-methylcytidine-3'-phosphate
  modified_base 4: mod_base = OTHER; note = 2'-O-methyladenosine-3'-phosphate
  modified_base 5: mod_base = OTHER; note = 2'-O-methylguanosine-3'-phosphate
  modified_base 6: mod_base = OTHER; note = 2'-O-methyluridine-3'-phosphate
  modified_base 7: mod_base = OTHER; note = 2'-deoxy-2'-fluoroguanosine-3'-phosphate
  modified_base 8: mod_base = OTHER; note = 2'-O-methylcytidine-3'-phosphate
  modified_base 9: mod_base = OTHER; note = 2'-deoxy-2'-fluoroadenosine-3'-phosphate
  modified_base 10: mod_base = OTHER; note = 2'-deoxy-2'-fluorocytidine-3'-phosphate
  modified_base 11: mod_base = OTHER; note = 2'-deoxy-2'-fluoroadenosine-3'-phosphate
  modified_base 12: mod_base = OTHER; note = 2'-O-methyladenosine-3'-phosphate
  modified_base 13: mod_base = OTHER; note = 2'-O-methyluridine-3'-phosphate
  modified_base 14: mod_base = OTHER; note = 2'-O-methyladenosine-3'-phosphate
  modified_base 15: mod_base = OTHER; note = 2'-O-methyluridine-3'-phosphate
  modified_base 16: mod_base = OTHER; note = 2'-O-methyluridine-3'-phosphate
  modified_base 17: mod_base = OTHER; note = 2'-O-methyluridine-3'-phosphate
  modified_base 18: mod_base = OTHER; note = 2'-O-methyluridine-3'-phosphate
  modified_base 19: mod_base = OTHER; note = 2'-O-methylcytidine-3'-phosphate
  modified_base 20: mod_base = OTHER; note = 2'-O-methylcytidine-3'-phosphate
  modified_base 21: mod_base = OTHER; note = 2'-O-methyladenosine-3'-phosphate ((2S,4R)-1-[29-[[2-(acetylamino)-2-deoxy-beta-D-galactopyra nosyl]oxy]-14,14-bis[[3-[[3-[[5-[[2-(acetylamino)-2-deoxy-b eta-D-galactopyranosyl]oxy]-1-oxopentyl]amino]propyl]amino] -3-oxopropoxy]methyl]-1,12,19,25-tetraoxo-16-oxa-13,20,24-t riazanonacos-1-yl]-4-hydroxy-2-pyrrolidinyl)methyl ester
gacagtgcacaatattttcca

SEQ ID NO: 272 - RNA, 21 nt, synthetic construct
  source 1..21: mol_type = other RNA
  modified_base 1: mod_base = OTHER; note = 2'-O-methyladenosine-3'-phosphorothioate
  modified_base 2: mod_base = OTHER; note = 2'-O-methylcytidine-3'-phosphorothioate
  modified_base 3: mod_base = OTHER; note = 2'-O-methyladenosine-3'-phosphate
  modified_base 4: mod_base = OTHER; note = 2'-O-methyladenosine-3'-phosphate
  modified_base 5: mod_base = OTHER; note = 2'-O-methyladenosine-3'-phosphate
  modified_base 6: mod_base = OTHER; note = 2'-O-methylguanosine-3'-phosphate
  modified_base 7: mod_base = OTHER; note = 2'-deoxy-2'-fluoroadenosine-3'-phosphate
  modified_base 8: mod_base = OTHER; note = 2'-O-methylguanosine-3'-phosphate
  modified_base 9: mod_base = OTHER; note = 2'-deoxy-2'-fluoroadenosine-3'-phosphate
  modified_base 10: mod_base = OTHER; note = 2'-deoxy-2'-fluorocytidine-3'-phosphate
  modified_base 11: mod_base = OTHER; note = 2'-deoxy-2'-fluoroadenosine-3'-phosphate
  modified_base 12: mod_base = OTHER; note = 2'-O-methylcytidine-3'-phosphate
  modified_base 13: mod_base = OTHER; note = 2'-O-methyluridine-3'-phosphate
  modified_base 14: mod_base = OTHER; note = 2'-O-methylguanosine-3'-phosphate
  modified_base 15: mod_base = OTHER; note = 2'-O-methyluridine-3'-phosphate
  modified_base 16: mod_base = OTHER; note = 2'-O-methylguanosine-3'-phosphate
  modified_base 17: mod_base = OTHER; note = 2'-O-methylcytidine-3'-phosphate
  modified_base 18: mod_base = OTHER; note = 2'-O-methyladenosine-3'-phosphate
  modified_base 19: mod_base = OTHER; note = 2'-O-methylguanosine-3'-phosphate
  modified_base 20: mod_base = OTHER; note = 2'-O-methyladenosine-3'-phosphate
  modified_base 21: mod_base = OTHER; note = 2'-O-methyladenosine-3'-phosphate ((2S,4R)-1-[29-[[2-(acetylamino)-2-deoxy-beta-D-galactopyra nosyl]oxy]-14,14-bis[[3-[[3-[[5-[[2-(acetylamino)-2-deoxy-b eta-D-galactopyranosyl]oxy]-1-oxopentyl]amino]propyl]amino] -3-oxopropoxy]methyl]-1,12,19,25-tetraoxo-16-oxa-13,20,24-t riazanonacos-1-yl]-4-hydroxy-2-pyrrolidinyl)methyl ester
acaaagagacactgtgcagaa

SEQ ID NO: 273 - RNA, 21 nt, synthetic construct
  source 1..21: mol_type = other RNA
  modified_base 1: mod_base = OTHER; note = 2'-O-methyluridine-3'-phosphorothioate
  modified_base 2: mod_base = OTHER; note = 2'-O-methyluridine-3'-phosphorothioate
  modified_base 3: mod_base = OTHER; note = 2'-O-methyluridine-3'-phosphate
  modified_base 4: mod_base = OTHER; note = 2'-O-methyluridine-3'-phosphate
  modified_base 5: mod_base = OTHER; note = 2'-O-methylcytidine-3'-phosphate
  modified_base 6: mod_base = OTHER; note = 2'-O-methyladenosine-3'-phosphate
  modified_base 7: mod_base = OTHER; note = 2'-deoxy-2'-fluoroadenosine-3'-phosphate
  modified_base 8: mod_base = OTHER; note = 2'-O-methyluridine-3'-phosphate
  modified_base 9: mod_base = OTHER; note = 2'-deoxy-2'-fluoroguanosine-3'-phosphate
  modified_base 10: mod_base = OTHER; note = 2'-deoxy-2'-fluoroguanosine-3'-phosphate
  modified_base 11: mod_base = OTHER; note = 2'-deoxy-2'-fluoroguanosine-3'-phosphate
  modified_base 12: mod_base = OTHER; note = 2'-O-methyluridine-3'-phosphate
  modified_base 13: mod_base = OTHER; note = 2'-O-methylguanosine-3'-phosphate
  modified_base 14: mod_base = OTHER; note = 2'-O-methyluridine-3'-phosphate
  modified_base 15: mod_base = OTHER; note = 2'-O-methylcytidine-3'-phosphate
  modified_base 16: mod_base = OTHER; note = 2'-O-methylcytidine-3'-phosphate
  modified_base 17: mod_base = OTHER; note = 2'-O-methyluridine-3'-phosphate
  modified_base 18: mod_base = OTHER; note = 2'-O-methyladenosine-3'-phosphate
  modified_base 19: mod_base = OTHER; note = 2'-O-methylguanosine-3'-phosphate
  modified_base 20: mod_base = OTHER; note = 2'-O-methylguanosine-3'-phosphate
  modified_base 21: mod_base = OTHER; note = 2'-O-methyladenosine-3'-phosphate ((2S,4R)-1-[29-[[2-(acetylamino)-2-deoxy-beta-D-galactopyra nosyl]oxy]-14,14-bis[[3-[[3-[[5-[[2-(acetylamino)-2-deoxy-b eta-D-galactopyranosyl]oxy]-1-oxopentyl]amino]propyl]amino] -3-oxopropoxy]methyl]-1,12,19,25-tetraoxo-16-oxa-13,20,24-t riazanonacos-1-yl]-4-hydroxy-2-pyrrolidinyl)methyl ester
ttttcaatgggtgtcctagga

SEQ ID NO: 274 - RNA, 21 nt, synthetic construct
  source 1..21: mol_type = other RNA
  modified_base 1: mod_base = OTHER; note = 2'-O-methylcytidine-3'-phosphorothioate
  modified_base 2: mod_base = OTHER; note = 2'-O-methylcytidine-3'-phosphorothioate
  modified_base 3: mod_base = OTHER; note = 2'-O-methylguanosine-3'-phosphate
  modified_base 4: mod_base = OTHER; note = 2'-O-methyluridine-3'-phosphate
  modified_base 5: mod_base = OTHER; note = 2'-O-methyluridine-3'-phosphate
  modified_base 6: mod_base = OTHER; note = 2'-O-methyluridine-3'-phosphate
  modified_base 7: mod_base = OTHER; note = 2'-deoxy-2'-fluorocytidine-3'-phosphate
  modified_base 8: mod_base = OTHER; note = 2'-O-methylcytidine-3'-phosphate
  modified_base 9: mod_base = OTHER; note = 2'-deoxy-2'-fluoroadenosine-3'-phosphate
  modified_base 10: mod_base = OTHER; note = 2'-deoxy-2'-fluoroadenosine-3'-phosphate
  modified_base 11: mod_base = OTHER; note = 2'-deoxy-2'-fluoroguanosine-3'-phosphate
  modified_base 12: mod_base = OTHER; note = 2'-O-methyladenosine-3'-phosphate
  modified_base 13: mod_base = OTHER; note = 2'-O-methyluridine-3'-phosphate
  modified_base 14: mod_base = OTHER; note = 2'-O-methylcytidine-3'-phosphate
  modified_base 15: mod_base = OTHER; note = 2'-O-methyluridine-3'-phosphate
  modified_base 16: mod_base = OTHER; note = 2'-O-methylguanosine-3'-phosphate
  modified_base 17: mod_base = OTHER; note = 2'-O-methyladenosine-3'-phosphate
  modified_base 18: mod_base = OTHER; note = 2'-O-methylcytidine-3'-phosphate
  modified_base 19: mod_base = OTHER; note = 2'-O-methyladenosine-3'-phosphate
  modified_base 20: mod_base = OTHER; note = 2'-O-methylguanosine-3'-phosphate
  modified_base 21: mod_base = OTHER; note = 2'-O-methyluridine-3'-phosphate ((2S,4R)-1-[29-[[2-(acetylamino)-2-deoxy-beta-D-galactopyra nosyl]oxy]-14,14-bis[[3-[[3-[[5-[[2-(acetylamino)-2-deoxy-b eta-D-galactopyranosyl]oxy]-1-oxopentyl]amino]propyl]amino] -3-oxopropoxy]methyl]-1,12,19,25-tetraoxo-16-oxa-13,20,24-t riazanonacos-1-yl]-4-hydroxy-2-pyrrolidinyl)methyl ester
ccgtttccaagatctgacagt

SEQ ID NO: 275 - RNA, 21 nt, synthetic construct
  source 1..21: mol_type = other RNA
  modified_base 1: mod_base = OTHER; note = 2'-O-methyladenosine-3'-phosphorothioate
  modified_base 2: mod_base = OTHER; note = 2'-O-methylguanosine-3'-phosphorothioate
  modified_base 3: mod_base = OTHER; note = 2'-O-methylguanosine-3'-phosphate
  modified_base 4: mod_base = OTHER; note = 2'-O-methylguanosine-3'-phosphate
  modified_base 5: mod_base = OTHER; note = 2'-O-methylguanosine-3'-phosphate
  modified_base 6: mod_base = OTHER; note = 2'-O-methylguanosine-3'-phosphate
  modified_base 7: mod_base = OTHER; note = 2'-deoxy-2'-fluoroadenosine-3'-phosphate
  modified_base 8: mod_base = OTHER; note = 2'-O-methylguanosine-3'-phosphate
  modified_base 9: mod_base = OTHER; note = 2'-deoxy-2'-fluoroadenosine-3'-phosphate
  modified_base 10: mod_base = OTHER; note = 2'-deoxy-2'-fluoroadenosine-3'-phosphate
  modified_base 11: mod_base = OTHER; note = 2'-deoxy-2'-fluoroadenosine-3'-phosphate
  modified_base 12: mod_base = OTHER; note = 2'-O-methylguanosine-3'-phosphate
  modified_base 13: mod_base = OTHER; note = 2'-O-methylguanosine-3'-phosphate
  modified_base 14: mod_base = OTHER; note = 2'-O-methyluridine-3'-phosphate
  modified_base 15: mod_base = OTHER; note = 2'-O-methylguanosine-3'-phosphate
  modified_base 16: mod_base = OTHER; note = 2'-O-methyluridine-3'-phosphate
  modified_base 17: mod_base = OTHER; note = 2'-O-methyluridine-3'-phosphate
  modified_base 18: mod_base = OTHER; note = 2'-O-methylcytidine-3'-phosphate
  modified_base 19: mod_base = OTHER; note = 2'-O-methyladenosine-3'-phosphate
  modified_base 20: mod_base = OTHER; note = 2'-O-methyladenosine-3'-phosphate
  modified_base 21: mod_base = OTHER; note = 2'-O-methyladenosine-3'-phosphate ((2S,4R)-1-[29-[[2-(acetylamino)-2-deoxy-beta-D-galactopyra nosyl]oxy]-14,14-bis[[3-[[3-[[5-[[2-(acetylamino)-2-deoxy-b eta-D-galactopyranosyl]oxy]-1-oxopentyl]amino]propyl]amino] -3-oxopropoxy]methyl]-1,12,19,25-tetraoxo-16-oxa-13,20,24-t riazanonacos-1-yl]-4-hydroxy-2-pyrrolidinyl)methyl ester
agggggagaaaggtgttcaaa

SEQ ID NO: 276 - RNA, 21 nt, synthetic construct
  source 1..21: mol_type = other RNA
  modified_base 1: mod_base = OTHER; note = 2'-O-methyladenosine-3'-phosphorothioate
  modified_base 2: mod_base = OTHER; note = 2'-O-methylguanosine-3'-phosphorothioate
  modified_base 3: mod_base = OTHER; note = 2'-O-methyluridine-3'-phosphate
  modified_base 4: mod_base = OTHER; note = 2'-O-methylcytidine-3'-phosphate
  modified_base 5: mod_base = OTHER; note = 2'-O-methyladenosine-3'-phosphate
  modified_base 6: mod_base = OTHER; note = 2'-O-methyluridine-3'-phosphate
  modified_base 7: mod_base = OTHER; note = 2'-deoxy-2'-fluorocytidine-3'-phosphate
  modified_base 8: mod_base = OTHER; note = 2'-O-methylguanosine-3'-phosphate
  modified_base 9: mod_base = OTHER; note = 2'-deoxy-2'-fluoroadenosine-3'-phosphate
  modified_base 10: mod_base = OTHER; note = 2'-deoxy-2'-fluorocytidine-3'-phosphate
  modified_base 11: mod_base = OTHER; note = 2'-deoxy-2'-fluoroadenosine-3'-phosphate
  modified_base 12: mod_base = OTHER; note = 2'-O-methyladenosine-3'-phosphate
  modified_base 13: mod_base = OTHER; note = 2'-O-methylguanosine-3'-phosphate
  modified_base 14: mod_base = OTHER; note = 2'-O-methyladenosine-3'-phosphate
  modified_base 15: mod_base = OTHER; note = 2'-O-methylcytidine-3'-phosphate
  modified_base 16: mod_base = OTHER; note = 2'-O-methyladenosine-3'-phosphate
  modified_base 17: mod_base = OTHER; note = 2'-O-methyluridine-3'-phosphate
  modified_base 18: mod_base = OTHER; note = 2'-O-methyluridine-3'-phosphate
  modified_base 19: mod_base = OTHER; note = 2'-O-methylguanosine-3'-phosphate
  modified_base 20: mod_base = OTHER; note = 2'-O-methylguanosine-3'-phosphate
  modified_base 21: mod_base = OTHER; note = 2'-O-methyluridine-3'-phosphate ((2S,4R)-1-[29-[[2-(acetylamino)-2-deoxy-beta-D-galactopyra nosyl]oxy]-14,14-bis[[3-[[3-[[5-[[2-(acetylamino)-2-deoxy-b eta-D-galactopyranosyl]oxy]-1-oxopentyl]amino]propyl]amino] -3-oxopropoxy]methyl]-1,12,19,25-tetraoxo-16-oxa-13,20,24-t riazanonacos-1-yl]-4-hydroxy-2-pyrrolidinyl)methyl ester
agtcatcgacaagacattggt

SEQ ID NO: 277 - RNA, 23 nt, synthetic construct
  source 1..23: mol_type = other RNA
  modified_base 1: mod_base = OTHER; note = 2'-O-methyluridine-3'-phosphorothioate
  modified_base 2: mod_base = OTHER; note = 2'-deoxy-2'-fluorouridine-3'-phosphorothioate
  modified_base 3: mod_base = OTHER; note = 2'-O-methylguanosine-3'-phosphate
  modified_base 4: mod_base = OTHER; note = 2'-deoxy-2'-fluorouridine-3'-phosphate
  modified_base 5: mod_base = OTHER; note = 2'-O-methylcytidine-3'-phosphate
  modified_base 6: mod_base = OTHER; note = 2'-deoxy-2'-fluoroguanosine-3'-phosphate
  modified_base 7: mod_base = OTHER; note = 2'-O-methyladenosine-3'-phosphate
  modified_base 8: mod_base = OTHER; note = 2'-deoxy-2'-fluorouridine-3'-phosphate
  modified_base 9: mod_base = OTHER; note = 2'-O-methylguanosine-3'-phosphate
  modified_base 10: mod_base = OTHER; note = 2'-deoxy-2'-fluoroadenosine-3'-phosphate
  modified_base 11: mod_base = OTHER; note = 2'-O-methylcytidine-3'-phosphate
  modified_base 12: mod_base = OTHER; note = 2'-O-methyluridine-3'-phosphate
  modified_base 13: mod_base = OTHER; note = 2'-O-methyluridine-3'-phosphate
  modified_base 14: mod_base = OTHER; note = 2'-deoxy-2'-fluorouridine-3'-phosphate
  modified_base 15: mod_base = OTHER; note = 2'-O-methylcytidine-3'-phosphate
  modified_base 16: mod_base = OTHER; note = 2'-deoxy-2'-fluoroadenosine-3'-phosphate
  modified_base 17: mod_base = OTHER; note = 2'-O-methylcytidine-3'-phosphate
  modified_base 18: mod_base = OTHER; note = 2'-deoxy-2'-fluoroadenosine-3'-phosphate
  modified_base 19: mod_base = OTHER; note = 2'-O-methyluridine-3'-phosphate
  modified_base 20: mod_base = OTHER; note = 2'-deoxy-2'-fluorouridine-3'-phosphate
  modified_base 21: mod_base = OTHER; note = 2'-O-methylcytidine-3'-phosphorothioate
  modified_base 22: mod_base = OTHER; note = 2'-O-methyluridine-3'-phosphorothioate
  modified_base 23: mod_base = OTHER; note = 2'-O-methylguanosine
ttgtcgatgactttcacattctg

SEQ ID NO: 278 - RNA, 23 nt, synthetic construct
  source 1..23: mol_type = other RNA
  modified_base 1: mod_base = OTHER; note = 2'-O-methyluridine-3'-phosphorothioate 5'phosphate
  modified_base 2: mod_base = OTHER; note = 2'-deoxy-2'-fluorouridine-3'-phosphorothioate
  modified_base 3: mod_base = OTHER; note = 2'-O-methylguanosine-3'-phosphate
  modified_base 4: mod_base = OTHER; note = 2'-deoxy-2'-fluorouridine-3'-phosphate
  modified_base 5: mod_base = OTHER; note = 2'-O-methylcytidine-3'-phosphate
  modified_base 6: mod_base = OTHER; note = 2'-deoxy-2'-fluoroguanosine-3'-phosphate
  modified_base 7: mod_base = OTHER; note = 2'-O-methyladenosine-3'-phosphate
  modified_base 8: mod_base = OTHER; note = 2'-deoxy-2'-fluorouridine-3'-phosphate
  modified_base 9: mod_base = OTHER; note = 2'-O-methylguanosine-3'-phosphate
  modified_base 10: mod_base = OTHER; note = 2'-deoxy-2'-fluoroadenosine-3'-phosphate
  modified_base 11: mod_base = OTHER; note = 2'-O-methylcytidine-3'-phosphate
  modified_base 12: mod_base = OTHER; note = 2'-O-methyluridine-3'-phosphate
  modified_base 13: mod_base = OTHER; note = 2'-O-methyluridine-3'-phosphate
  modified_base 14: mod_base = OTHER; note = 2'-deoxy-2'-fluorouridine-3'-phosphate
  modified_base 15: mod_base = OTHER; note = 2'-O-methylcytidine-3'-phosphate
  modified_base 16: mod_base = OTHER; note = 2'-deoxy-2'-fluoroadenosine-3'-phosphate
  modified_base 17: mod_base = OTHER; note = 2'-O-methylcytidine-3'-phosphate
  modified_base 18: mod_base = OTHER; note = 2'-deoxy-2'-fluoroadenosine-3'-phosphate
  modified_base 19: mod_base = OTHER; note = 2'-O-methyluridine-3'-phosphate
  modified_base 20: mod_base = OTHER; note = 2'-deoxy-2'-fluorouridine-3'-phosphate
  modified_base 21: mod_base = OTHER; note = 2'-O-methylcytidine-3'-phosphorothioate
  modified_base 22: mod_base = OTHER; note = 2'-O-methyluridine-3'-phosphorothioate
  modified_base 23: mod_base = OTHER; note = 2'-O-methylguanosine
ttgtcgatgactttcacattctg

SEQ ID NO: 279 - RNA, 23 nt, synthetic construct
  source 1..23: mol_type = other RNA
  modified_base 1: mod_base = OTHER; note = 2'-O-methyluridine-3'-phosphorothioate
  modified_base 2: mod_base = OTHER; note = 2'-deoxy-2'-fluorouridine-3'-phosphorothioate
  modified_base 3: mod_base = OTHER; note = 2'-O-methylguanosine-3'-phosphate
  modified_base 4: mod_base = OTHER; note = 2'-deoxy-2'-fluorouridine-3'-phosphate
  modified_base 5: mod_base = OTHER; note = 2'-O-methylcytidine-3'-phosphate
  modified_base 6: mod_base = OTHER; note = 2'-deoxy-2'-fluoroguanosine-3'-phosphate
  modified_base 7: mod_base = OTHER; note = 2'-O-methyladenosine-3'-phosphate
  modified_base 8: mod_base = OTHER; note = 2'-deoxy-2'-fluorouridine-3'-phosphate
  modified_base 9: mod_base = OTHER; note = 2'-O-methylguanosine-3'-phosphate
  modified_base 10: mod_base = OTHER; note = 2'-deoxy-2'-fluoroadenosine-3'-phosphate
  modified_base 11: mod_base = OTHER; note = 2'-O-methylcytidine-3'-phosphate
  modified_base 12: mod_base = OTHER; note = 2'-O-methyluridine-3'-phosphate
  modified_base 13: mod_base = OTHER; note = 2'-O-methyluridine-3'-phosphate
  modified_base 14: mod_base = OTHER; note = 2'-deoxy-2'-fluorouridine-3'-phosphate
  modified_base 15: mod_base = OTHER; note = 2'-O-methylcytidine-3'-phosphate
  modified_base 16: mod_base = OTHER; note = 2'-deoxy-2'-fluoroadenosine-3'-phosphate
  modified_base 17: mod_base = OTHER; note = 2'-O-methylcytidine-3'-phosphate
  modified_base 18: mod_base = OTHER; note = 2'-deoxy-2'-fluoroadenosine-3'-phosphate
  modified_base 19: mod_base = OTHER; note = 2'-O-methyluridine-3'-phosphate
  modified_base 20: mod_base = OTHER; note = 2'-deoxy-2'-fluorouridine-3'-phosphate
  modified_base 21: mod_base = OTHER; note = 2'-O-methylcytidine-3'-phosphorothioate
  modified_base 22: mod_base = OTHER; note = 2'-O-methyluridine-3'-phosphorothioate
  modified_base 23: mod_base = OTHER; note = 2'-O-methylguanosine
ttgtcgatgactttcacattctg

SEQ ID NO: 280 - RNA, 23 nt, synthetic construct
  source 1..23: mol_type = other RNA
  modified_base 1: mod_base = OTHER; note = 2'-O-methyluridine-3'-phosphorothioate
  modified_base 2: mod_base = OTHER; note = 2'-deoxy-2'-fluorouridine-3'-phosphorothioate
  modified_base 3: mod_base = OTHER; note = 2'-O-methylguanosine-3'-phosphate
  modified_base 4: mod_base = OTHER; note = 2'-deoxy-2'-fluorouridine-3'-phosphate
  modified_base 5: mod_base = OTHER; note = 2'-O-methylcytidine-3'-phosphate
  modified_base 6: mod_base = OTHER; note = 2'-deoxy-2'-fluoroguanosine-3'-phosphate
  modified_base 7: mod_base = OTHER; note = 2'-O-methyladenosine-3'-phosphate
  modified_base 8: mod_base = OTHER; note = 2'-deoxy-2'-fluorouridine-3'-phosphate
  modified_base 9: mod_base = OTHER; note = 2'-O-methylguanosine-3'-phosphate
  modified_base 10: mod_base = OTHER; note = 2'-deoxy-2'-fluoroadenosine-3'-phosphate
  modified_base 11: mod_base = OTHER; note = 2'-O-methylcytidine-3'-phosphate
  modified_base 12: mod_base = OTHER; note = 2'-O-methyluridine-3'-phosphate
  modified_base 13: mod_base = OTHER; note = 2'-O-methyluridine-3'-phosphate
  modified_base 14: mod_base = OTHER; note = 2'-deoxy-2'-fluorouridine-3'-phosphate
  modified_base 15: mod_base = OTHER; note = 2'-O-methylcytidine-3'-phosphate
  modified_base 16: mod_base = OTHER; note = 2'-deoxy-2'-fluoroadenosine-3'-phosphate
  modified_base 17: mod_base = OTHER; note = 2'-O-methylcytidine-3'-phosphate
  modified_base 18: mod_base = OTHER; note = 2'-deoxy-2'-fluoroadenosine-3'-phosphate
  modified_base 19: mod_base = OTHER; note = 2'-O-methyluridine-3'-phosphate
  modified_base 20: mod_base = OTHER; note = 2'-deoxy-2'-fluorouridine-3'-phosphate
  modified_base 21: mod_base = OTHER; note = 2'-O-methylcytidine-3'-phosphorothioate
  modified_base 22: mod_base = OTHER; note = 2'-O-methyluridine-3'-phosphorothioate
  modified_base 23: mod_base = OTHER; note = 2'-O-methylguanosine
ttgtcgatgactttcacattctg

SEQ ID NO: 281 - RNA, 23 nt, synthetic construct
  source 1..23: mol_type = other RNA
  modified_base 1: mod_base = OTHER; note = 2'-O-methyluridine-3'-phosphorothioate
  modified_base 2: mod_base = OTHER; note = 2'-deoxy-2'-fluorouridine-3'-phosphorothioate
  modified_base 3: mod_base = OTHER; note = 2'-O-methylguanosine-3'-phosphate
  modified_base 4: mod_base = OTHER; note = 2'-deoxy-2'-fluorouridine-3'-phosphate
  modified_base 5: mod_base = OTHER; note = 2'-O-methylcytidine-3'-phosphate
  modified_base 6: mod_base = OTHER; note = 2'-deoxy-2'-fluoroguanosine-3'-phosphate
  modified_base 7: mod_base = OTHER; note = 2'-O-methyladenosine-3'-phosphate
  modified_base 8: mod_base = OTHER; note = 2'-deoxy-2'-fluorouridine-3'-phosphate
  modified_base 9: mod_base = OTHER; note = 2'-O-methylguanosine-3'-phosphate
  modified_base 10: mod_base = OTHER; note = 2'-deoxy-2'-fluoroadenosine-3'-phosphate
  modified_base 11: mod_base = OTHER; note = 2'-O-methylcytidine-3'-phosphate
  modified_base 12: mod_base = OTHER; note = 2'-O-methyluridine-3'-phosphate
  modified_base 13: mod_base = OTHER; note = 2'-O-methyluridine-3'-phosphate
  modified_base 14: mod_base = OTHER; note = 2'-deoxy-2'-fluorouridine-3'-phosphate
  modified_base 15: mod_base = OTHER; note = 2'-O-methylcytidine-3'-phosphate
  modified_base 16: mod_base = OTHER; note = 2'-deoxy-2'-fluoroadenosine-3'-phosphate
  modified_base 17: mod_base = OTHER; note = 2'-O-methylcytidine-3'-phosphate
  modified_base 18: mod_base = OTHER; note = 2'-deoxy-2'-fluoroadenosine-3'-phosphate
  modified_base 19: mod_base = OTHER; note = 2'-O-methyluridine-3'-phosphate
  modified_base 20: mod_base = OTHER; note = 2'-deoxy-2'-fluorouridine-3'-phosphate
  modified_base 21: mod_base = OTHER; note = 2'-O-methylcytidine-3'-phosphorothioate
  modified_base 22: mod_base = OTHER; note = 2'-O-methyluridine-3'-phosphorothioate
  modified_base 23: mod_base = OTHER; note = 2'-O-methylguanosine
ttgtcgatgactttcacattctg

SEQ ID NO: 282 - RNA, 23 nt, synthetic construct
  source 1..23: mol_type = other RNA
  modified_base 1: mod_base = OTHER; note = 2'-O-methyluridine-3'-phosphorothioate
  modified_base 2: mod_base = OTHER; note = 2'-deoxy-2'-fluorouridine-3'-phosphorothioate
  modified_base 3: mod_base = OTHER; note = 2'-O-methylguanosine-3'-phosphate
  modified_base 4: mod_base = OTHER; note = 2'-deoxy-2'-fluorouridine-3'-phosphate
  modified_base 5: mod_base = OTHER; note = 2'-O-methylcytidine-3'-phosphate
  modified_base 6: mod_base = OTHER; note = 2'-deoxy-2'-fluoroguanosine-3'-phosphate
  modified_base 7: mod_base = OTHER; note = 2'-O-methyladenosine-3'-phosphate
  modified_base 8: mod_base = OTHER; note = 2'-deoxy-2'-fluorouridine-3'-phosphate
  modified_base 9: mod_base = OTHER; note = 2'-O-methylguanosine-3'-phosphate
  modified_base 10: mod_base = OTHER; note = 2'-deoxy-2'-fluoroadenosine-3'-phosphate
  modified_base 11: mod_base = OTHER; note = 2'-O-methylcytidine-3'-phosphate
  modified_base 12: mod_base = OTHER; note = 2'-O-methyluridine-3'-phosphate
  modified_base 13: mod_base = OTHER; note = 2'-O-methyluridine-3'-phosphate
  modified_base 14: mod_base = OTHER; note = 2'-deoxy-2'-fluorouridine-3'-phosphate
  modified_base 15: mod_base = OTHER; note = 2'-O-methylcytidine-3'-phosphate
  modified_base 16: mod_base = OTHER; note = 2'-deoxy-2'-fluoroadenosine-3'-phosphate
  modified_base 17: mod_base = OTHER; note = 2'-O-methylcytidine-3'-phosphate
  modified_base 18: mod_base = OTHER; note = 2'-deoxy-2'-fluoroadenosine-3'-phosphate
  modified_base 19: mod_base = OTHER; note = 2'-O-methyluridine-3'-phosphate
  modified_base 20: mod_base = OTHER; note = 2'-deoxy-2'-fluorouridine-3'-phosphate
  modified_base 21: mod_base = OTHER; note = 2'-O-methylcytidine-3'-phosphorothioate
  modified_base 22: mod_base = OTHER; note = 2'-O-methyluridine-3'-phosphorothioate
  modified_base 23: mod_base = OTHER; note = 2'-O-methylguanosine
ttgtcgatgactttcacattctg

SEQ ID NO: 283 - RNA, 23 nt, synthetic construct
  source 1..23: mol_type = other RNA
  modified_base 1: mod_base = OTHER; note = 2'-O-methyluridine-3'-phosphorothioate
  modified_base 2: mod_base = OTHER; note = 2'-deoxy-2'-fluorouridine-3'-phosphorothioate
  modified_base 3: mod_base = OTHER; note = 2'-O-methylguanosine-3'-phosphate
  modified_base 4: mod_base = OTHER; note = 2'-deoxy-2'-fluorouridine-3'-phosphate
  modified_base 5: mod_base = OTHER; note = 2'-O-methylcytidine-3'-phosphate
  modified_base 6: mod_base = OTHER; note = 2'-deoxy-2'-fluoroguanosine-3'-phosphate
  modified_base 7: mod_base = OTHER; note = 2'-O-methyladenosine-3'-phosphate
  modified_base 8: mod_base = OTHER; note = 2'-deoxy-2'-fluorouridine-3'-phosphate
  modified_base 9: mod_base = OTHER; note = 2'-O-methylguanosine-3'-phosphate
  modified_base 10: mod_base = OTHER; note = 2'-deoxy-2'-fluoroadenosine-3'-phosphate
  modified_base 11: mod_base = OTHER; note = 2'-O-methylcytidine-3'-phosphate
  modified_base 12: mod_base = OTHER; note = 2'-O-methyluridine-3'-phosphate
  modified_base 13: mod_base = OTHER; note = 2'-O-methyluridine-3'-phosphate
  modified_base 14: mod_base = OTHER; note = 2'-deoxy-2'-fluorouridine-3'-phosphate
  modified_base 15: mod_base = OTHER; note = 2'-O-methylcytidine-3'-phosphate
  modified_base 16: mod_base = OTHER; note = 2'-deoxy-2'-fluoroadenosine-3'-phosphate
  modified_base 17: mod_base = OTHER; note = 2'-O-methylcytidine-3'-phosphate
  modified_base 18: mod_base = OTHER; note = 2'-deoxy-2'-fluoroadenosine-3'-phosphate
  modified_base 19: mod_base = OTHER; note = 2'-O-methyluridine-3'-phosphate
  modified_base 20: mod_base = OTHER; note = 2'-deoxy-2'-fluorouridine-3'-phosphate
  modified_base 21: mod_base = OTHER; note = 2'-O-methylcytidine-3'-phosphorothioate
  modified_base 22: mod_base = OTHER; note = 2'-O-methyluridine-3'-phosphorothioate
  modified_base 23: mod_base = OTHER; note = 2'-O-methylguanosine
ttgtcgatgactttcacattctg

SEQ ID NO: 284 - RNA, 23 nt, synthetic construct
  source 1..23: mol_type = other RNA
  modified_base 1: mod_base = OTHER; note = 2'-O-methyluridine-3'-phosphorothioate
  modified_base 2: mod_base = OTHER; note = 2'-deoxy-2'-fluorouridine-3'-phosphorothioate
  modified_base 3: mod_base = OTHER; note = 2'-O-methylguanosine-3'-phosphate
  modified_base 4: mod_base = OTHER; note = 2'-deoxy-2'-fluorouridine-3'-phosphate
  modified_base 5: mod_base = OTHER; note = 2'-O-methylcytidine-3'-phosphate
  modified_base 6: mod_base = OTHER; note = 2'-deoxy-2'-fluoroguanosine-3'-phosphate
  modified_base 7: mod_base = OTHER; note = 2'-O-methyladenosine-3'-phosphate
  modified_base 8: mod_base = OTHER; note = 2'-deoxy-2'-fluorouridine-3'-phosphate
  modified_base 9: mod_base = OTHER; note = 2'-O-methylguanosine-3'-phosphate
  modified_base 10: mod_base = OTHER; note = 2'-deoxy-2'-fluoroadenosine-3'-phosphate
  modified_base 11: mod_base = OTHER; note = 2'-O-methylcytidine-3'-phosphate
  modified_base 12: mod_base = OTHER; note = 2'-O-methyluridine-3'-phosphate
  modified_base 13: mod_base = OTHER; note = 2'-O-methyluridine-3'-phosphate
  modified_base 14: mod_base = OTHER; note = 2'-deoxy-2'-fluorouridine-3'-phosphate
  modified_base 15: mod_base = OTHER; note = 2'-O-methylcytidine-3'-phosphate
  modified_base 16: mod_base = OTHER; note = 2'-deoxy-2'-fluoroadenosine-3'-phosphate
  modified_base 17: mod_base = OTHER; note = 2'-O-methylcytidine-3'-phosphate
  modified_base 18: mod_base = OTHER; note = 2'-deoxy-2'-fluoroadenosine-3'-phosphate
  modified_base 19: mod_base = OTHER; note = 2'-O-methyluridine-3'-phosphate
  modified_base 20: mod_base = OTHER; note = 2'-deoxy-2'-fluorouridine-3'-phosphate
  modified_base 21: mod_base = OTHER; note = 2'-O-methylcytidine-3'-phosphorothioate
  modified_base 22: mod_base = OTHER; note = 2'-O-methyluridine-3'-phosphorothioate
  modified_base 23: mod_base = OTHER; note = 2'-O-methylguanosine
ttgtcgatgactttcacattctg

SEQ ID NO: 285 - RNA, 21 nt, synthetic construct
  source 1..21: mol_type = other RNA
  modified_base 1: mod_base = OTHER; note = 2'-O-methyluridine-3'-phosphorothioate
  modified_base 2: mod_base = OTHER; note = 2'-deoxy-2'-fluorouridine-3'-phosphorothioate
  modified_base 3: mod_base = OTHER; note = 2'-O-methylguanosine-3'-phosphate
  modified_base 4: mod_base = OTHER; note = 2'-deoxy-2'-fluorouridine-3'-phosphate
  modified_base 5: mod_base = OTHER; note = 2'-O-methylcytidine-3'-phosphate
  modified_base 6: mod_base = OTHER; note = 2'-deoxy-2'-fluoroguanosine-3'-phosphate
  modified_base 7: mod_base = OTHER; note = 2'-O-methyladenosine-3'-phosphate
  modified_base 8: mod_base = OTHER; note = 2'-deoxy-2'-fluorouridine-3'-phosphate
  modified_base 9: mod_base = OTHER; note = 2'-O-methylguanosine-3'-phosphate
  modified_base 10: mod_base = OTHER; note = 2'-deoxy-2'-fluoroadenosine-3'-phosphate
  modified_base 11: mod_base = OTHER; note = 2'-O-methylcytidine-3'-phosphate
  modified_base 12: mod_base = OTHER; note = 2'-O-methyluridine-3'-phosphate
  modified_base 13: mod_base = OTHER; note = 2'-O-methyluridine-3'-phosphate
  modified_base 14: mod_base = OTHER; note = 2'-deoxy-2'-fluorouridine-3'-phosphate
  modified_base 15: mod_base = OTHER; note = 2'-O-methylcytidine-3'-phosphate
  modified_base 16: mod_base = OTHER; note = 2'-deoxy-2'-fluoroadenosine-3'-phosphate
  modified_base 17: mod_base = OTHER; note = 2'-O-methylcytidine-3'-phosphate
  modified_base 18: mod_base = OTHER; note = 2'-deoxy-2'-fluoroadenosine-3'-phosphate
  modified_base 19: mod_base = OTHER; note = 2'-O-methyluridine-3'-phosphorothioate
  modified_base 20: mod_base = OTHER; note = 2'-O-methyluridine-3'-phosphorothioate
  modified_base 21: mod_base = OTHER; note = 2'-O-methylcytidine
ttgtcgatgactttcacattc

SEQ ID NO: 286 - RNA, 21 nt, synthetic construct
  source 1..21: mol_type = other RNA
  modified_base 1: mod_base = OTHER; note = 2'-O-methyluridine-3'-phosphorothioate
  modified_base 2: mod_base = OTHER; note = 2'-deoxy-2'-fluorouridine-3'-phosphorothioate
  modified_base 3: mod_base = OTHER; note = 2'-O-methylguanosine-3'-phosphate
  modified_base 4: mod_base = OTHER; note = 2'-O-methyluridine-3'-phosphate
  modified_base 5: mod_base = OTHER; note = 2'-O-methylcytidine-3'-phosphate
  modified_base 6: mod_base = OTHER; note = 2'-deoxy-2'-fluoroguanosine-3'-phosphate
  modified_base 7: mod_base = OTHER; note = 2'-O-methyladenosine-3'-phosphate
  modified_base 8: mod_base = OTHER; note = 2'-O-methyluridine-3'-phosphate
  modified_base 9: mod_base = OTHER; note = 2'-O-methylguanosine-3'-phosphate
  modified_base 10: mod_base = OTHER; note = 2'-O-methyladenosine-3'-phosphate
  modified_base 11: mod_base = OTHER; note = 2'-O-methylcytidine-3'-phosphate
  modified_base 12: mod_base = OTHER; note = 2'-O-methyluridine-3'-phosphate
  modified_base 13: mod_base = OTHER; note = 2'-O-methyluridine-3'-phosphate
  modified_base 14: mod_base = OTHER; note = 2'-deoxy-2'-fluorouridine-3'-phosphate
  modified_base 15: mod_base = OTHER; note = 2'-O-methylcytidine-3'-phosphate
  modified_base 16: mod_base = OTHER; note = 2'-deoxy-2'-fluoroadenosine-3'-phosphate
  modified_base 17: mod_base = OTHER; note = 2'-O-methylcytidine-3'-phosphate
  modified_base 18: mod_base = OTHER; note = 2'-O-methyladenosine-3'-phosphate
  modified_base 19: mod_base = OTHER; note = 2'-O-methyluridine-3'-phosphorothioate
  modified_base 20: mod_base = OTHER; note = 2'-O-methyluridine-3'-phosphorothioate
  modified_base 21: mod_base = OTHER; note = 2'-O-methylcytidine
ttgtcgatgactttcacattc

SEQ ID NO: 287 - RNA, 23 nt, synthetic construct
  source 1..23: mol_type = other RNA
  modified_base 1: mod_base = OTHER; note = 2'-O-methyluridine-3'-phosphorothioate
  modified_base 2: mod_base = OTHER; note = 2'-deoxy-2'-fluorouridine-3'-phosphorothioate
  modified_base 3: mod_base = OTHER; note = 2'-O-methylguanosine-3'-phosphate
  modified_base 4: mod_base = OTHER; note = 2'-O-methyluridine-3'-phosphate
  modified_base 5: mod_base = OTHER; note = 2'-O-methylcytidine-3'-phosphate
  modified_base 6: mod_base = OTHER; note = 2'-deoxy-2'-fluoroguanosine-3'-phosphate
  modified_base 7: mod_base = OTHER; note = 2'-O-methyladenosine-3'-phosphate
  modified_base 8: mod_base = OTHER; note = 2'-deoxy-2'-fluorouridine-3'-phosphate
  modified_base 9: mod_base = OTHER; note = 2'-O-methylguanosine-3'-phosphate
  modified_base 10: mod_base = OTHER; note = 2'-deoxy-2'-fluoroadenosine-3'-phosphate
  modified_base 11: mod_base = OTHER; note = 2'-O-methylcytidine-3'-phosphate
  modified_base 12: mod_base = OTHER; note = 2'-O-methyluridine-3'-phosphate
  modified_base 13: mod_base = OTHER; note = 2'-O-methyluridine-3'-phosphate
  modified_base 14: mod_base = OTHER; note = 2'-deoxy-2'-fluorouridine-3'-phosphate
  modified_base 15: mod_base = OTHER; note = 2'-O-methylcytidine-3'-phosphate
  modified_base 16: mod_base = OTHER; note = 2'-deoxy-2'-fluoroadenosine-3'-phosphate
  modified_base 17: mod_base = OTHER; note = 2'-O-methylcytidine-3'-phosphate
  modified_base 18: mod_base = OTHER; note = 2'-O-methyladenosine-3'-phosphate
  modified_base 19: mod_base = OTHER; note = 2'-O-methyluridine-3'-phosphate
  modified_base 20: mod_base = OTHER; note = 2'-O-methyluridine-3'-phosphate
  modified_base 21: mod_base = OTHER; note = 2'-O-methylcytidine-3'-phosphorothioate
  modified_base 22: mod_base = OTHER; note = 2'-O-methyluridine-3'-phosphorothioate
  modified_base 23: mod_base = OTHER; note = 2'-O-methylguanosine
ttgtcgatgactttcacattctg

SEQ ID NO: 288 - RNA, 23 nt, synthetic construct
  source 1..23: mol_type = other RNA
  modified_base 1: mod_base = OTHER; note = 2'-O-methyluridine-3'-phosphorothioate
  modified_base 2: mod_base = OTHER; note = 2'-deoxy-2'-fluorouridine-3'-phosphorothioate
  modified_base 3: mod_base = OTHER; note = 2'-O-methylguanosine-3'-phosphate
  modified_base 4: mod_base = OTHER; note = 2'-O-methyluridine-3'-phosphate
  modified_base 5: mod_base = OTHER; note = 2'-O-methylcytidine-3'-phosphate
  modified_base 6: mod_base = OTHER; note = 2'-deoxy-2'-fluoroguanosine-3'-phosphate
  modified_base 7: mod_base = OTHER; note = 2'-O-methyladenosine-3'-phosphate
  modified_base 8: mod_base = OTHER; note = 2'-deoxy-2'-fluorouridine-3'-phosphate
  modified_base 9: mod_base = OTHER; note = 2'-deoxy-2'-fluoroguanosine-3'-phosphate
  modified_base 10: mod_base = OTHER; note = 2'-O-methyladenosine-3'-phosphate
  modified_base 11: mod_base = OTHER; note = 2'-O-methylcytidine-3'-phosphate
  modified_base 12: mod_base = OTHER; note = 2'-O-methyluridine-3'-phosphate
  modified_base 13: mod_base = OTHER; note = 2'-O-methyluridine-3'-phosphate
  modified_base 14: mod_base = OTHER; note = 2'-deoxy-2'-fluorouridine-3'-phosphate
  modified_base 15: mod_base = OTHER; note = 2'-O-methylcytidine-3'-phosphate
  modified_base 16: mod_base = OTHER; note = 2'-deoxy-2'-fluoroadenosine-3'-phosphate
  modified_base 17: mod_base = OTHER; note = 2'-O-methylcytidine-3'-phosphate
  modified_base 18: mod_base = OTHER; note = 2'-O-methyladenosine-3'-phosphate
  modified_base 19: mod_base = OTHER; note = 2'-O-methyluridine-3'-phosphate
  modified_base 20: mod_base = OTHER; note = 2'-O-methyluridine-3'-phosphate
  modified_base 21: mod_base = OTHER; note = 2'-O-methylcytidine-3'-phosphorothioate
  modified_base 22: mod_base = OTHER; note = 2'-O-methyluridine-3'-phosphorothioate
  modified_base 23: mod_base = OTHER; note = 2'-O-methylguanosine
ttgtcgatgactttcacattctg

SEQ ID NO: 289 - RNA, 23 nt, synthetic construct
  source 1..23: mol_type = other RNA
  modified_base 1: mod_base = OTHER; note = 2'-O-methyluridine-3'-phosphorothioate
  modified_base 2: mod_base = OTHER; note = 2'-deoxy-2'-fluorouridine-3'-phosphorothioate
  modified_base 3: mod_base = OTHER; note = 2'-O-methylguanosine-3'-phosphate
  modified_base 4: mod_base = OTHER; note = 2'-O-methyluridine-3'-phosphate
  modified_base 5: mod_base = OTHER; note = 2'-O-methylcytidine-3'-phosphate
  modified_base 6: mod_base = OTHER; note = 2'-deoxy-2'-fluoroguanosine-3'-phosphate
  modified_base 7: mod_base = OTHER; note = 2'-O-methyladenosine-3'-phosphate
  modified_base 8: mod_base = OTHER; note = 2'-O-methyluridine-3'-phosphate
  modified_base 9: mod_base = OTHER; note = 2'-O-methylguanosine-3'-phosphate
  modified_base 10: mod_base = OTHER; note = 2'-O-methyladenosine-3'-phosphate
  modified_base 11: mod_base = OTHER; note = 2'-O-methylcytidine-3'-phosphate
  modified_base 12: mod_base = OTHER; note = 2'-O-methyluridine-3'-phosphate
  modified_base 13: mod_base = OTHER; note = 2'-O-methyluridine-3'-phosphate
  modified_base 14: mod_base = OTHER; note = 2'-deoxy-2'-fluorouridine-3'-phosphate
  modified_base 15: mod_base = OTHER; note = 2'-O-methylcytidine-3'-phosphate
  modified_base 16: mod_base = OTHER; note = 2'-deoxy-2'-fluoroadenosine-3'-phosphate
  modified_base 17: mod_base = OTHER; note = 2'-O-methylcytidine-3'-phosphate
  modified_base 18: mod_base = OTHER; note = 2'-O-methyladenosine-3'-phosphate
  modified_base 19: mod_base = OTHER; note = 2'-O-methyluridine-3'-phosphate
  modified_base 20: mod_base = OTHER; note = 2'-O-methyluridine-3'-phosphate
  modified_base 21: mod_base = OTHER; note = 2'-O-methylcytidine-3'-phosphorothioate
  modified_base 22: mod_base = OTHER; note = 2'-O-methyluridine-3'-phosphorothioate
  modified_base 23: mod_base = OTHER; note = 2'-O-methylguanosine
ttgtcgatgactttcacattctg

SEQ ID NO: 290 - RNA, 23 nt, synthetic construct
  source 1..23: mol_type = other RNA
  modified_base 1: mod_base = OTHER; note = 2'-O-methyluridine-3'-phosphorothioate
  modified_base 2: mod_base = OTHER; note = 2'-deoxy-2'-fluorouridine-3'-phosphorothioate
  modified_base 3: mod_base = OTHER; note = 2'-O-methylguanosine-3'-phosphate
  modified_base 4: mod_base = OTHER; note = 2'-O-methyluridine-3'-phosphate
  modified_base 5: mod_base = OTHER; note = 2'-O-methylcytidine-3'-phosphate
  modified_base 6: mod_base = OTHER; note = 2'-deoxy-2'-fluoroguanosine-3'-phosphate
  modified_base 7: mod_base = OTHER; note = 2'-O-methyladenosine-3'-phosphate
  modified_base 8: mod_base = OTHER; note = 2'-O-methyluridine-3'-phosphate
  modified_base 9: mod_base = OTHER; note = 2'-O-methylguanosine-3'-phosphate
  modified_base 10: mod_base = OTHER; note = 2'-O-methyladenosine-3'-phosphate
  modified_base 11: mod_base = OTHER; note = 2'-O-methylcytidine-3'-phosphate
  modified_base 12: mod_base = OTHER; note = 2'-O-methyluridine-3'-phosphate
  modified_base 13: mod_base = OTHER; note = 2'-O-methyluridine-3'-phosphate
  modified_base 14: mod_base = OTHER; note = 2'-deoxy-2'-fluorouridine-3'-phosphate
  modified_base 15: mod_base = OTHER; note = 2'-O-methylcytidine-3'-phosphate
  modified_base 16: mod_base = OTHER; note = 2'-O-methyladenosine-3'-phosphate
  modified_base 17: mod_base = OTHER; note = 2'-O-methylcytidine-3'-phosphate
  modified_base 18: mod_base = OTHER; note = 2'-O-methyladenosine-3'-phosphate
  modified_base 19: mod_base = OTHER; note = 2'-O-methyluridine-3'-phosphate
  modified_base 20: mod_base = OTHER; note = 2'-O-methyluridine-3'-phosphate
  modified_base 21: mod_base = OTHER; note = 2'-O-methylcytidine-3'-phosphorothioate
  modified_base 22: mod_base = OTHER; note = 2'-O-methyluridine-3'-phosphorothioate
  modified_base 23: mod_base = OTHER; note = 2'-O-methylguanosine
ttgtcgatgactttcacattctg

SEQ ID NO: 291 - RNA, 23 nt, synthetic construct
  source 1..23: mol_type = other RNA
  modified_base 1: mod_base = OTHER; note = 2'-O-methyluridine-3'-phosphorothioate
  modified_base 2: mod_base = OTHER; note = 2'-deoxy-2'-fluorouridine-3'-phosphorothioate
  modified_base 3: mod_base = OTHER; note = 2'-O-methylguanosine-3'-phosphate
  modified_base 4: mod_base = OTHER; note = 2'-O-methyluridine-3'-phosphate
  modified_base 5: mod_base = OTHER; note = 2'-O-methylcytidine-3'-phosphate
  modified_base 6: mod_base = OTHER; note = 2'-O-methylguanosine-3'-phosphate
  modified_base 7: mod_base = OTHER; note = 2'-O-methyladenosine-3'-phosphate
  modified_base 8: mod_base = OTHER; note = 2'-O-methyluridine-3'-phosphate
  modified_base 9: mod_base = OTHER; note = 2'-O-methylguanosine-3'-phosphate
  modified_base 10: mod_base = OTHER; note = 2'-O-methyladenosine-3'-phosphate
  modified_base 11: mod_base = OTHER; note = 2'-O-methylcytidine-3'-phosphate
  modified_base 12: mod_base = OTHER; note = 2'-O-methyluridine-3'-phosphate
  modified_base 13: mod_base = OTHER; note = 2'-O-methyluridine-3'-phosphate
  modified_base 14: mod_base = OTHER; note = 2'-deoxy-2'-fluorouridine-3'-phosphate
  modified_base 15: mod_base = OTHER; note = 2'-O-methylcytidine-3'-phosphate
  modified_base 16: mod_base = OTHER; note = 2'-O-methyladenosine-3'-phosphate
  modified_base 17: mod_base = OTHER; note = 2'-O-methylcytidine-3'-phosphate
  modified_base 18: mod_base = OTHER; note = 2'-O-methyladenosine-3'-phosphate
  modified_base 19: mod_base = OTHER; note = 2'-O-methyluridine-3'-phosphate
  modified_base 20: mod_base = OTHER; note = 2'-O-methyluridine-3'-phosphate
  modified_base 21: mod_base = OTHER; note = 2'-O-methylcytidine-3'-phosphorothioate
  modified_base 22: mod_base = OTHER; note = 2'-O-methyluridine-3'-phosphorothioate
  modified_base 23: mod_base = OTHER; note = 2'-O-methylguanosine
ttgtcgatgactttcacattctg

SEQ ID NO: 292 - RNA, 23 nt, synthetic construct
  source 1..23: mol_type = other RNA
  modified_base 1: mod_base = OTHER; note = 2'-O-methyluridine-3'-phosphorothioate
  modified_base 2: mod_base = OTHER; note = 2'-deoxy-2'-fluorouridine-3'-phosphorothioate
  modified_base 3: mod_base = OTHER; note = 2'-O-methylguanosine-3'-phosphate
  modified_base 4: mod_base = OTHER; note = 2'-O-methyluridine-3'-phosphate
  modified_base 5: mod_base = OTHER; note = 2'-O-methylcytidine-3'-phosphate
  modified_base 6: mod_base = OTHER; note = 2'-deoxy-2'-fluoroguanosine-3'-phosphate
  modified_base 7: mod_base = OTHER; note = 2'-O-methyladenosine-3'-phosphate
  modified_base 8: mod_base = OTHER; note = 2'-deoxy-2'-fluorouridine-3'-phosphate
  modified_base 9: mod_base = OTHER; note = 2'-O-methylguanosine-3'-phosphate
  modified_base 10: mod_base = OTHER; note = 2'-deoxy-2'-fluoroadenosine-3'-phosphate
  modified_base 11: mod_base = OTHER; note = 2'-O-methylcytidine-3'-phosphate
  modified_base 12: mod_base = OTHER; note = 2'-O-methyluridine-3'-phosphate
  modified_base 13: mod_base = OTHER; note = 2'-O-methyluridine-3'-phosphate
  modified_base 14: mod_base = OTHER; note = 2'-deoxy-2'-fluorouridine-3'-phosphate
  modified_base 15: mod_base = OTHER; note = 2'-O-methylcytidine-3'-phosphate
  modified_base 16: mod_base = OTHER; note = 2'-deoxy-2'-fluoroadenosine-3'-phosphate
  modified_base 17: mod_base = OTHER; note = 2'-O-methylcytidine-3'-phosphate
  modified_base 18: mod_base = OTHER; note = 2'-O-methyladenosine-3'-phosphate
  modified_base 19: mod_base = OTHER; note = 2'-O-methyluridine-3'-phosphate
  modified_base 20: mod_base = OTHER; note = 2'-O-methyluridine-3'-phosphate
  modified_base 21: mod_base = OTHER; note = 2'-O-methylcytidine-3'-phosphorothioate
  modified_base 22: mod_base = OTHER; note = 2'-O-methyluridine-3'-phosphorothioate
  modified_base 23: mod_base = OTHER; note = 2'-O-methylguanosine
ttgtcgatgactttcacattctg

SEQ ID NO: 293 - RNA, 23 nt, synthetic construct
  source 1..23: mol_type = other RNA
  modified_base 1: mod_base = OTHER; note = 2'-O-methyluridine-3'-phosphorothioate
  modified_base 2: mod_base = OTHER; note = 2'-deoxy-2'-fluorouridine-3'-phosphorothioate
  modified_base 3: mod_base = OTHER; note = 2'-O-methylguanosine-3'-phosphate
  modified_base 4: mod_base = OTHER; note = 2'-O-methyluridine-3'-phosphate
  modified_base 5: mod_base = OTHER; note = 2'-O-methylcytidine-3'-phosphate
  modified_base 6: mod_base = OTHER; note = 2'-deoxy-2'-fluoroguanosine-3'-phosphate
  modified_base 7: mod_base = OTHER; note = 2'-O-methyladenosine-3'-phosphate
  modified_base 8: mod_base = OTHER; note = 2'-deoxy-2'-fluorouridine-3'-phosphate
  modified_base 9: mod_base = OTHER; note = 2'-deoxy-2'-fluoroguanosine-3'-phosphate
  modified_base 10: mod_base = OTHER; note = 2'-O-methyladenosine-3'-phosphate
  modified_base 11: mod_base = OTHER; note = 2'-O-methylcytidine-3'-phosphate
  modified_base 12: mod_base = OTHER; note = 2'-O-methyluridine-3'-phosphate
  modified_base 13: mod_base = OTHER; note = 2'-O-methyluridine-3'-phosphate
  modified_base 14: mod_base = OTHER; note = 2'-deoxy-2'-fluorouridine-3'-phosphate
  modified_base 15: mod_base = OTHER; note = 2'-O-methylcytidine-3'-phosphate
  modified_base 16: mod_base = OTHER; note = 2'-deoxy-2'-fluoroadenosine-3'-phosphate
  modified_base 17: mod_base = OTHER; note = 2'-O-methylcytidine-3'-phosphate
  modified_base 18: mod_base = OTHER; note = 2'-O-methyladenosine-3'-phosphate
  modified_base 19: mod_base = OTHER; note = 2'-O-methyluridine-3'-phosphate
  modified_base 20: mod_base = OTHER; note = 2'-O-methyluridine-3'-phosphate
  modified_base 21: mod_base = OTHER; note = 2'-O-methylcytidine-3'-phosphorothioate
  modified_base 22: mod_base = OTHER; note = 2'-O-methyluridine-3'-phosphorothioate
  modified_base 23: mod_base = OTHER; note = 2'-O-methylguanosine
ttgtcgatgactttcacattctg

SEQ ID NO: 294 - RNA, 23 nt, synthetic construct
  source 1..23: mol_type = other RNA
  modified_base 1: mod_base = OTHER; note = 2'-O-methyluridine-3'-phosphorothioate
  modified_base 2: mod_base = OTHER; note = 2'-deoxy-2'-fluorouridine-3'-phosphorothioate
  modified_base 3: mod_base = OTHER; note = 2'-O-methylguanosine-3'-phosphate
  modified_base 4: mod_base = OTHER; note = 2'-O-methyluridine-3'-phosphate
  modified_base 5: mod_base = OTHER; note = 2'-O-methylcytidine-3'-phosphate
  modified_base 6: mod_base = OTHER; note = 2'-deoxy-2'-fluoroguanosine-3'-phosphate
  modified_base 7: mod_base = OTHER; note = 2'-O-methyladenosine-3'-phosphate
  modified_base 8: mod_base = OTHER; note = 2'-deoxy-2'-fluorouridine-3'-phosphate
  modified_base 9: mod_base = OTHER; note = 2'-O-methylguanosine-3'-phosphate
  modified_base 10: mod_base = OTHER; note = 2'-deoxy-2'-fluoroadenosine-3'-phosphate
  modified_base 11: mod_base = OTHER; note = 2'-O-methylcytidine-3'-phosphate
  modified_base 12: mod_base = OTHER; note = 2'-O-methyluridine-3'-phosphate
  modified_base 13: mod_base = OTHER; note = 2'-O-methyluridine-3'-phosphate
  modified_base 14: mod_base = OTHER; note = 2'-deoxy-2'-fluorouridine-3'-phosphate
  modified_base 15: mod_base = OTHER; note = 2'-O-methylcytidine-3'-phosphate
  modified_base 16: mod_base = OTHER; note = 2'-deoxy-2'-fluoroadenosine-3'-phosphate
  modified_base 17: mod_base = OTHER; note = 2'-O-methylcytidine-3'-phosphate
  modified_base 18: mod_base = OTHER; note = 2'-O-methyladenosine-3'-phosphate
  modified_base 19: mod_base = OTHER; note = 2'-O-methyluridine-3'-phosphate
  modified_base 20: mod_base = OTHER; note = 2'-O-methyluridine-3'-phosphate
  modified_base 21: mod_base = OTHER; note = 2'-O-methylcytidine-3'-phosphorothioate
  modified_base 22: mod_base = OTHER; note = 2'-O-methyluridine-3'-phosphorothioate
  modified_base 23: mod_base = OTHER; note = 2'-O-methylguanosine
ttgtcgatgactttcacattctg

SEQ ID NO: 295 - RNA, 23 nt, synthetic construct
  source 1..23: mol_type = other RNA
  modified_base 1: mod_base = OTHER; note = 2'-O-methyluridine-3'-phosphorothioate
  modified_base 2: mod_base = OTHER; note = 2'-deoxy-2'-fluorouridine-3'-phosphorothioate
  modified_base 3: mod_base = OTHER; note = 2'-O-methylguanosine-3'-phosphate
  modified_base 4: mod_base = OTHER; note = 2'-O-methyluridine-3'-phosphate
  modified_base 5: mod_base = OTHER; note = 2'-O-methylcytidine-3'-phosphate
  modified_base 6: mod_base = OTHER; note = 2'-deoxy-2'-fluoroguanosine-3'-phosphate
  modified_base 7: mod_base = OTHER; note = 2'-O-methyladenosine-3'-phosphate
  modified_base 8: mod_base = OTHER; note = 2'-deoxy-2'-fluorouridine-3'-phosphate
  modified_base 9: mod_base = OTHER; note = 2'-deoxy-2'-fluoroguanosine-3'-phosphate
  modified_base 10: mod_base = OTHER; note = 2'-O-methyladenosine-3'-phosphate
  modified_base 11: mod_base = OTHER; note = 2'-O-methylcytidine-3'-phosphate
  modified_base 12: mod_base = OTHER; note = 2'-O-methyluridine-3'-phosphate
  modified_base 13: mod_base = OTHER; note = 2'-O-methyluridine-3'-phosphate
  modified_base 14: mod_base = OTHER; note = 2'-deoxy-2'-fluorouridine-3'-phosphate
  modified_base 15: mod_base = OTHER; note = 2'-O-methylcytidine-3'-phosphate
  modified_base 16: mod_base = OTHER; note = 2'-deoxy-2'-fluoroadenosine-3'-phosphate
  modified_base 17: mod_base = OTHER; note = 2'-O-methylcytidine-3'-phosphate
  modified_base 18: mod_base = OTHER; note = 2'-O-methyladenosine-3'-phosphate
  modified_base 19: mod_base = OTHER; note = 2'-O-methyluridine-3'-phosphate
  modified_base 20: mod_base = OTHER; note = 2'-O-methyluridine-3'-phosphate
  modified_base 21: mod_base = OTHER; note = 2'-O-methylcytidine-3'-phosphorothioate
  modified_base 22: mod_base = OTHER; note = 2'-O-methyluridine-3'-phosphorothioate
  modified_base 23: mod_base = OTHER; note = 2'-O-methylguanosine
ttgtcgatgactttcacattctg

SEQ ID NO: 296 - RNA, 23 nt, synthetic construct
  source 1..23: mol_type = other RNA
  modified_base 1: mod_base = OTHER; note = 2'-O-methyluridine-3'-phosphorothioate
  modified_base 2: mod_base = OTHER; note = 2'-deoxy-2'-fluorouridine-3'-phosphorothioate
  modified_base 3: mod_base = OTHER; note = 2'-O-methylguanosine-3'-phosphate
  modified_base 4: mod_base = OTHER; note = 2'-O-methyluridine-3'-phosphate
  modified_base 5: mod_base = OTHER; note = 2'-O-methylcytidine-3'-phosphate
  modified_base 6: mod_base = OTHER; note = 2'-deoxy-2'-fluoroguanosine-3'-phosphate
  modified_base 7: mod_base = OTHER; note = 2'-O-methyladenosine-3'-phosphate
  modified_base 8: mod_base = OTHER; note = 2'-O-methyluridine-3'-phosphate
  modified_base 9: mod_base = OTHER; note = 2'-O-methylguanosine-3'-phosphate
  modified_base 10: mod_base = OTHER; note = 2'-O-methyladenosine-3'-phosphate
  modified_base 11: mod_base = OTHER; note = 2'-O-methylcytidine-3'-phosphate
  modified_base 12: mod_base = OTHER; note = 2'-O-methyluridine-3'-phosphate
  modified_base 13: mod_base = OTHER; note = 2'-O-methyluridine-3'-phosphate
  modified_base 14: mod_base = OTHER; note = 2'-deoxy-2'-fluorouridine-3'-phosphate
  modified_base 15: mod_base = OTHER; note = 2'-O-methylcytidine-3'-phosphate
  modified_base 16: mod_base = OTHER; note = 2'-deoxy-2'-fluoroadenosine-3'-phosphate
  modified_base 17: mod_base = OTHER; note = 2'-O-methylcytidine-3'-phosphate
  modified_base 18: mod_base = OTHER; note = 2'-O-methyladenosine-3'-phosphate
  modified_base 19: mod_base = OTHER; note = 2'-O-methyluridine-3'-phosphate
  modified_base 20: mod_base = OTHER; note = 2'-O-methyluridine-3'-phosphate
  modified_base 21: mod_base = OTHER; note = 2'-O-methylcytidine-3'-phosphorothioate
  modified_base 22: mod_base = OTHER; note = 2'-O-methyluridine-3'-phosphorothioate
  modified_base 23: mod_base = OTHER; note = 2'-O-methylguanosine
ttgtcgatgactttcacattctg

SEQ ID NO: 297 - RNA, 23 nt, synthetic construct
  source 1..23: mol_type = other RNA
  modified_base 1: mod_base = OTHER; note = 2'-O-methyluridine-3'-phosphorothioate
  modified_base 2: mod_base = OTHER; note = 2'-deoxy-2'-fluorouridine-3'-phosphorothioate
  modified_base 3: mod_base = OTHER; note = 2'-O-methylguanosine-3'-phosphate
  modified_base 4: mod_base = OTHER; note = 2'-deoxy-2'-fluorouridine-3'-phosphate
  modified_base 5: mod_base = OTHER; note = 2'-O-methylcytidine-3'-phosphate
  modified_base 6: mod_base = OTHER; note = 2'-deoxy-2'-fluoroguanosine-3'-phosphate
  modified_base 7: mod_base = OTHER; note = 2'-O-methyladenosine-3'-phosphate
  modified_base 8: mod_base = OTHER; note = 2'-deoxy-2'-fluorouridine-3'-phosphate
  modified_base 9: mod_base = OTHER; note = 2'-O-methylguanosine-3'-phosphate
  modified_base 10: mod_base = OTHER; note = 2'-deoxy-2'-fluoroadenosine-3'-phosphate
  modified_base 11: mod_base = OTHER; note = 2'-O-methylcytidine-3'-phosphate
  modified_base 12: mod_base = OTHER; note = 2'-O-methyluridine-3'-phosphate
  modified_base 13: mod_base = OTHER; note = 2'-O-methyluridine-3'-phosphate
  modified_base 14: mod_base = OTHER; note = 2'-deoxy-2'-fluorouridine-3'-phosphate
  modified_base 15: mod_base = OTHER; note = 2'-O-methylcytidine-3'-phosphate
  modified_base 16: mod_base = OTHER; note = 2'-deoxy-2'-fluoroadenosine-3'-phosphate
  modified_base 17: mod_base = OTHER; note = 2'-O-methylcytidine-3'-phosphate
  modified_base 18: mod_base = OTHER; note = 2'-deoxy-2'-fluoroadenosine-3'-phosphate
  modified_base 19: mod_base = OTHER; note = 2'-O-methyluridine-3'-phosphate
  modified_base 20: mod_base = OTHER; note = 2'-deoxy-2'-fluorouridine-3'-phosphate
  modified_base 21: mod_base = OTHER; note = 2'-O-methylcytidine-3'-phosphorothioate
  modified_base 22: mod_base = OTHER; note = 2'-O-methyluridine-3'-phosphorothioate
  modified_base 23: mod_base = OTHER; note = 2'-O-methylguanosine
ttgtcgatgactttcacattctg

SEQ ID NO: 298 - RNA, 23 nt, synthetic construct
  source 1..23: mol_type = other RNA
  modified_base 1: mod_base = OTHER; note = 2'-O-methyluridine-3'-phosphorothioate
  modified_base 2: mod_base = OTHER; note = 2'-deoxy-2'-fluorouridine-3'-phosphorothioate
  modified_base 3: mod_base = OTHER; note = 2'-O-methylguanosine-3'-phosphate
  modified_base 4: mod_base = OTHER; note = 2'-deoxy-2'-fluorouridine-3'-phosphate
  modified_base 5: mod_base = OTHER; note = 2'-O-methylcytidine-3'-phosphate
  modified_base 6: mod_base = OTHER; note = 2'-deoxy-2'-fluoroguanosine-3'-phosphate
  modified_base 7: mod_base = OTHER; note = 2'-O-methyladenosine-3'-phosphate
  modified_base 8: mod_base = OTHER; note = 2'-deoxy-2'-fluorouridine-3'-phosphate
  modified_base 9: mod_base = OTHER; note = 2'-O-methylguanosine-3'-phosphate
  modified_base 10: mod_base = OTHER; note = 2'-deoxy-2'-fluoroadenosine-3'-phosphate
  modified_base 11: mod_base = OTHER; note = 2'-O-methylcytidine-3'-phosphate
  modified_base 12: mod_base = OTHER; note = 2'-O-methyluridine-3'-phosphate
  modified_base 13: mod_base = OTHER; note = 2'-O-methyluridine-3'-phosphate
  modified_base 14: mod_base = OTHER; note = 2'-deoxy-2'-fluorouridine-3'-phosphate
  modified_base 15: mod_base = OTHER; note = 2'-O-methylcytidine-3'-phosphate
  modified_base 16: mod_base = OTHER; note = 2'-deoxy-2'-fluoroadenosine-3'-phosphate
  modified_base 17: mod_base = OTHER; note = 2'-O-methylcytidine-3'-phosphate
  modified_base 18: mod_base = OTHER; note = 2'-deoxy-2'-fluoroadenosine-3'-phosphate
  modified_base 19: mod_base = OTHER; note = 2'-O-methyluridine-3'-phosphate
  modified_base 20: mod_base = OTHER; note = 2'-deoxy-2'-fluorouridine-3'-phosphate
  modified_base 21: mod_base = OTHER; note = 2'-O-methylcytidine-3'-phosphorothioate
  modified_base 22: mod_base = OTHER; note = 2'-O-methyluridine-3'-phosphorothioate
  modified_base 23: mod_base = OTHER; note = 2'-O-methylguanosine
ttgtcgatgactttcacattctg

SEQ ID NO: 299 - RNA, 23 nt, synthetic construct
  source 1..23: mol_type = other RNA
  modified_base 1: mod_base = OTHER; note = 2'-O-methyluridine-3'-phosphorothioate
  modified_base 2: mod_base = OTHER; note = 2'-deoxy-2'-fluorouridine-3'-phosphorothioate
  modified_base 3: mod_base = OTHER; note = 2'-O-methylguanosine-3'-phosphate
  modified_base 4: mod_base = OTHER; note = 2'-deoxy-2'-fluorouridine-3'-phosphate
  modified_base 5: mod_base = OTHER; note = 2'-O-methylcytidine-3'-phosphate
  modified_base 6: mod_base = OTHER; note = 2'-deoxy-2'-fluoroguanosine-3'-phosphate
  modified_base 7: mod_base = OTHER; note = 2'-O-methyladenosine-3'-phosphate
  modified_base 8: mod_base = OTHER; note = 2'-deoxy-2'-fluorouridine-3'-phosphate
  modified_base 9: mod_base = OTHER; note = 2'-O-methylguanosine-3'-phosphate
  modified_base 10: mod_base = OTHER; note = 2'-deoxy-2'-fluoroadenosine-3'-phosphate
  modified_base 11: mod_base = OTHER; note = 2'-O-methylcytidine-3'-phosphate
  modified_base 12: mod_base = OTHER; note = 2'-O-methyluridine-3'-phosphate
  modified_base 13: mod_base = OTHER; note = 2'-O-methyluridine-3'-phosphate
  modified_base 14: mod_base = OTHER; note = 2'-deoxy-2'-fluorouridine-3'-phosphate
  modified_base 15: mod_base = OTHER; note = 2'-O-methylcytidine-3'-phosphate
  modified_base 16: mod_base = OTHER; note = 2'-deoxy-2'-fluoroadenosine-3'-phosphate
  modified_base 17: mod_base = OTHER; note = 2'-O-methylcytidine-3'-phosphate
  modified_base 18: mod_base = OTHER; note = 2'-deoxy-2'-fluoroadenosine-3'-phosphate
  modified_base 19: mod_base = OTHER; note = 2'-O-methyluridine-3'-phosphate
  modified_base 20: mod_base = OTHER; note = 2'-deoxy-2'-fluorouridine-3'-phosphate
  modified_base 21: mod_base = OTHER; note = 2'-O-methylcytidine-3'-phosphorothioate
  modified_base 22: mod_base = OTHER; note = 2'-O-methyluridine-3'-phosphorothioate
  modified_base 23: mod_base = OTHER; note = 2'-O-methylguanosine
ttgtcgatgactttcacattctg

SEQ ID NO: 300 - RNA, 23 nt, synthetic construct
  source 1..23: mol_type = other RNA
  modified_base 1: mod_base = OTHER; note = 2'-O-methyluridine-3'-phosphorothioate
  modified_base 2: mod_base = OTHER; note = 2'-deoxy-2'-fluorouridine-3'-phosphorothioate
  modified_base 3: mod_base = OTHER; note = 2'-O-methylguanosine-3'-phosphate
  modified_base 4: mod_base = OTHER; note = 2'-deoxy-2'-fluorouridine-3'-phosphate
  modified_base 5: mod_base = OTHER; note = 2'-O-methylcytidine-3'-phosphate
  modified_base 6: mod_base = OTHER; note = 2'-deoxy-2'-fluoroguanosine-3'-phosphate
  modified_base 7: mod_base = OTHER; note = 2'-O-methyladenosine-3'-phosphate
  modified_base 8: mod_base = OTHER; note = 2'-deoxy-2'-fluorouridine-3'-phosphate
  modified_base 9: mod_base = OTHER; note = 2'-O-methylguanosine-3'-phosphate
  modified_base 10: mod_base = OTHER; note = 2'-deoxy-2'-fluoroadenosine-3'-phosphate
  modified_base 11: mod_base = OTHER; note = 2'-O-methylcytidine-3'-phosphate
  modified_base 12: mod_base = OTHER; note = 2'-O-methyluridine-3'-phosphate
  modified_base 13: mod_base = OTHER; note = 2'-O-methyluridine-3'-phosphate
  modified_base 14: mod_base = OTHER; note = 2'-deoxy-2'-fluorouridine-3'-phosphate
  modified_base 15: mod_base = OTHER; note = 2'-O-methylcytidine-3'-phosphate
  modified_base 16: mod_base = OTHER; note = 2'-deoxy-2'-fluoroadenosine-3'-phosphate
  modified_base 17: mod_base = OTHER; note = 2'-O-methylcytidine-3'-phosphate
  modified_base 18: mod_base = OTHER; note = 2'-deoxy-2'-fluoroadenosine-3'-phosphate
  modified_base 19: mod_base = OTHER; note = 2'-O-methyluridine-3'-phosphate
  modified_base 20: mod_base = OTHER; note = 2'-deoxy-2'-fluorouridine-3'-phosphate
  modified_base 21: mod_base = OTHER; note = 2'-O-methylcytidine-3'-phosphorothioate
  modified_base 22: mod_base = OTHER; note = 2'-O-methyluridine-3'-phosphorothioate
  modified_base 23: mod_base = OTHER; note = 2'-O-methylguanosine
ttgtcgatgactttcacattctg

SEQ ID NO: 301 - RNA, 23 nt, synthetic construct
  source 1..23: mol_type = other RNA
  modified_base 1: mod_base = OTHER; note = 2'-O-methyluridine-3'-phosphorothioate
  modified_base 2: mod_base = OTHER; note = 2'-deoxy-2'-fluorouridine-3'-phosphorothioate
  modified_base 3: mod_base = OTHER; note = 2'-O-methylguanosine-3'-phosphate
  modified_base 4: mod_base = OTHER; note = 2'-deoxy-2'-fluorouridine-3'-phosphate
  modified_base 5: mod_base = OTHER; note = 2'-O-methylcytidine-3'-phosphate
  modified_base 6: mod_base = OTHER; note = 2'-deoxy-2'-fluoroguanosine-3'-phosphate
  modified_base 7: mod_base = OTHER; note = 2'-O-methyladenosine-3'-phosphate
  modified_base 8: mod_base = OTHER; note = 2'-deoxy-2'-fluorouridine-3'-phosphate
  modified_base 9: mod_base = OTHER; note = 2'-O-methylguanosine-3'-phosphate
  modified_base 10: mod_base = OTHER; note = 2'-deoxy-2'-fluoroadenosine-3'-phosphate
  modified_base 11: mod_base = OTHER; note = 2'-O-methylcytidine-3'-phosphate
  modified_base 12: mod_base = OTHER; note = 2'-O-methyluridine-3'-phosphate
  modified_base 13: mod_base = OTHER; note = 2'-O-methyluridine-3'-phosphate
  modified_base 14: mod_base = OTHER; note = 2'-deoxy-2'-fluorouridine-3'-phosphate
  modified_base 15: mod_base = OTHER; note = 2'-O-methylcytidine-3'-phosphate
  modified_base 16: mod_base = OTHER; note = 2'-deoxy-2'-fluoroadenosine-3'-phosphate
  modified_base 17: mod_base = OTHER; note = 2'-O-methylcytidine-3'-phosphate
  modified_base 18: mod_base = OTHER; note = 2'-deoxy-2'-fluoroadenosine-3'-phosphate
  modified_base 19: mod_base = OTHER; note = 2'-O-methyluridine-3'-phosphate
  modified_base 20: mod_base = OTHER; note = 2'-deoxy-2'-fluorouridine-3'-phosphate
  modified_base 21: mod_base = OTHER; note = 2'-O-methylcytidine-3'-phosphorothioate
  modified_base 22: mod_base = OTHER; note = 2'-O-methyluridine-3'-phosphorothioate
  modified_base 23: mod_base = OTHER; note = 2'-O-methylguanosine
ttgtcgatgactttcacattctg

SEQ ID NO: 302 - RNA, 23 nt, synthetic construct
  source 1..23: mol_type = other RNA
  modified_base 1: mod_base = OTHER; note = 2'-O-methyluridine-3'-phosphorothioate
  modified_base 2: mod_base = OTHER; note = 2'-deoxy-2'-fluorouridine-3'-phosphorothioate
  modified_base 3: mod_base = OTHER; note = 2'-O-methylguanosine-3'-phosphate
  modified_base 4: mod_base = OTHER; note = 2'-deoxy-2'-fluorouridine-3'-phosphate
  modified_base 5: mod_base = OTHER; note = 2'-O-methylcytidine-3'-phosphate
  modified_base 6: mod_base = OTHER; note = 2'-deoxy-2'-fluoroguanosine-3'-phosphate
  modified_base 7: mod_base = OTHER; note = 2'-O-methyladenosine-3'-phosphate
  modified_base 8: mod_base = OTHER; note = 2'-deoxy-2'-fluorouridine-3'-phosphate
  modified_base 9: mod_base = OTHER; note = 2'-O-methylguanosine-3'-phosphate
  modified_base 10: mod_base = OTHER; note = 2'-deoxy-2'-fluoroadenosine-3'-phosphate
  modified_base 11: mod_base = OTHER; note = 2'-O-methylcytidine-3'-phosphate
  modified_base 12: mod_base = OTHER; note = 2'-O-methyluridine-3'-phosphate
  modified_base 13: mod_base = OTHER; note = 2'-O-methyluridine-3'-phosphate
  modified_base 14: mod_base = OTHER; note = 2'-deoxy-2'-fluorouridine-3'-phosphate
  modified_base 15: mod_base = OTHER; note = 2'-O-methylcytidine-3'-phosphate
  modified_base 16: mod_base = OTHER; note = 2'-deoxy-2'-fluoroadenosine-3'-phosphate
  modified_base 17: mod_base = OTHER; note = 2'-O-methylcytidine-3'-phosphate
  modified_base 18: mod_base = OTHER; note = 2'-deoxy-2'-fluoroadenosine-3'-phosphate
  modified_base 19: mod_base = OTHER; note = 2'-O-methyluridine-3'-phosphate
  modified_base 20: mod_base = OTHER; note = 2'-deoxy-2'-fluorouridine-3'-phosphate
  modified_base 21: mod_base = OTHER; note = 2'-O-methylcytidine-3'-phosphorothioate
  modified_base 22: mod_base = OTHER; note = 2'-O-methyluridine-3'-phosphorothioate
  modified_base 23: mod_base = OTHER; note = 2'-O-methylguanosine
ttgtcgatgactttcacattctg

SEQ ID NO: 303 - RNA, 23 nt, synthetic construct
  source 1..23: mol_type = other RNA
  modified_base 1: mod_base = OTHER; note = 2'-O-methyluridine-3'-phosphorothioate
  modified_base 2: mod_base = OTHER; note = 2'-deoxy-2'-fluorouridine-3'-phosphorothioate
  modified_base 3: mod_base = OTHER; note = 2'-O-methylguanosine-3'-phosphate
  modified_base 4: mod_base = OTHER; note = 2'-deoxy-2'-fluorouridine-3'-phosphate
  modified_base 5: mod_base = OTHER; note = 2'-O-methylcytidine-3'-phosphate
  modified_base 6: mod_base = OTHER; note = 2'-deoxy-2'-fluoroguanosine-3'-phosphate
  modified_base 7: mod_base = OTHER; note = 2'-O-methyladenosine-3'-phosphate
  modified_base 8: mod_base = OTHER; note = 2'-deoxy-2'-fluorouridine-3'-phosphate
  modified_base 9: mod_base = OTHER; note = 2'-O-methylguanosine-3'-phosphate
  modified_base 10: mod_base = OTHER; note = 2'-deoxy-2'-fluoroadenosine-3'-phosphate
  modified_base 11: mod_base = OTHER; note = 2'-O-methylcytidine-3'-phosphate
  modified_base 12: mod_base = OTHER; note = 2'-O-methyluridine-3'-phosphate
  modified_base 13: mod_base = OTHER; note = 2'-O-methyluridine-3'-phosphate
  modified_base 14: mod_base = OTHER; note = 2'-deoxy-2'-fluorouridine-3'-phosphate
  modified_base 15: mod_base = OTHER; note = 2'-O-methylcytidine-3'-phosphate
  modified_base 16: mod_base = OTHER; note = 2'-deoxy-2'-fluoroadenosine-3'-phosphate
  modified_base 17: mod_base = OTHER; note = 2'-O-methylcytidine-3'-phosphate
  modified_base 18: mod_base = OTHER; note = 2'-deoxy-2'-fluoroadenosine-3'-phosphate
  modified_base 19: mod_base = OTHER; note = 2'-O-methyluridine-3'-phosphate
  modified_base 20: mod_base = OTHER; note = 2'-deoxy-2'-fluorouridine-3'-phosphate
  modified_base 21: mod_base = OTHER; note = 2'-O-methylcytidine-3'-phosphorothioate
  modified_base 22: mod_base = OTHER; note = 2'-O-methyluridine-3'-phosphorothioate
  modified_base 23: mod_base = OTHER; note = 2'-O-methylguanosine
ttgtcgatgactttcacattctg

SEQ ID NO: 304 - RNA, 23 nt, synthetic construct
  source 1..23: mol_type = other RNA
  modified_base 1: mod_base = OTHER; note = 2'-O-methyluridine-3'-phosphorothioate
  modified_base 2: mod_base = OTHER; note = 2'-deoxy-2'-fluorouridine-3'-phosphorothioate
  modified_base 3: mod_base = OTHER; note = 2'-O-methylguanosine-3'-phosphate
  modified_base 4: mod_base = OTHER; note = 2'-deoxy-2'-fluorouridine-3'-phosphate
  modified_base 5: mod_base = OTHER; note = 2'-O-methylcytidine-3'-phosphate
  modified_base 6: mod_base = OTHER; note = 2'-deoxy-2'-fluoroguanosine-3'-phosphate
  modified_base 7: mod_base = OTHER; note = 2'-O-methyladenosine-3'-phosphate
  modified_base 8: mod_base = OTHER; note = 2'-deoxy-2'-fluorouridine-3'-phosphate
  modified_base 9: mod_base = OTHER; note = 2'-O-methylguanosine-3'-phosphate
  modified_base 10: mod_base = OTHER; note = 2'-deoxy-2'-fluoroadenosine-3'-phosphate
  modified_base 11: mod_base = OTHER; note = 2'-O-methylcytidine-3'-phosphate
  modified_base 12: mod_base = OTHER; note = 2'-O-methyluridine-3'-phosphate
  modified_base 13: mod_base = OTHER; note = 2'-O-methyluridine-3'-phosphate
  modified_base 14: mod_base = OTHER; note = 2'-deoxy-2'-fluorouridine-3'-phosphate
  modified_base 15: mod_base = OTHER; note = 2'-O-methylcytidine-3'-phosphate
  modified_base 16: mod_base = OTHER; note = 2'-deoxy-2'-fluoroadenosine-3'-phosphate
  modified_base 17: mod_base = OTHER; note = 2'-O-methylcytidine-3'-phosphate
  modified_base 18: mod_base = OTHER; note = 2'-deoxy-2'-fluoroadenosine-3'-phosphate
  modified_base 19: mod_base = OTHER; note = 2'-O-methyluridine-3'-phosphate
  modified_base 20: mod_base = OTHER; note = 2'-deoxy-2'-fluorouridine-3'-phosphate
  modified_base 21: mod_base = OTHER; note = 2'-O-methylcytidine-3'-phosphorothioate
  modified_base 22: mod_base = OTHER; note = 2'-O-methyluridine-3'-phosphorothioate
  modified_base 23: mod_base = OTHER; note = 2'-O-methylguanosine
ttgtcgatgactttcacattctg

SEQ ID NO: 305 - RNA, 23 nt, synthetic construct
  source 1..23: mol_type = other RNA
  modified_base 1: mod_base = OTHER; note = 2'-O-methyluridine-3'-phosphorothioate
  modified_base 2: mod_base = OTHER; note = 2'-deoxy-2'-fluorouridine-3'-phosphorothioate
  modified_base 3: mod_base = OTHER; note = 2'-O-methylguanosine-3'-phosphate
  modified_base 4: mod_base = OTHER; note = 2'-deoxy-2'-fluorouridine-3'-phosphate
  modified_base 5: mod_base = OTHER; note = 2'-O-methylcytidine-3'-phosphate
  modified_base 6: mod_base = OTHER; note = 2'-deoxy-2'-fluoroguanosine-3'-phosphate
  modified_base 7: mod_base = OTHER; note = 2'-O-methyladenosine-3'-phosphate
  modified_base 8: mod_base = OTHER; note = 2'-deoxy-2'-fluorouridine-3'-phosphate
  modified_base 9: mod_base = OTHER; note = 2'-O-methylguanosine-3'-phosphate
  modified_base 10: mod_base = OTHER; note = 2'-deoxy-2'-fluoroadenosine-3'-phosphate
  modified_base 11: mod_base = OTHER; note = 2'-O-methylcytidine-3'-phosphate
  modified_base 12: mod_base = OTHER; note = 2'-O-methyluridine-3'-phosphate
  modified_base 13: mod_base = OTHER; note = 2'-O-methyluridine-3'-phosphate
  modified_base 14: mod_base = OTHER; note = 2'-deoxy-2'-fluorouridine-3'-phosphate
  modified_base 15: mod_base = OTHER; note = 2'-O-methylcytidine-3'-phosphate
  modified_base 16: mod_base = OTHER; note = 2'-deoxy-2'-fluoroadenosine-3'-phosphate
  modified_base 17: mod_base = OTHER; note = 2'-O-methylcytidine-3'-phosphate
  modified_base 18: mod_base = OTHER; note = 2'-deoxy-2'-fluoroadenosine-3'-phosphate
  modified_base 19: mod_base = OTHER; note = 2'-O-methyluridine-3'-phosphate
  modified_base 20: mod_base = OTHER; note = 2'-deoxy-2'-fluorouridine-3'-phosphate
  modified_base 21: mod_base = OTHER; note = 2'-O-methylcytidine-3'-phosphorothioate
  modified_base 22: mod_base = OTHER; note = 2'-O-methyluridine-3'-phosphorothioate
  modified_base 23: mod_base = OTHER; note = 2'-O-methylguanosine
ttgtcgatgactttcacattctg

SEQ ID NO: 306 - RNA, 23 nt, synthetic construct
  source 1..23: mol_type = other RNA
  modified_base 1: mod_base = OTHER; note = 2'-O-methyluridine-3'-phosphorothioate
  modified_base 2: mod_base = OTHER; note = 2'-deoxy-2'-fluorouridine-3'-phosphorothioate
  modified_base 3: mod_base = OTHER; note = 2'-O-methylguanosine-3'-phosphate
  modified_base 4: mod_base = OTHER; note = 2'-deoxy-2'-fluorouridine-3'-phosphate
  modified_base 5: mod_base = OTHER; note = 2'-O-methylcytidine-3'-phosphate
  modified_base 6: mod_base = OTHER; note = 2'-deoxy-2'-fluoroguanosine-3'-phosphate
  modified_base 7: mod_base = OTHER; note = 2'-O-methyladenosine-3'-phosphate
  modified_base 8: mod_base = OTHER; note = 2'-deoxy-2'-fluorouridine-3'-phosphate
  modified_base 9: mod_base = OTHER; note = 2'-O-methylguanosine-3'-phosphate
  modified_base 10: mod_base = OTHER; note = 2'-deoxy-2'-fluoroadenosine-3'-phosphate
  modified_base 11: mod_base = OTHER; note = 2'-O-methylcytidine-3'-phosphate
  modified_base 12: mod_base = OTHER; note = 2'-O-methyluridine-3'-phosphate
  modified_base 13: mod_base = OTHER; note = 2'-O-methyluridine-3'-phosphate
  modified_base 14: mod_base = OTHER; note = 2'-deoxy-2'-fluorouridine-3'-phosphate
  modified_base 15: mod_base = OTHER; note = 2'-O-methylcytidine-3'-phosphate
  modified_base 16: mod_base = OTHER; note = 2'-deoxy-2'-fluoroadenosine-3'-phosphate
  modified_base 17: mod_base = OTHER; note = 2'-O-methylcytidine-3'-phosphate
  modified_base 18: mod_base = OTHER; note = 2'-deoxy-2'-fluoroadenosine-3'-phosphate
  modified_base 19: mod_base = OTHER; note = 2'-O-methyluridine-3'-phosphate
  modified_base 20: mod_base = OTHER; note = 2'-deoxy-2'-fluorouridine-3'-phosphate
  modified_base 21: mod_base = OTHER; note = 2'-O-methylcytidine-3'-phosphorothioate
  modified_base 22: mod_base = OTHER; note = 2'-O-methyluridine-3'-phosphorothioate
  modified_base 23: mod_base = OTHER; note = 2'-O-methylguanosine
ttgtcgatgactttcacattctg

SEQ ID NO: 307 - RNA, 23 nt, synthetic construct
  source 1..23: mol_type = other RNA
  modified_base 1: mod_base = OTHER; note = 2'-O-methyluridine-3'-phosphorothioate
  modified_base 2: mod_base = OTHER; note = 2'-deoxy-2'-fluorouridine-3'-phosphorothioate
  modified_base 3: mod_base = OTHER; note = 2'-O-methylguanosine-3'-phosphate
  modified_base 4: mod_base = OTHER; note = 2'-deoxy-2'-fluorouridine-3'-phosphate
  modified_base 5: mod_base = OTHER; note = 2'-O-methylcytidine-3'-phosphate
  modified_base 6: mod_base = OTHER; note = 2'-deoxy-2'-fluoroguanosine-3'-phosphate
  modified_base 7: mod_base = OTHER; note = 2'-O-methyladenosine-3'-phosphate
  modified_base 8: mod_base = OTHER; note = 2'-deoxy-2'-fluorouridine-3'-phosphate
  modified_base 9: mod_base = OTHER; note = 2'-O-methylguanosine-3'-phosphate
  modified_base 10: mod_base = OTHER; note = 2'-deoxy-2'-fluoroadenosine-3'-phosphate
  modified_base 11: mod_base = OTHER; note = 2'-O-methylcytidine-3'-phosphate
  modified_base 12: mod_base = OTHER; note = 2'-O-methyluridine-3'-phosphate
  modified_base 13: mod_base = OTHER; note = 2'-O-methyluridine-3'-phosphate
  modified_base 14: mod_base = OTHER; note = 2'-deoxy-2'-fluorouridine-3'-phosphate
  modified_base 15: mod_base = OTHER; note = 2'-O-methylcytidine-3'-phosphate
  modified_base 16: mod_base = OTHER; note = 2'-deoxy-2'-fluoroadenosine-3'-phosphate
  modified_base 17: mod_base = OTHER; note = 2'-O-methylcytidine-3'-phosphate
  modified_base 18: mod_base = OTHER; note = 2'-deoxy-2'-fluoroadenosine-3'-phosphate
  modified_base 19: mod_base = OTHER; note = 2'-O-methyluridine-3'-phosphate
  modified_base 20: mod_base = OTHER; note = 2'-deoxy-2'-fluorouridine-3'-phosphate
  modified_base 21: mod_base = OTHER; note = 2'-O-methylcytidine-3'-phosphorothioate
  modified_base 22: mod_base = OTHER; note = 2'-O-methyluridine-3'-phosphorothioate
  modified_base 23: mod_base = OTHER; note = 2'-O-methylguanosine
ttgtcgatgactttcacattctg

SEQ ID NO: 308 - RNA, 23 nt, synthetic construct
  source 1..23: mol_type = other RNA
  modified_base 1: mod_base = OTHER; note = 2'-O-methyluridine-3'-phosphorothioate
  modified_base 2: mod_base = OTHER; note = 2'-deoxy-2'-fluorouridine-3'-phosphorothioate
  modified_base 3: mod_base = OTHER; note = 2'-O-methylguanosine-3'-phosphate
  modified_base 4: mod_base = OTHER; note = 2'-deoxy-2'-fluorouridine-3'-phosphate
  modified_base 5: mod_base = OTHER; note = 2'-O-methylcytidine-3'-phosphate
  modified_base 6: mod_base = OTHER; note = 2'-deoxy-2'-fluoroguanosine-3'-phosphate
  modified_base 7: mod_base = OTHER; note = 2'-O-methyladenosine-3'-phosphate
  modified_base 8: mod_base = OTHER; note = 2'-deoxy-2'-fluorouridine-3'-phosphate
  modified_base 9: mod_base = OTHER; note = 2'-O-methylguanosine-3'-phosphate
  modified_base 10: mod_base = OTHER; note = 2'-deoxy-2'-fluoroadenosine-3'-phosphate
  modified_base 11: mod_base = OTHER; note = 2'-O-methylcytidine-3'-phosphate
  modified_base 12: mod_base = OTHER; note = 2'-O-methyluridine-3'-phosphate
  modified_base 13: mod_base = OTHER; note = 2'-O-methyluridine-3'-phosphate
  modified_base 14: mod_base = OTHER; note = 2'-deoxy-2'-fluorouridine-3'-phosphate
  modified_base 15: mod_base = OTHER; note = 2'-O-methylcytidine-3'-phosphate
  modified_base 16: mod_base = OTHER; note = 2'-deoxy-2'-fluoroadenosine-3'-phosphate
  modified_base 17: mod_base = OTHER; note = 2'-O-methylcytidine-3'-phosphate
  modified_base 18: mod_base = OTHER; note = 2'-deoxy-2'-fluoroadenosine-3'-phosphate
  modified_base 19: mod_base = OTHER; note = 2'-O-methyluridine-3'-phosphate
  modified_base 20: mod_base = OTHER; note = 2'-deoxy-2'-fluorouridine-3'-phosphate
  modified_base 21: mod_base = OTHER; note = 2'-O-methylcytidine-3'-phosphorothioate
  modified_base 22: mod_base = OTHER; note = 2'-O-methyluridine-3'-phosphorothioate
  modified_base 23: mod_base = OTHER; note = 2'-O-methylguanosine
ttgtcgatgactttcacattctg

SEQ ID NO: 309 - DNA, 23 bp, synthetic construct
  source 1..23: mol_type = other DNA
  modified_base 1: mod_base = OTHER; note = 2'-O-methyluridine-3'-phosphorothioate
  modified_base 2: mod_base = OTHER; note = 2'-deoxythymidine-3'-phosphorothioate
  modified_base 3: mod_base = OTHER; note = 2'-O-methylguanosine-3'-phosphate
  modified_base 4: mod_base = OTHER; note = 2'-O-methyluridine-3'-phosphate
  modified_base 5: mod_base = OTHER; note = 2'-O-methylcytidine-3'-phosphate
  modified_base 6: mod_base = OTHER; note = 2'-O-methylguanosine-3'-phosphate
  modified_base 7: mod_base = OTHER; note = 2'-O-methyladenosine-3'-phosphate
  modified_base 8: mod_base = OTHER; note = 2'-O-methyluridine-3'-phosphate
  modified_base 9: mod_base = OTHER; note = 2'-O-methylguanosine-3'-phosphate
  modified_base 11: mod_base = OTHER; note = 2'-O-methylcytidine-3'-phosphate
  modified_base 12: mod_base = OTHER; note = 2'-O-methyluridine-3'-phosphate
  modified_base 13: mod_base = OTHER; note = 2'-O-methyluridine-3'-phosphate
  modified_base 15: mod_base = OTHER; note = 2'-O-methylcytidine-3'-phosphate
  modified_base 16: mod_base = OTHER; note = 2'-O-methyladenosine-3'-phosphate
  modified_base 17: mod_base = OTHER; note = 2'-O-methylcytidine-3'-phosphate
  modified_base 18: mod_base = OTHER; note = 2'-O-methyladenosine-3'-phosphate
  modified_base 19: mod_base = OTHER; note = 2'-O-methyluridine-3'-phosphate
  modified_base 20: mod_base = OTHER; note = 2'-O-methyluridine-3'-phosphate
  modified_base 21: mod_base = OTHER; note = 2'-O-methylcytidine-3'-phosphorothioate
  modified_base 22: mod_base = OTHER; note = 2'-O-methyluridine-3'-phosphorothioate
  modified_base 23: mod_base = OTHER; note = 2'-O-methylguanosine
  misc_feature 1: note = RNA
  misc_feature 3..9: note = RNA
  misc_feature 11..13: note = RNA
  misc_feature 15..23: note = RNA
  misc_feature 2: note = DNA
  misc_feature 10: note = DNA
  misc_feature 14: note = DNA
ttgtcgatgactttcacattctg

SEQ ID NO: 310 - DNA, 23 bp, synthetic construct
  source 1..23: mol_type = other DNA
  modified_base 1: mod_base = OTHER; note = 2'-O-methyluridine-3'-phosphorothioate
  modified_base 2: mod_base = OTHER; note = uridine-3'-phosphorothioate
  modified_base 3: mod_base = OTHER; note = 2'-O-methylguanosine-3'-phosphate
  modified_base 4: mod_base = OTHER; note = 2'-O-methyluridine-3'-phosphate
  modified_base 5: mod_base = OTHER; note = 2'-O-methylcytidine-3'-phosphate
  modified_base 6: mod_base = OTHER; note = 2'-O-methylguanosine-3'-phosphate
  modified_base 7: mod_base = OTHER; note = 2'-O-methyladenosine-3'-phosphate
  modified_base 8: mod_base = OTHER; note = 2'-O-methyluridine-3'-phosphate
  modified_base 9: mod_base = OTHER; note = 2'-O-methylguanosine-3'-phosphate
  modified_base 10: mod_base = OTHER; note = 2'-O-methyladenosine-3'-phosphate
  modified_base 11: mod_base = OTHER; note = 2'-O-methylcytidine-3'-phosphate
  modified_base 12: mod_base = OTHER; note = 2'-O-methyluridine-3'-phosphate
  modified_base 13: mod_base = OTHER; note = 2'-O-methyluridine-3'-phosphate
  modified_base 15: mod_base = OTHER; note = 2'-O-methylcytidine-3'-phosphate
  modified_base 16: mod_base = OTHER; note = 2'-O-methyladenosine-3'-phosphate
  modified_base 17: mod_base = OTHER; note = 2'-O-methylcytidine-3'-phosphate
  modified_base 18: mod_base = OTHER; note = 2'-O-methyladenosine-3'-phosphate
  modified_base 19: mod_base = OTHER; note = 2'-O-methyluridine-3'-phosphate
  modified_base 20: mod_base = OTHER; note = 2'-O-methyluridine-3'-phosphate
  modified_base 21: mod_base = OTHER; note = 2'-O-methylcytidine-3'-phosphorothioate
  modified_base 22: mod_base = OTHER; note = 2'-O-methyluridine-3'-phosphorothioate
  modified_base 23: mod_base = OTHER; note = 2'-O-methylguanosine
  misc_feature 1..13: note = RNA
  misc_feature 15..23: note = RNA
  misc_feature 14: note = DNA
ttgtcgatgactttcacattctg

SEQ ID NO: 311 - DNA, 23 bp, synthetic construct
  source 1..23: mol_type = other DNA
  modified_base 1: mod_base = OTHER; note = 2'-O-methyluridine-3'-phosphorothioate
  modified_base 2: mod_base = OTHER; note = 2'-deoxythymidine-3'-phosphorothioate
  modified_base 3: mod_base = OTHER; note = 2'-O-methylguanosine-3'-phosphate
  modified_base 4: mod_base = OTHER; note = 2'-O-methyluridine-3'-phosphate
  modified_base 5: mod_base = OTHER; note = 2'-O-methylcytidine-3'-phosphate
  modified_base 7: mod_base = OTHER; note = 2'-O-methyladenosine-3'-phosphate
  modified_base 8: mod_base = OTHER; note = 2'-O-methyluridine-3'-phosphate
  modified_base 9: mod_base = OTHER; note = 2'-O-methylguanosine-3'-phosphate
  modified_base 10: mod_base = OTHER; note = 2'-O-methyladenosine-3'-phosphate
  modified_base 11: mod_base = OTHER; note = 2'-O-methylcytidine-3'-phosphate
  modified_base 12: mod_base = OTHER; note = 2'-O-methyluridine-3'-phosphate
  modified_base 13: mod_base = OTHER; note = 2'-O-methyluridine-3'-phosphate
  modified_base 15: mod_base = OTHER; note = 2'-O-methylcytidine-3'-phosphate
  modified_base 16: mod_base = OTHER; note = 2'-O-methyladenosine-3'-phosphate
  modified_base 17: mod_base = OTHER; note = 2'-O-methylcytidine-3'-phosphate
  modified_base 18: mod_base = OTHER; note = 2'-O-methyladenosine-3'-phosphate
  modified_base 19: mod_base = OTHER; note = 2'-O-methyluridine-3'-phosphate
  modified_base 20: mod_base = OTHER; note = 2'-O-methyluridine-3'-phosphate
  modified_base 21: mod_base = OTHER; note = 2'-O-methylcytidine-3'-phosphorothioate
  modified_base 22: mod_base = OTHER; note = 2'-O-methyluridine-3'-phosphorothioate
  modified_base 23: mod_base = OTHER; note = 2'-O-methylguanosine
  misc_feature 1: note = RNA
  misc_feature 3..5: note = RNA
  misc_feature 7..13: note = RNA
  misc_feature 15..23: note = RNA
  misc_feature 2: note = DNA
  misc_feature 6: note = DNA
  misc_feature 14: note = DNA
ttgtcgatgactttcacattctg

SEQ ID NO: 312 - DNA, 23 bp, synthetic construct
  source 1..23: mol_type = other DNA
  modified_base 1: mod_base = OTHER; note = 2'-O-methyluridine-3'-phosphorothioate
  modified_base 2: mod_base = OTHER; note = uridine-3'-phosphorothioate
  modified_base 3: mod_base = OTHER; note = 2'-O-methylguanosine-3'-phosphate
  modified_base 4: mod_base = OTHER; note = 2'-O-methyluridine-3'-phosphate
  modified_base 5: mod_base = OTHER; note = 2'-O-methylcytidine-3'-phosphate
  modified_base 7: mod_base = OTHER; note = 2'-O-methyladenosine-3'-phosphate
  modified_base 8: mod_base = OTHER; note = 2'-O-methyluridine-3'-phosphate
  modified_base 9: mod_base = OTHER; note = 2'-O-methylguanosine-3'-phosphate
  modified_base 10: mod_base = OTHER; note = 2'-O-methyladenosine-3'-phosphate
  modified_base 11: mod_base = OTHER; note = 2'-O-methylcytidine-3'-phosphate
  modified_base 12: mod_base = OTHER; note = 2'-O-methyluridine-3'-phosphate
  modified_base 13: mod_base = OTHER; note = 2'-O-methyluridine-3'-phosphate
  modified_base 15: mod_base = OTHER; note = 2'-O-methylcytidine-3'-phosphate
  modified_base 16: mod_base = OTHER; note = 2'-O-methyladenosine-3'-phosphate
  modified_base 17: mod_base = OTHER; note = 2'-O-methylcytidine-3'-phosphate
  modified_base 18: mod_base = OTHER; note = 2'-O-methyladenosine-3'-phosphate
  modified_base 19: mod_base = OTHER; note = 2'-O-methyluridine-3'-phosphate
  modified_base 20: mod_base = OTHER; note = 2'-O-methyluridine-3'-phosphate
  modified_base 21: mod_base = OTHER; note = 2'-O-methylcytidine-3'-phosphorothioate
  modified_base 22: mod_base = OTHER; note = 2'-O-methyluridine-3'-phosphorothioate
  modified_base 23: mod_base = OTHER; note = 2'-O-methylguanosine
  misc_feature 1..5: note = RNA
  misc_feature 7..13: note = RNA
  misc_feature 15..23: note = RNA
  misc_feature 6: note = DNA
  misc_feature 14: note = DNA
ttgtcgatgactttcacattctg

SEQ ID NO: 313 - DNA, 23 bp, synthetic construct
  source 1..23: mol_type = other DNA
  modified_base 1: mod_base = OTHER; note = 2'-O-methyluridine-3'-phosphorothioate
  modified_base 2: mod_base = OTHER; note = 2'-deoxythymidine-3'-phosphorothioate
  modified_base 3: mod_base = OTHER; note = 2'-O-methylguanosine-3'-phosphate
  modified_base 4: mod_base = OTHER; note = 2'-O-methyluridine-3'-phosphate
  modified_base 5: mod_base = OTHER; note = 2'-O-methylcytidine-3'-phosphate
  modified_base 6: mod_base = OTHER; note = 2'-O-methylguanosine-3'-phosphate
  modified_base 7: mod_base = OTHER; note = 2'-O-methyladenosine-3'-phosphate
  modified_base 8: mod_base = OTHER; note = 2'-O-methyluridine-3'-phosphate
  modified_base 9: mod_base = OTHER; note = 2'-O-methylguanosine-3'-phosphate
  modified_base 10: mod_base = OTHER; note = 2'-O-methyladenosine-3'-phosphate
  modified_base 11: mod_base = OTHER; note = 2'-O-methylcytidine-3'-phosphate
  modified_base 12: mod_base = OTHER; note = 2'-O-methyluridine-3'-phosphate
  modified_base 13: mod_base = OTHER; note = 2'-O-methyluridine-3'-phosphate
  modified_base 15: mod_base = OTHER; note = 2'-O-methylcytidine-3'-phosphate
  modified_base 17: mod_base = OTHER; note = 2'-O-methylcytidine-3'-phosphate
  modified_base 18: mod_base = OTHER; note = 2'-O-methyladenosine-3'-phosphate
  modified_base 19: mod_base = OTHER; note = 2'-O-methyluridine-3'-phosphate
  modified_base 20: mod_base = OTHER; note = 2'-O-methyluridine-3'-phosphate
  modified_base 21: mod_base = OTHER; note = 2'-O-methylcytidine-3'-phosphorothioate
  modified_base 22: mod_base = OTHER; note = 2'-O-methyluridine-3'-phosphorothioate
  modified_base 23: mod_base = OTHER; note = 2'-O-methylguanosine
  misc_feature 1: note = RNA
  misc_feature 3..13: note = RNA
  misc_feature 15: note = RNA
  misc_feature 17..23: note = RNA
  misc_feature 2: note = DNA
  misc_feature 14: note = DNA
  misc_feature 16: note = DNA
ttgtcgatgactttcacattctg

SEQ ID NO: 314 - DNA, 23 bp, synthetic construct
  source 1..23: mol_type = other DNA
  modified_base 1: mod_base = OTHER; note = 2'-O-methyluridine-3'-phosphorothioate
  modified_base 2: mod_base = OTHER; note = 2'-deoxythymidine-3'-phosphorothioate
  modified_base 3: mod_base = OTHER; note = 2'-O-methylguanosine-3'-phosphate
  modified_base 4: mod_base = OTHER; note = 2'-O-methyluridine-3'-phosphate
  modified_base 5: mod_base = OTHER; note = 2'-O-methylcytidine-3'-phosphate
  modified_base 7: mod_base = OTHER; note = 2'-O-methyladenosine-3'-phosphate
  modified_base 8: mod_base = OTHER; note = 2'-O-methyluridine-3'-phosphate
  modified_base 9: mod_base = OTHER; note = 2'-O-methylguanosine-3'-phosphate
  modified_base 10: mod_base = OTHER; note = 2'-O-methyladenosine-3'-phosphate
  modified_base 11: mod_base = OTHER; note = 2'-O-methylcytidine-3'-phosphate
  modified_base 12: mod_base = OTHER; note = 2'-O-methyluridine-3'-phosphate
  modified_base 13: mod_base = OTHER; note = 2'-O-methyluridine-3'-phosphate
  modified_base 15: mod_base = OTHER; note = 2'-O-methylcytidine-3'-phosphate
  modified_base 17: mod_base = OTHER; note = 2'-O-methylcytidine-3'-phosphate
  modified_base 18: mod_base = OTHER; note = 2'-O-methyladenosine-3'-phosphate
  modified_base 19: mod_base = OTHER; note = 2'-O-methyluridine-3'-phosphate
  modified_base 20: mod_base = OTHER; note = 2'-O-methyluridine-3'-phosphate
  modified_base 21: mod_base = OTHER; note = 2'-O-methylcytidine-3'-phosphorothioate
  modified_base 22: mod_base = OTHER; note = 2'-O-methyluridine-3'-phosphorothioate
  modified_base 23: mod_base = OTHER; note = 2'-O-methylguanosine
  misc_feature 1: note = RNA
  misc_feature 3..5: note = RNA
  misc_feature 7..13: note = RNA
  misc_feature 15: note = RNA
  misc_feature 17..23: note = RNA
  misc_feature 2: note = DNA
  misc_feature 6: note = DNA
  misc_feature 14: note = DNA
  misc_feature 16: note = DNA
ttgtcgatgactttcacattctg

SEQ ID NO: 315 - DNA, 23 bp, synthetic construct
  source 1..23: mol_type = other DNA
  modified_base 1: mod_base = OTHER; note = 2'-O-methyluridine-3'-phosphorothioate
  modified_base 2: mod_base = OTHER; note = 2'-deoxythymidine-3'-phosphorothioate
  modified_base 3: mod_base = OTHER; note = 2'-O-methylguanosine-3'-phosphate
  modified_base 4: mod_base = OTHER; note = 2'-O-methyluridine-3'-phosphate
  modified_base 5: mod_base = OTHER; note = 2'-O-methylcytidine-3'-phosphate
  modified_base 6: mod_base = OTHER; note = 2'-O-methylguanosine-3'-phosphate
  modified_base 7: mod_base = OTHER; note = 2'-O-methyladenosine-3'-phosphate
  modified_base 8: mod_base = OTHER; note = 2'-O-methyluridine-3'-phosphate
  modified_base 9: mod_base = OTHER; note = 2'-O-methylguanosine-3'-phosphate
  modified_base 11: mod_base = OTHER; note = 2'-O-methylcytidine-3'-phosphate
  modified_base 12: mod_base = OTHER; note = 2'-O-methyluridine-3'-phosphate
  modified_base 13: mod_base = OTHER; note = 2'-O-methyluridine-3'-phosphate
  modified_base 15: mod_base = OTHER; note = 2'-O-methylcytidine-3'-phosphate
  modified_base 16: mod_base = OTHER; note = 2'-O-methyladenosine-3'-phosphate
  modified_base 17: mod_base = OTHER; note = 2'-O-methylcytidine-3'-phosphate
  modified_base 18: mod_base = OTHER; note = 2'-O-methyladenosine-3'-phosphate
  modified_base 19: mod_base = OTHER; note = 2'-O-methyluridine-3'-phosphate
  modified_base 20: mod_base = OTHER; note = 2'-O-methyluridine-3'-phosphate
  modified_base 21: mod_base = OTHER; note = 2'-O-methylcytidine-3'-phosphorothioate
  modified_base 22: mod_base = OTHER; note = 2'-O-methyluridine-3'-phosphorothioate
  modified_base 23: mod_base = OTHER; note = 2'-O-methylguanosine
  misc_feature 1: note = RNA
  misc_feature 3..9: note = RNA
  misc_feature 11..13: note = RNA
  misc_feature 15..23: note = RNA
  misc_feature 2: note = DNA
  misc_feature 10: note = DNA
  misc_feature 14: note = DNA
ttgtcgatgactttcacattctg

SEQ ID NO: 316 - RNA, 23 nt, synthetic construct
  source 1..23: mol_type = other RNA
  modified_base 1: mod_base = OTHER; note = 2'-O-methyluridine-3'-phosphorothioate
  modified_base 2: mod_base = OTHER; note = 2'-deoxy-2'-fluoroadenosine-3'-phosphorothioate
  modified_base 3: mod_base = OTHER; note = 2'-O-methyluridine-3'-phosphate
  modified_base 4: mod_base = OTHER; note = 2'-deoxy-2'-fluoroadenosine-3'-phosphate
  modified_base 5: mod_base = OTHER; note = 2'-O-methyluridine-3'-phosphate
  modified_base 6: mod_base = OTHER; note = 2'-deoxy-2'-fluorouridine-3'-phosphate
  modified_base 7: mod_base = OTHER; note = 2'-O-methyluridine-3'-phosphate
  modified_base 8: mod_base = OTHER; note = 2'-deoxy-2'-fluorocytidine-3'-phosphate
  modified_base 9: mod_base = OTHER; note = 2'-O-methylcytidine-3'-phosphate
  modified_base 10: mod_base = OTHER; note = 2'-deoxy-2'-fluoroadenosine-3'-phosphate
  modified_base 11: mod_base = OTHER; note = 2'-O-methylguanosine-3'-phosphate
  modified_base 12: mod_base = OTHER; note = 2'-O-methylguanosine-3'-phosphate
  modified_base 13: mod_base = OTHER; note = 2'-O-methyladenosine-3'-phosphate
  modified_base 14: mod_base = OTHER; note = 2'-deoxy-2'-fluorouridine-3'-phosphate
  modified_base 15: mod_base = OTHER; note = 2'-O-methylguanosine-3'-phosphate
  modified_base 16: mod_base = OTHER; note = 2'-deoxy-2'-fluoroadenosine-3'-phosphate
  modified_base 17: mod_base = OTHER; note = 2'-O-methyladenosine-3'-phosphate
  modified_base 18: mod_base = OTHER; note = 2'-deoxy-2'-fluoroadenosine-3'-phosphate
  modified_base 19: mod_base = OTHER; note = 2'-O-methylguanosine-3'-phosphate
  modified_base 20: mod_base = OTHER; note = 2'-deoxy-2'-fluorouridine-3'-phosphate
  modified_base 21: mod_base = OTHER; note = 2'-O-methylcytidine-3'-phosphorothioate
  modified_base 22: mod_base = OTHER; note = 2'-O-methylcytidine-3'-phosphorothioate
  modified_base 23: mod_base = OTHER; note = 2'-O-methyladenosine
tatatttccaggatgaaagtcca

SEQ ID NO: 317 - RNA, 23 nt, synthetic construct
  source 1..23: mol_type = other RNA
  modified_base 1: mod_base = OTHER; note = 2'-O-methyluridine-3'-phosphorothioate
  modified_base 2: mod_base = OTHER; note = 2'-deoxy-2'-fluoroadenosine-3'-phosphorothioate
  modified_base 3: mod_base = OTHER; note = 2'-O-methyluridine-3'-phosphate
  modified_base 4: mod_base = OTHER; note = 2'-deoxy-2'-fluoroadenosine-3'-phosphate
  modified_base 5: mod_base = OTHER; note = 2'-O-methyluridine-3'-phosphate
  modified_base 6: mod_base = OTHER; note = 2'-deoxy-2'-fluorouridine-3'-phosphate
  modified_base 7: mod_base = OTHER; note = 2'-O-methyluridine-3'-phosphate
  modified_base 8: mod_base = OTHER; note = 2'-deoxy-2'-fluorocytidine-3'-phosphate
  modified_base 9: mod_base = OTHER; note = 2'-O-methylcytidine-3'-phosphate
  modified_base 10: mod_base = OTHER; note = 2'-deoxy-2'-fluoroadenosine-3'-phosphate
  modified_base 11: mod_base = OTHER; note = 2'-O-methylguanosine-3'-phosphate
  modified_base 12: mod_base = OTHER; note = 2'-O-methylguanosine-3'-phosphate
  modified_base 13: mod_base = OTHER; note = 2'-O-methyladenosine-3'-phosphate
  modified_base 14: mod_base = OTHER; note = 2'-deoxy-2'-fluorouridine-3'-phosphate
  modified_base 15: mod_base = OTHER; note = 2'-O-methylguanosine-3'-phosphate
  modified_base 16: mod_base = OTHER; note = 2'-deoxy-2'-fluoroadenosine-3'-phosphate
  modified_base 17: mod_base = OTHER; note = 2'-O-methyladenosine-3'-phosphate
  modified_base 18: mod_base = OTHER; note = 2'-deoxy-2'-fluoroadenosine-3'-phosphate
  modified_base 19: mod_base = OTHER; note = 2'-O-methylguanosine-3'-phosphate
  modified_base 20: mod_base = OTHER; note = 2'-deoxy-2'-fluorouridine-3'-phosphate
  modified_base 21: mod_base = OTHER; note = 2'-O-methylcytidine-3'-phosphorothioate
  modified_base 22: mod_base = OTHER; note = 2'-O-methylcytidine-3'-phosphorothioate
  modified_base 23: mod_base = OTHER; note = 2'-O-methyladenosine
tatatttccaggatgaaagtcca

SEQ ID NO: 318 - RNA, 23 nt, synthetic construct
  source 1..23: mol_type = other RNA
  modified_base 1: mod_base = OTHER; note = 2'-O-methyluridine-3'-phosphorothioate
  modified_base 2: mod_base = OTHER; note = 2'-deoxy-2'-fluoroadenosine-3'-phosphorothioate
  modified_base 3: mod_base = OTHER; note = 2'-O-methyluridine-3'-phosphate
  modified_base 4: mod_base = OTHER; note = 2'-deoxy-2'-fluoroadenosine-3'-phosphate
  modified_base 5: mod_base = OTHER; note = 2'-O-methyluridine-3'-phosphate
  modified_base 6: mod_base = OTHER; note = 2'-deoxy-2'-fluorouridine-3'-phosphate
  modified_base 7: mod_base = OTHER; note = 2'-O-methyluridine-3'-phosphate
  modified_base 8: mod_base = OTHER; note = 2'-deoxy-2'-fluorocytidine-3'-phosphate
  modified_base 9: mod_base = OTHER; note = 2'-O-methylcytidine-3'-phosphate
  modified_base 10: mod_base = OTHER; note = 2'-deoxy-2'-fluoroadenosine-3'-phosphate
  modified_base 11: mod_base = OTHER; note = 2'-O-methylguanosine-3'-phosphate
  modified_base 12: mod_base = OTHER; note = 2'-O-methylguanosine-3'-phosphate
  modified_base 13: mod_base = OTHER; note = 2'-O-methyladenosine-3'-phosphate
  modified_base 14: mod_base = OTHER; note = 2'-deoxy-2'-fluorouridine-3'-phosphate
  modified_base 15: mod_base = OTHER; note = 2'-O-methylguanosine-3'-phosphate
  modified_base 16: mod_base = OTHER; note = 2'-deoxy-2'-fluoroadenosine-3'-phosphate
  modified_base 17: mod_base = OTHER; note = 2'-O-methyladenosine-3'-phosphate
  modified_base 18: mod_base = OTHER; note = 2'-deoxy-2'-fluoroadenosine-3'-phosphate
  modified_base 19: mod_base = OTHER; note = 2'-O-methylguanosine-3'-phosphate
  modified_base 20: mod_base = OTHER; note = 2'-deoxy-2'-fluorouridine-3'-phosphate
  modified_base 21: mod_base = OTHER; note = 2'-O-methylcytidine-3'-phosphorothioate
  modified_base 22: mod_base = OTHER; note = 2'-O-methylcytidine-3'-phosphorothioate
  modified_base 23: mod_base = OTHER; note = 2'-O-methyladenosine
tatatttccaggatgaaagtcca

SEQ ID NO: 319 - RNA, 23 nt, synthetic construct
  source 1..23: mol_type = other RNA
  modified_base 1: mod_base = OTHER; note = 2'-O-methyluridine-3'-phosphorothioate
  modified_base 2: mod_base = OTHER; note = 2'-deoxy-2'-fluoroadenosine-3'-phosphorothioate
  modified_base 3: mod_base = OTHER; note = 2'-O-methyluridine-3'-phosphate
  modified_base 4: mod_base = OTHER; note = 2'-deoxy-2'-fluoroadenosine-3'-phosphate
  modified_base 5: mod_base = OTHER; note = 2'-O-methyluridine-3'-phosphate
  modified_base 6: mod_base = OTHER; note = 2'-deoxy-2'-fluorouridine-3'-phosphate
  modified_base 7: mod_base = OTHER; note = 2'-O-methyluridine-3'-phosphate
  modified_base 8: mod_base = OTHER; note = 2'-deoxy-2'-fluorocytidine-3'-phosphate
  modified_base 9: mod_base = OTHER; note = 2'-O-methylcytidine-3'-phosphate
  modified_base 10: mod_base = OTHER; note = 2'-deoxy-2'-fluoroadenosine-3'-phosphate
  modified_base 11: mod_base = OTHER; note = 2'-O-methylguanosine-3'-phosphate
  modified_base 12: mod_base = OTHER; note = 2'-O-methylguanosine-3'-phosphate
  modified_base 13: mod_base = OTHER; note = 2'-O-methyladenosine-3'-phosphate
  modified_base 14: mod_base = OTHER; note = 2'-deoxy-2'-fluorouridine-3'-phosphate
  modified_base 15: mod_base = OTHER; note = 2'-O-methylguanosine-3'-phosphate
  modified_base 16: mod_base = OTHER; note = 2'-deoxy-2'-fluoroadenosine-3'-phosphate
  modified_base 17: mod_base = OTHER; note = 2'-O-methyladenosine-3'-phosphate
  modified_base 18: mod_base = OTHER; note = 2'-deoxy-2'-fluoroadenosine-3'-phosphate
  modified_base 19: mod_base = OTHER; note = 2'-O-methylguanosine-3'-phosphate
  modified_base 20: mod_base = OTHER; note = 2'-deoxy-2'-fluorouridine-3'-phosphate
  modified_base 21: mod_base = OTHER; note = 2'-O-methylcytidine-3'-phosphorothioate
  modified_base 22: mod_base = OTHER; note = 2'-O-methylcytidine-3'-phosphorothioate
  modified_base 23: mod_base = OTHER; note = 2'-O-methyladenosine
tatatttccaggatgaaagtcca

SEQ ID NO: 320 - RNA, 23 nt, synthetic construct
  source 1..23: mol_type = other RNA
  modified_base 1: mod_base = OTHER; note = 2'-O-methyluridine-3'-phosphorothioate
  modified_base 2: mod_base = OTHER; note = 2'-deoxy-2'-fluoroadenosine-3'-phosphorothioate
  modified_base 3: mod_base = OTHER; note = 2'-O-methyluridine-3'-phosphate
  modified_base 4: mod_base = OTHER; note = 2'-deoxy-2'-fluoroadenosine-3'-phosphate
  modified_base 5: mod_base = OTHER; note = 2'-O-methyluridine-3'-phosphate
  modified_base 6: mod_base = OTHER; note = 2'-deoxy-2'-fluorouridine-3'-phosphate
  modified_base 7: mod_base = OTHER; note = 2'-O-methyluridine-3'-phosphate
  modified_base 8: mod_base = OTHER; note = 2'-deoxy-2'-fluorocytidine-3'-phosphate
  modified_base 9: mod_base = OTHER; note = 2'-O-methylcytidine-3'-phosphate
  modified_base 10: mod_base = OTHER; note = 2'-deoxy-2'-fluoroadenosine-3'-phosphate
  modified_base 11: mod_base = OTHER; note = 2'-O-methylguanosine-3'-phosphate
  modified_base 12: mod_base = OTHER; note = 2'-O-methylguanosine-3'-phosphate
  modified_base 13: mod_base = OTHER; note = 2'-O-methyladenosine-3'-phosphate
  modified_base 14: mod_base = OTHER; note = 2'-deoxy-2'-fluorouridine-3'-phosphate
  modified_base 15: mod_base = OTHER; note = 2'-O-methylguanosine-3'-phosphate
  modified_base 16: mod_base = OTHER; note = 2'-deoxy-2'-fluoroadenosine-3'-phosphate
  modified_base 17: mod_base = OTHER; note = 2'-O-methyladenosine-3'-phosphate
  modified_base 18: mod_base = OTHER; note = 2'-deoxy-2'-fluoroadenosine-3'-phosphate
  modified_base 19: mod_base = OTHER; note = 2'-O-methylguanosine-3'-phosphate
  modified_base 20: mod_base = OTHER; note = 2'-deoxy-2'-fluorouridine-3'-phosphate
  modified_base 21: mod_base = OTHER; note = 2'-O-methylcytidine-3'-phosphorothioate
  modified_base 22: mod_base = OTHER; note = 2'-O-methylcytidine-3'-phosphorothioate
  modified_base 23: mod_base = OTHER; note = 2'-O-methyladenosine
tatatttccaggatgaaagtcca

SEQ ID NO: 321 - RNA, 23 nt, synthetic construct
  source 1..23: mol_type = other RNA
  modified_base 1: mod_base = OTHER; note = 2'-O-methyluridine-3'-phosphorothioate
  modified_base 2: mod_base = OTHER; note = 2'-deoxy-2'-fluoroadenosine-3'-phosphorothioate
  modified_base 3: mod_base = OTHER; note = 2'-O-methyluridine-3'-phosphate
  modified_base 4: mod_base = OTHER; note = 2'-deoxy-2'-fluoroadenosine-3'-phosphate
  modified_base 5: mod_base = OTHER; note = 2'-O-methyluridine-3'-phosphate
  modified_base 6: mod_base = OTHER; note = 2'-deoxy-2'-fluorouridine-3'-phosphate
  modified_base 7: mod_base = OTHER; note = 2'-O-methyluridine-3'-phosphate
  modified_base 8: mod_base = OTHER; note = 2'-deoxy-2'-fluorocytidine-3'-phosphate
  modified_base 9: mod_base = OTHER; note = 2'-O-methylcytidine-3'-phosphate
  modified_base 10: mod_base = OTHER; note = 2'-deoxy-2'-fluoroadenosine-3'-phosphate
  modified_base 11: mod_base = OTHER; note = 2'-O-methylguanosine-3'-phosphate
  modified_base 12: mod_base = OTHER; note = 2'-O-methylguanosine-3'-phosphate
  modified_base 13: mod_base = OTHER; note = 2'-O-methyladenosine-3'-phosphate
  modified_base 14: mod_base = OTHER; note = 2'-deoxy-2'-fluorouridine-3'-phosphate
  modified_base 15: mod_base = OTHER; note = 2'-O-methylguanosine-3'-phosphate
  modified_base 16: mod_base = OTHER; note = 2'-deoxy-2'-fluoroadenosine-3'-phosphate
  modified_base 17: mod_base = OTHER; note = 2'-O-methyladenosine-3'-phosphate
  modified_base 18: mod_base = OTHER; note = 2'-deoxy-2'-fluoroadenosine-3'-phosphate
  modified_base 19: mod_base = OTHER; note = 2'-O-methylguanosine-3'-phosphate
  modified_base 20: mod_base = OTHER; note = 2'-deoxy-2'-fluorouridine-3'-phosphate
  modified_base 21: mod_base = OTHER; note = 2'-O-methylcytidine-3'-phosphorothioate
  modified_base 22: mod_base = OTHER; note = 2'-O-methylcytidine-3'-phosphorothioate
  modified_base 23: mod_base = OTHER; note = 2'-O-methyladenosine
tatatttccaggatgaaagtcca

SEQ ID NO: 322 - RNA, 21 nt, synthetic construct
  source 1..21: mol_type = other RNA
  modified_base 1: mod_base = OTHER; note = 2'-O-methyluridine-3'-phosphorothioate
  modified_base 2: mod_base = OTHER; note = 2'-deoxy-2'-fluoroadenosine-3'-phosphorothioate
  modified_base 3: mod_base = OTHER; note = 2'-O-methyluridine-3'-phosphate
  modified_base 4: mod_base = OTHER; note = 2'-deoxy-2'-fluoroadenosine-3'-phosphate
  modified_base 5: mod_base = OTHER; note = 2'-O-methyluridine-3'-phosphate
  modified_base 6: mod_base = OTHER; note = 2'-deoxy-2'-fluorouridine-3'-phosphate
  modified_base 7: mod_base = OTHER; note = 2'-O-methyluridine-3'-phosphate
  modified_base 8: mod_base = OTHER; note = 2'-deoxy-2'-fluorocytidine-3'-phosphate
  modified_base 9: mod_base = OTHER; note = 2'-O-methylcytidine-3'-phosphate
  modified_base 10: mod_base = OTHER; note = 2'-deoxy-2'-fluoroadenosine-3'-phosphate
  modified_base 11: mod_base = OTHER; note = 2'-O-methylguanosine-3'-phosphate
  modified_base 12: mod_base = OTHER; note = 2'-O-methylguanosine-3'-phosphate
  modified_base 13: mod_base = OTHER; note = 2'-O-methyladenosine-3'-phosphate
  modified_base 14: mod_base = OTHER; note = 2'-deoxy-2'-fluorouridine-3'-phosphate
  modified_base 15: mod_base = OTHER; note = 2'-O-methylguanosine-3'-phosphate
  modified_base 16: mod_base = OTHER; note = 2'-deoxy-2'-fluoroadenosine-3'-phosphate
  modified_base 17: mod_base = OTHER; note = 2'-O-methyladenosine-3'-phosphate
  modified_base 18: mod_base = OTHER; note = 2'-deoxy-2'-fluoroadenosine-3'-phosphate
  modified_base 19: mod_base = OTHER; note = 2'-O-methylguanosine-3'-phosphorothioate
  modified_base 20: mod_base = OTHER; note = 2'-O-methyluridine-3'-phosphorothioate
  modified_base 21: mod_base = OTHER; note = 2'-O-methylcytidine
tatatttccaggatgaaagtc

SEQ ID NO: 323 - RNA, 21 nt, synthetic construct
  source 1..21: mol_type = other RNA
  modified_base 1: mod_base = OTHER; note = 2'-O-methyluridine-3'-phosphorothioate
  modified_base 2: mod_base = OTHER; note = 2'-deoxy-2'-fluoroadenosine-3'-phosphorothioate
  modified_base 3: mod_base = OTHER; note = 2'-O-methyluridine-3'-phosphate
  modified_base 4: mod_base = OTHER; note = 2'-O-methyladenosine-3'-phosphate
  modified_base 5: mod_base = OTHER; note = 2'-O-methyluridine-3'-phosphate
  modified_base 6: mod_base = OTHER; note = 2'-deoxy-2'-fluorouridine-3'-phosphate
  modified_base 7: mod_base = OTHER; note = 2'-O-methyluridine-3'-phosphate
  modified_base 8: mod_base = OTHER; note = 2'-O-methylcytidine-3'-phosphate
  modified_base 9: mod_base = OTHER; note = 2'-O-methylcytidine-3'-phosphate
  modified_base 10: mod_base = OTHER; note = 2'-O-methyladenosine-3'-phosphate
  modified_base 11: mod_base = OTHER; note = 2'-O-methylguanosine-3'-phosphate
  modified_base 12: mod_base = OTHER; note = 2'-O-methylguanosine-3'-phosphate
  modified_base 13: mod_base = OTHER; note = 2'-O-methyladenosine-3'-phosphate
  modified_base 14: mod_base = OTHER; note = 2'-deoxy-2'-fluorouridine-3'-phosphate
  modified_base 15: mod_base = OTHER; note = 2'-O-methylguanosine-3'-phosphate
  modified_base 16: mod_base = OTHER; note = 2'-deoxy-2'-fluoroadenosine-3'-phosphate
  modified_base 17: mod_base = OTHER; note = 2'-O-methyladenosine-3'-phosphate
  modified_base 18: mod_base = OTHER; note = 2'-O-methyladenosine-3'-phosphate
  modified_base 19: mod_base = OTHER; note = 2'-O-methylguanosine-3'-phosphorothioate
  modified_base 20: mod_base = OTHER; note = 2'-O-methyluridine-3'-phosphorothioate
  modified_base 21: mod_base = OTHER; note = 2'-O-methylcytidine
tatatttccaggatgaaagtc

SEQ ID NO: 324 - RNA, 23 nt, synthetic construct
  source 1..23: mol_type = other RNA
  modified_base 1: mod_base = OTHER; note = 2'-O-methyluridine-3'-phosphorothioate
  modified_base 2: mod_base = OTHER; note = 2'-deoxy-2'-fluoroadenosine-3'-phosphorothioate
  modified_base 3: mod_base = OTHER; note = 2'-O-methyluridine-3'-phosphate
  modified_base 4: mod_base = OTHER; note = 2'-O-methyladenosine-3'-phosphate
  modified_base 5: mod_base = OTHER; note = 2'-O-methyluridine-3'-phosphate
  modified_base 6: mod_base = OTHER; note = 2'-deoxy-2'-fluorouridine-3'-phosphate
  modified_base 7: mod_base = OTHER; note = 2'-O-methyluridine-3'-phosphate
  modified_base 8: mod_base = OTHER; note = 2'-deoxy-2'-fluorocytidine-3'-phosphate
  modified_base 9: mod_base = OTHER; note = 2'-O-methylcytidine-3'-phosphate
  modified_base 10: mod_base = OTHER; note = 2'-deoxy-2'-fluoroadenosine-3'-phosphate
  modified_base 11: mod_base = OTHER; note = 2'-O-methylguanosine-3'-phosphate
  modified_base 12: mod_base = OTHER; note = 2'-O-methylguanosine-3'-phosphate
  modified_base 13: mod_base = OTHER; note = 2'-O-methyladenosine-3'-phosphate
  modified_base 14: mod_base = OTHER; note = 2'-deoxy-2'-fluorouridine-3'-phosphate
  modified_base 15: mod_base = OTHER; note = 2'-O-methylguanosine-3'-phosphate
  modified_base 16: mod_base = OTHER; note = 2'-deoxy-2'-fluoroadenosine-3'-phosphate
  modified_base 17: mod_base = OTHER; note = 2'-O-methyladenosine-3'-phosphate
  modified_base 18: mod_base = OTHER; note = 2'-O-methyladenosine-3'-phosphate
  modified_base 19: mod_base = OTHER; note = 2'-O-methylguanosine-3'-phosphate
  modified_base 20: mod_base = OTHER; note = 2'-O-methyluridine-3'-phosphate
  modified_base 21: mod_base = OTHER; note = 2'-O-methylcytidine-3'-phosphorothioate
  modified_base 22: mod_base = OTHER; note = 2'-O-methylcytidine-3'-phosphorothioate
  modified_base 23: mod_base = OTHER; note = 2'-O-methyladenosine
tatatttccaggatgaaagtcca

SEQ ID NO: 325 - RNA, 23 nt, synthetic construct
  source 1..23: mol_type = other RNA
  modified_base 1: mod_base = OTHER; note = 2'-O-methyluridine-3'-phosphorothioate
  modified_base 2: mod_base = OTHER; note = 2'-deoxy-2'-fluoroadenosine-3'-phosphorothioate
  modified_base 3: mod_base = OTHER; note = 2'-O-methyluridine-3'-phosphate
  modified_base 4: mod_base = OTHER; note = 2'-O-methyladenosine-3'-phosphate
  modified_base 5: mod_base = OTHER; note = 2'-O-methyluridine-3'-phosphate
  modified_base 6: mod_base = OTHER; note = 2'-deoxy-2'-fluorouridine-3'-phosphate
  modified_base 7: mod_base = OTHER; note = 2'-O-methyluridine-3'-phosphate
  modified_base 8: mod_base = OTHER; note = 2'-deoxy-2'-fluorocytidine-3'-phosphate
  modified_base 9: mod_base = OTHER; note = 2'-deoxy-2'-fluorocytidine-3'-phosphate
  modified_base 10: mod_base = OTHER; note = 2'-O-methyladenosine-3'-phosphate
  modified_base 11: mod_base = OTHER; note = 2'-O-methylguanosine-3'-phosphate
  modified_base 12: mod_base = OTHER; note = 2'-O-methylguanosine-3'-phosphate
  modified_base 13: mod_base = OTHER; note = 2'-O-methyladenosine-3'-phosphate
  modified_base 14: mod_base = OTHER; note = 2'-deoxy-2'-fluorouridine-3'-phosphate
  modified_base 15: mod_base = OTHER; note = 2'-O-methylguanosine-3'-phosphate
  modified_base 16: mod_base = OTHER; note = 2'-deoxy-2'-fluoroadenosine-3'-phosphate
  modified_base 17: mod_base = OTHER; note = 2'-O-methyladenosine-3'-phosphate
  modified_base 18: mod_base = OTHER; note = 2'-O-methyladenosine-3'-phosphate
  modified_base 19: mod_base = OTHER; note = 2'-O-methylguanosine-3'-phosphate
  modified_base 20: mod_base = OTHER; note = 2'-O-methyluridine-3'-phosphate
  modified_base 21: mod_base = OTHER; note = 2'-O-methylcytidine-3'-phosphorothioate
  modified_base 22: mod_base = OTHER; note = 2'-O-methylcytidine-3'-phosphorothioate
  modified_base 23: mod_base = OTHER; note = 2'-O-methyladenosine
tatatttccaggatgaaagtcca

SEQ ID NO: 326 - RNA, 23 nt, synthetic construct
  source 1..23: mol_type = other RNA
  modified_base 1: mod_base = OTHER; note = 2'-O-methyluridine-3'-phosphorothioate
  modified_base 2: mod_base = OTHER; note = 2'-deoxy-2'-fluoroadenosine-3'-phosphorothioate
  modified_base 3: mod_base = OTHER; note = 2'-O-methyluridine-3'-phosphate
  modified_base 4: mod_base = OTHER; note = 2'-O-methyladenosine-3'-phosphate
  modified_base 5: mod_base = OTHER; note = 2'-O-methyluridine-3'-phosphate
  modified_base 6: mod_base = OTHER; note = 2'-deoxy-2'-fluorouridine-3'-phosphate
  modified_base 7: mod_base = OTHER; note = 2'-O-methyluridine-3'-phosphate
  modified_base 8: mod_base = OTHER; note = 2'-O-methylcytidine-3'-phosphate
  modified_base 9: mod_base = OTHER; note = 2'-O-methylcytidine-3'-phosphate
  modified_base 10: mod_base = OTHER; note = 2'-O-methyladenosine-3'-phosphate
  modified_base 11: mod_base = OTHER; note = 2'-O-methylguanosine-3'-phosphate
  modified_base 12: mod_base = OTHER; note = 2'-O-methylguanosine-3'-phosphate
  modified_base 13: mod_base = OTHER; note = 2'-O-methyladenosine-3'-phosphate
  modified_base 14: mod_base = OTHER; note = 2'-deoxy-2'-fluorouridine-3'-phosphate
  modified_base 15: mod_base = OTHER; note = 2'-O-methylguanosine-3'-phosphate
  modified_base 16: mod_base = OTHER; note = 2'-deoxy-2'-fluoroadenosine-3'-phosphate
  modified_base 17: mod_base = OTHER; note = 2'-O-methyladenosine-3'-phosphate
  modified_base 18: mod_base = OTHER; note = 2'-O-methyladenosine-3'-phosphate
  modified_base 19: mod_base = OTHER; note = 2'-O-methylguanosine-3'-phosphate
  modified_base 20: mod_base = OTHER; note = 2'-O-methyluridine-3'-phosphate
  modified_base 21: mod_base = OTHER; note = 2'-O-methylcytidine-3'-phosphorothioate
  modified_base 22: mod_base = OTHER; note = 2'-O-methylcytidine-3'-phosphorothioate
  modified_base 23: mod_base = OTHER; note = 2'-O-methyladenosine
tatatttccaggatgaaagtcca

SEQ ID NO: 327 - RNA, 23 nt, synthetic construct
  source 1..23: mol_type = other RNA
  modified_base 1: mod_base = OTHER; note = 2'-O-methyluridine-3'-phosphorothioate
  modified_base 2: mod_base = OTHER; note = 2'-deoxy-2'-fluoroadenosine-3'-phosphorothioate
  modified_base 3: mod_base = OTHER; note = 2'-O-methyluridine-3'-phosphate
  modified_base 4: mod_base = OTHER; note = 2'-O-methyladenosine-3'-phosphate
  modified_base 5: mod_base = OTHER; note = 2'-O-methyluridine-3'-phosphate
  modified_base 6: mod_base = OTHER; note = 2'-deoxy-2'-fluorouridine-3'-phosphate
  modified_base 7: mod_base = OTHER; note = 2'-O-methyluridine-3'-phosphate
  modified_base 8: mod_base = OTHER; note = 2'-O-methylcytidine-3'-phosphate
  modified_base 9: mod_base = OTHER; note = 2'-O-methylcytidine-3'-phosphate
  modified_base 10: mod_base = OTHER; note = 2'-O-methyladenosine-3'-phosphate
  modified_base 11: mod_base = OTHER; note = 2'-O-methylguanosine-3'-phosphate
  modified_base 12: mod_base = OTHER; note = 2'-O-methylguanosine-3'-phosphate
  modified_base 13: mod_base = OTHER; note = 2'-O-methyladenosine-3'-phosphate
  modified_base 14: mod_base = OTHER; note = 2'-deoxy-2'-fluorouridine-3'-phosphate
  modified_base 15: mod_base = OTHER; note = 2'-O-methylguanosine-3'-phosphate
  modified_base 16: mod_base = OTHER; note = 2'-O-methyladenosine-3'-phosphate
  modified_base 17: mod_base = OTHER; note = 2'-O-methyladenosine-3'-phosphate
  modified_base 18: mod_base = OTHER; note = 2'-O-methyladenosine-3'-phosphate
  modified_base 19: mod_base = OTHER; note = 2'-O-methylguanosine-3'-phosphate
  modified_base 20: mod_base = OTHER; note = 2'-O-methyluridine-3'-phosphate
  modified_base 21: mod_base = OTHER; note = 2'-O-methylcytidine-3'-phosphorothioate
  modified_base 22: mod_base = OTHER; note = 2'-O-methylcytidine-3'-phosphorothioate
  modified_base 23: mod_base = OTHER; note = 2'-O-methyladenosine
tatatttccaggatgaaagtcca

SEQ ID NO: 328 - RNA, 23 nt, synthetic construct
  source 1..23: mol_type = other RNA
  modified_base 1: mod_base = OTHER; note = 2'-O-methyluridine-3'-phosphorothioate
  modified_base 2: mod_base = OTHER; note = 2'-deoxy-2'-fluoroadenosine-3'-phosphorothioate
  modified_base 3: mod_base = OTHER; note = 2'-O-methyluridine-3'-phosphate
  modified_base 4: mod_base = OTHER; note = 2'-O-methyladenosine-3'-phosphate
  modified_base 5: mod_base = OTHER; note = 2'-O-methyluridine-3'-phosphate
  modified_base 6: mod_base = OTHER; note = 2'-O-methyluridine-3'-phosphate
  modified_base 7: mod_base = OTHER; note = 2'-O-methyluridine-3'-phosphate
  modified_base 8: mod_base = OTHER; note = 2'-O-methylcytidine-3'-phosphate
  modified_base 9: mod_base = OTHER; note = 2'-O-methylcytidine-3'-phosphate
  modified_base 10: mod_base = OTHER; note = 2'-O-methyladenosine-3'-phosphate
  modified_base 11: mod_base = OTHER; note = 2'-O-methylguanosine-3'-phosphate
  modified_base 12: mod_base = OTHER; note = 2'-O-methylguanosine-3'-phosphate
  modified_base 13: mod_base = OTHER; note = 2'-O-methyladenosine-3'-phosphate
  modified_base 14: mod_base = OTHER; note = 2'-deoxy-2'-fluorouridine-3'-phosphate
  modified_base 15: mod_base = OTHER; note = 2'-O-methylguanosine-3'-phosphate
  modified_base 16: mod_base = OTHER; note = 2'-O-methyladenosine-3'-phosphate
  modified_base 17: mod_base = OTHER; note = 2'-O-methyladenosine-3'-phosphate
  modified_base 18: mod_base = OTHER; note = 2'-O-methyladenosine-3'-phosphate
  modified_base 19: mod_base = OTHER; note = 2'-O-methylguanosine-3'-phosphate
  modified_base 20: mod_base = OTHER; note = 2'-O-methyluridine-3'-phosphate
  modified_base 21: mod_base = OTHER; note = 2'-O-methylcytidine-3'-phosphorothioate
  modified_base 22: mod_base = OTHER; note = 2'-O-methylcytidine-3'-phosphorothioate
  modified_base 23: mod_base = OTHER; note = 2'-O-methyladenosine
tatatttccaggatgaaagtcca

SEQ ID NO: 329 - RNA, 23 nt, synthetic construct
  source 1..23: mol_type = other RNA
  modified_base 1: mod_base = OTHER; note = 2'-O-methyluridine-3'-phosphorothioate
  modified_base 2: mod_base = OTHER; note = 2'-deoxy-2'-fluoroadenosine-3'-phosphorothioate
  modified_base 3: mod_base = OTHER; note = 2'-O-methyluridine-3'-phosphate
  modified_base 4: mod_base = OTHER; note = 2'-O-methyladenosine-3'-phosphate
  modified_base 5: mod_base = OTHER; note = 2'-O-methyluridine-3'-phosphate
  modified_base 6: mod_base = OTHER; note = 2'-deoxy-2'-fluorouridine-3'-phosphate
  modified_base 7: mod_base = OTHER; note = 2'-O-methyluridine-3'-phosphate
  modified_base 8: mod_base = OTHER; note = 2'-deoxy-2'-fluorocytidine-3'-phosphate
  modified_base 9: mod_base = OTHER; note = 2'-O-methylcytidine-3'-phosphate
  modified_base 10: mod_base = OTHER; note = 2'-deoxy-2'-fluoroadenosine-3'-phosphate
  modified_base 11: mod_base = OTHER; note = 2'-O-methylguanosine-3'-phosphate
  modified_base 12: mod_base = OTHER; note = 2'-O-methylguanosine-3'-phosphate
  modified_base 13: mod_base = OTHER; note = 2'-O-methyladenosine-3'-phosphate
  modified_base 14: mod_base = OTHER; note = 2'-deoxy-2'-fluorouridine-3'-phosphate
  modified_base 15: mod_base = OTHER; note = 2'-O-methylguanosine-3'-phosphate
  modified_base 16: mod_base = OTHER; note = 2'-deoxy-2'-fluoroadenosine-3'-phosphate
  modified_base 17: mod_base = OTHER; note = 2'-O-methyladenosine-3'-phosphate
  modified_base 18: mod_base = OTHER; note = 2'-O-methyladenosine-3'-phosphate
  modified_base 19: mod_base = OTHER; note = 2'-O-methylguanosine-3'-phosphate
  modified_base 20: mod_base = OTHER; note = 2'-O-methyluridine-3'-phosphate
  modified_base 21: mod_base = OTHER; note = 2'-O-methylcytidine-3'-phosphorothioate
  modified_base 22: mod_base = OTHER; note = 2'-O-methylcytidine-3'-phosphorothioate
  modified_base 23: mod_base = OTHER; note = 2'-O-methyladenosine
tatatttccaggatgaaagtcca

SEQ ID NO: 330 - RNA, 23 nt, synthetic construct
  source 1..23: mol_type = other RNA
  modified_base 1: mod_base = OTHER; note = 2'-O-methyluridine-3'-phosphorothioate
  modified_base 2: mod_base = OTHER; note = 2'-deoxy-2'-fluoroadenosine-3'-phosphorothioate
  modified_base 3: mod_base = OTHER; note = 2'-O-methyluridine-3'-phosphate
  modified_base 4: mod_base = OTHER; note = 2'-O-methyladenosine-3'-phosphate
  modified_base 5: mod_base = OTHER; note = 2'-O-methyluridine-3'-phosphate
  modified_base 6: mod_base = OTHER; note = 2'-deoxy-2'-fluorouridine-3'-phosphate
  modified_base 7: mod_base = OTHER; note = 2'-O-methyluridine-3'-phosphate
  modified_base 8: mod_base = OTHER; note = 2'-deoxy-2'-fluorocytidine-3'-phosphate
  modified_base 9: mod_base = OTHER; note = 2'-deoxy-2'-fluorocytidine-3'-phosphate
  modified_base 10: mod_base = OTHER; note = 2'-O-methyladenosine-3'-phosphate
  modified_base 11: mod_base = OTHER; note = 2'-O-methylguanosine-3'-phosphate
  modified_base 12: mod_base = OTHER; note = 2'-O-methylguanosine-3'-phosphate
  modified_base 13: mod_base = OTHER; note = 2'-O-methyladenosine-3'-phosphate
  modified_base 14: mod_base = OTHER; note = 2'-deoxy-2'-fluorouridine-3'-phosphate
  modified_base 15: mod_base = OTHER; note = 2'-O-methylguanosine-3'-phosphate
  modified_base 16: mod_base = OTHER; note = 2'-deoxy-2'-fluoroadenosine-3'-phosphate
  modified_base 17: mod_base = OTHER; note = 2'-O-methyladenosine-3'-phosphate
  modified_base 18: mod_base = OTHER; note = 2'-O-methyladenosine-3'-phosphate
  modified_base 19: mod_base = OTHER; note = 2'-O-methylguanosine-3'-phosphate
  modified_base 20: mod_base = OTHER; note = 2'-O-methyluridine-3'-phosphate
  modified_base 21: mod_base = OTHER; note = 2'-O-methylcytidine-3'-phosphorothioate
  modified_base 22: mod_base = OTHER; note = 2'-O-methylcytidine-3'-phosphorothioate
  modified_base 23: mod_base = OTHER; note = 2'-O-methyladenosine
tatatttccaggatgaaagtcca

SEQ ID NO: 331 - RNA, 23 nt, synthetic construct
  source 1..23: mol_type = other RNA
  modified_base 1: mod_base = OTHER; note = 2'-O-methyluridine-3'-phosphorothioate
  modified_base 2: mod_base = OTHER; note = 2'-deoxy-2'-fluoroadenosine-3'-phosphorothioate
  modified_base 3: mod_base = OTHER; note = 2'-O-methyluridine-3'-phosphate
  modified_base 4: mod_base = OTHER; note = 2'-O-methyladenosine-3'-phosphate
  modified_base 5: mod_base = OTHER; note = 2'-O-methyluridine-3'-phosphate
  modified_base 6: mod_base = OTHER; note = 2'-deoxy-2'-fluorouridine-3'-phosphate
  modified_base 7: mod_base = OTHER; note = 2'-O-methyluridine-3'-phosphate
  modified_base 8: mod_base = OTHER; note = 2'-O-methylcytidine-3'-phosphate
  modified_base 9: mod_base = OTHER; note = 2'-O-methylcytidine-3'-phosphate
  modified_base 10: mod_base = OTHER; note = 2'-O-methyladenosine-3'-phosphate
  modified_base 11: mod_base = OTHER; note = 2'-O-methylguanosine-3'-phosphate
  modified_base 12: mod_base = OTHER; note = 2'-O-methylguanosine-3'-phosphate
  modified_base 13: mod_base = OTHER; note = 2'-O-methyladenosine-3'-phosphate
  modified_base 14: mod_base = OTHER; note = 2'-deoxy-2'-fluorouridine-3'-phosphate
  modified_base 15: mod_base = OTHER; note = 2'-O-methylguanosine-3'-phosphate
  modified_base 16: mod_base = OTHER; note = 2'-deoxy-2'-fluoroadenosine-3'-phosphate
  modified_base 17: mod_base = OTHER; note = 2'-O-methyladenosine-3'-phosphate
  modified_base 18: mod_base = OTHER; note = 2'-O-methyladenosine-3'-phosphate
  modified_base 19: mod_base = OTHER; note = 2'-O-methylguanosine-3'-phosphate
  modified_base 20: mod_base = OTHER; note = 2'-O-methyluridine-3'-phosphate
  modified_base 21: mod_base = OTHER; note = 2'-O-methylcytidine-3'-phosphorothioate
  modified_base 22: mod_base = OTHER; note = 2'-O-methylcytidine-3'-phosphorothioate
  modified_base 23: mod_base = OTHER; note = 2'-O-methyladenosine
tatatttccaggatgaaagtcca

SEQ ID NO: 332 - RNA, 23 nt, synthetic construct
  source 1..23: mol_type = other RNA
  modified_base 1: mod_base = OTHER; note = 2'-O-methyluridine-3'-phosphorothioate
  modified_base 2: mod_base = OTHER; note = 2'-deoxy-2'-fluoroadenosine-3'-phosphorothioate
  modified_base 3: mod_base = OTHER; note = 2'-O-methyluridine-3'-phosphate
  modified_base 4: mod_base = OTHER; note = 2'-O-methyladenosine-3'-phosphate
  modified_base 5: mod_base = OTHER; note = 2'-O-methyluridine-3'-phosphate
  modified_base 6: mod_base = OTHER; note = 2'-deoxy-2'-fluorouridine-3'-phosphate
  modified_base 7: mod_base = OTHER; note = 2'-O-methyluridine-3'-phosphate
  modified_base 8: mod_base = OTHER; note = 2'-deoxy-2'-fluorocytidine-3'-phosphate
  modified_base 9: mod_base = OTHER; note = 2'-O-methylcytidine-3'-phosphate
  modified_base 10: mod_base = OTHER; note = 2'-deoxy-2'-fluoroadenosine-3'-phosphate
  modified_base 11: mod_base = OTHER; note = 2'-O-methylguanosine-3'-phosphate
  modified_base 12: mod_base = OTHER; note = 2'-O-methylguanosine-3'-phosphate
  modified_base 13: mod_base = OTHER; note = 2'-O-methyladenosine-3'-phosphate
  modified_base 14: mod_base = OTHER; note = 2'-deoxy-2'-fluorouridine-3'-phosphate
  modified_base 15: mod_base = OTHER; note = 2'-O-methylguanosine-3'-phosphate
  modified_base 16: mod_base = OTHER; note = 2'-deoxy-2'-fluoroadenosine-3'-phosphate
  modified_base 17: mod_base = OTHER; note = 2'-O-methyladenosine-3'-phosphate
  modified_base 18: mod_base = OTHER; note = 2'-O-methyladenosine-3'-phosphate
  modified_base 19: mod_base = OTHER; note = 2'-O-methylguanosine-3'-phosphate
  modified_base 20: mod_base = OTHER; note = 2'-O-methyluridine-3'-phosphate
  modified_base 21: mod_base = OTHER; note = 2'-O-methylcytidine-3'-phosphorothioate
  modified_base 22: mod_base = OTHER; note = 2'-O-methylcytidine-3'-phosphorothioate
  modified_base 23: mod_base = OTHER; note = 2'-O-methyladenosine
tatatttccaggatgaaagtcca

SEQ ID NO: 333 - RNA, 23 nt, synthetic construct
  source 1..23: mol_type = other RNA
  modified_base 1: mod_base = OTHER; note = 2'-O-methyluridine-3'-phosphorothioate
  modified_base 2: mod_base = OTHER; note = 2'-deoxy-2'-fluoroadenosine-3'-phosphorothioate
  modified_base 3: mod_base = OTHER; note = 2'-O-methyluridine-3'-phosphate
  modified_base 4: mod_base = OTHER; note = 2'-O-methyladenosine-3'-phosphate
  modified_base 5: mod_base = OTHER; note = 2'-O-methyluridine-3'-phosphate
  modified_base 6: mod_base = OTHER; note = 2'-deoxy-2'-fluorouridine-3'-phosphate
  modified_base 7: mod_base = OTHER; note = 2'-O-methyluridine-3'-phosphate
  modified_base 8: mod_base = OTHER; note = 2'-deoxy-2'-fluorocytidine-3'-phosphate
  modified_base 9: mod_base = OTHER; note = 2'-deoxy-2'-fluorocytidine-3'-phosphate
  modified_base 10: mod_base = OTHER; note = 2'-O-methyladenosine-3'-phosphate
  modified_base 11: mod_base = OTHER; note = 2'-O-methylguanosine-3'-phosphate
  modified_base 12: mod_base = OTHER; note = 2'-O-methylguanosine-3'-phosphate
  modified_base 13: mod_base = OTHER; note = 2'-O-methyladenosine-3'-phosphate
  modified_base 14: mod_base = OTHER; note = 2'-deoxy-2'-fluorouridine-3'-phosphate
  modified_base 15: mod_base = OTHER; note = 2'-O-methylguanosine-3'-phosphate
  modified_base 16: mod_base = OTHER; note = 2'-deoxy-2'-fluoroadenosine-3'-phosphate
  modified_base 17: mod_base = OTHER; note = 2'-O-methyladenosine-3'-phosphate
  modified_base 18: mod_base = OTHER; note = 2'-O-methyladenosine-3'-phosphate
  modified_base 19: mod_base = OTHER; note = 2'-O-methylguanosine-3'-phosphate
  modified_base 20: mod_base = OTHER; note = 2'-O-methyluridine-3'-phosphate
  modified_base 21: mod_base = OTHER; note = 2'-O-methylcytidine-3'-phosphorothioate
  modified_base 22: mod_base = OTHER; note = 2'-O-methylcytidine-3'-phosphorothioate
  modified_base 23: mod_base = OTHER; note = 2'-O-methyladenosine
tatatttccaggatgaaagtcca

SEQ ID NO: 334 - RNA, 23 nt, synthetic construct
  source 1..23: mol_type = other RNA
  modified_base 1: mod_base = OTHER; note = 2'-O-methyluridine-3'-phosphorothioate
  modified_base 2: mod_base = OTHER; note = 2'-deoxy-2'-fluoroadenosine-3'-phosphorothioate
  modified_base 3: mod_base = OTHER; note = 2'-O-methyluridine-3'-phosphate
  modified_base 4: mod_base = OTHER; note = 2'-O-methyladenosine-3'-phosphate
  modified_base 5: mod_base = OTHER; note = 2'-O-methyluridine-3'-phosphate
  modified_base 6: mod_base = OTHER; note = 2'-deoxy-2'-fluorouridine-3'-phosphate
  modified_base 7: mod_base = OTHER; note = 2'-O-methyluridine-3'-phosphate
  modified_base 8: mod_base = OTHER; note = 2'-O-methylcytidine-3'-phosphate
  modified_base 9: mod_base = OTHER; note = 2'-O-methylcytidine-3'-phosphate
  modified_base 10: mod_base = OTHER; note = 2'-O-methyladenosine-3'-phosphate
  modified_base 11: mod_base = OTHER; note = 2'-O-methylguanosine-3'-phosphate
  modified_base 12: mod_base = OTHER; note = 2'-O-methylguanosine-3'-phosphate
  modified_base 13: mod_base = OTHER; note = 2'-O-methyladenosine-3'-phosphate
  modified_base 14: mod_base = OTHER; note = 2'-deoxy-2'-fluorouridine-3'-phosphate
  modified_base 15: mod_base = OTHER; note = 2'-O-methylguanosine-3'-phosphate
  modified_base 16: mod_base = OTHER; note = 2'-deoxy-2'-fluoroadenosine-3'-phosphate
  modified_base 17: mod_base = OTHER; note = 2'-O-methyladenosine-3'-phosphate
  modified_base 18: mod_base = OTHER; note = 2'-O-methyladenosine-3'-phosphate
  modified_base 19: mod_base = OTHER; note = 2'-O-methylguanosine-3'-phosphate
  modified_base 20: mod_base = OTHER; note = 2'-O-methyluridine-3'-phosphate
  modified_base 21: mod_base = OTHER; note = 2'-O-methylcytidine-3'-phosphorothioate
  modified_base 22: mod_base = OTHER; note = 2'-O-methylcytidine-3'-phosphorothioate
  modified_base 23: mod_base = OTHER; note = 2'-O-methyladenosine
tatatttccaggatgaaagtcca

SEQ ID NO: 335 - RNA, 23 nt, synthetic construct
  source 1..23: mol_type = other RNA
  modified_base 1: mod_base = OTHER; note = 2'-O-methyluridine-3'-phosphorothioate
  modified_base 2: mod_base = OTHER; note = 2'-deoxy-2'-fluoroadenosine-3'-phosphorothioate
  modified_base 3: mod_base = OTHER; note = 2'-O-methyluridine-3'-phosphate
  modified_base 4: mod_base = OTHER; note = 2'-deoxy-2'-fluoroadenosine-3'-phosphate
  modified_base 5: mod_base = OTHER; note = 2'-O-methyluridine-3'-phosphate
  modified_base 6: mod_base = OTHER; note = 2'-deoxy-2'-fluorouridine-3'-phosphate
  modified_base 7: mod_base = OTHER; note = 2'-O-methyluridine-3'-phosphate
  modified_base 8: mod_base = OTHER; note = 2'-deoxy-2'-fluorocytidine-3'-phosphate
  modified_base 9: mod_base = OTHER; note = 2'-O-methylcytidine-3'-phosphate
  modified_base 10: mod_base = OTHER; note = 2'-deoxy-2'-fluoroadenosine-3'-phosphate
  modified_base 11: mod_base = OTHER; note = 2'-O-methylguanosine-3'-phosphate
  modified_base 12: mod_base = OTHER; note = 2'-O-methylguanosine-3'-phosphate
  modified_base 13: mod_base = OTHER; note = 2'-O-methyladenosine-3'-phosphate
  modified_base 14: mod_base = OTHER; note = 2'-deoxy-2'-fluorouridine-3'-phosphate
  modified_base 15: mod_base = OTHER; note = 2'-O-methylguanosine-3'-phosphate
  modified_base 16: mod_base = OTHER; note = 2'-deoxy-2'-fluoroadenosine-3'-phosphate
  modified_base 17: mod_base = OTHER; note = 2'-O-methyladenosine-3'-phosphate
  modified_base 18: mod_base = OTHER; note = 2'-deoxy-2'-fluoroadenosine-3'-phosphate
  modified_base 19: mod_base = OTHER; note = 2'-O-methylguanosine-3'-phosphate
  modified_base 20: mod_base = OTHER; note = 2'-deoxy-2'-fluorouridine-3'-phosphate
  modified_base 21: mod_base = OTHER; note = 2'-O-methylcytidine-3'-phosphorothioate
  modified_base 22: mod_base = OTHER; note = 2'-O-methylcytidine-3'-phosphorothioate
  modified_base 23: mod_base = OTHER; note = 2'-O-methyladenosine
tatatttccaggatgaaagtcca

SEQ ID NO: 336 - RNA, 23 nt, synthetic construct
  source 1..23: mol_type = other RNA
  modified_base 1: mod_base = OTHER; note = 2'-O-methyluridine-3'-phosphorothioate
  modified_base 2: mod_base = OTHER; note = 2'-deoxy-2'-fluoroadenosine-3'-phosphorothioate
  modified_base 3: mod_base = OTHER; note = 2'-O-methyluridine-3'-phosphate
  modified_base 4: mod_base = OTHER; note = 2'-deoxy-2'-fluoroadenosine-3'-phosphate
  modified_base 5: mod_base = OTHER; note = 2'-O-methyluridine-3'-phosphate
  modified_base 6: mod_base = OTHER; note = 2'-deoxy-2'-fluorouridine-3'-phosphate
  modified_base 7: mod_base = OTHER; note = 2'-O-methyluridine-3'-phosphate
  modified_base 8: mod_base = OTHER; note = 2'-deoxy-2'-fluorocytidine-3'-phosphate
  modified_base 9: mod_base = OTHER; note = 2'-O-methylcytidine-3'-phosphate
  modified_base 10: mod_base = OTHER; note = 2'-deoxy-2'-fluoroadenosine-3'-phosphate
  modified_base 11: mod_base = OTHER; note = 2'-O-methylguanosine-3'-phosphate
  modified_base 12: mod_base = OTHER; note = 2'-O-methylguanosine-3'-phosphate
  modified_base 13: mod_base = OTHER; note = 2'-O-methyladenosine-3'-phosphate
  modified_base 14: mod_base = OTHER; note = 2'-deoxy-2'-fluorouridine-3'-phosphate
  modified_base 15: mod_base = OTHER; note = 2'-O-methylguanosine-3'-phosphate
  modified_base 16: mod_base = OTHER; note = 2'-deoxy-2'-fluoroadenosine-3'-phosphate
  modified_base 17: mod_base = OTHER; note = 2'-O-methyladenosine-3'-phosphate
  modified_base 18: mod_base = OTHER; note = 2'-deoxy-2'-fluoroadenosine-3'-phosphate
  modified_base 19: mod_base = OTHER; note = 2'-O-methylguanosine-3'-phosphate
  modified_base 20: mod_base = OTHER; note = 2'-deoxy-2'-fluorouridine-3'-phosphate
  modified_base 21: mod_base = OTHER; note = 2'-O-methylcytidine-3'-phosphorothioate
  modified_base 22: mod_base = OTHER; note = 2'-O-methylcytidine-3'-phosphorothioate
  modified_base 23: mod_base = OTHER; note = 2'-O-methyladenosine
tatatttccaggatgaaagtcca

SEQ ID NO: 337 - RNA, 23 nt, synthetic construct
  source 1..23: mol_type = other RNA
  modified_base 1: mod_base = OTHER; note = 2'-O-methyluridine-3'-phosphorothioate
  modified_base 2: mod_base = OTHER; note = 2'-deoxy-2'-fluoroadenosine-3'-phosphorothioate
  modified_base 3: mod_base = OTHER; note = 2'-O-methyluridine-3'-phosphate
  modified_base 4: mod_base = OTHER; note = 2'-deoxy-2'-fluoroadenosine-3'-phosphate
  modified_base 5: mod_base = OTHER; note = 2'-O-methyluridine-3'-phosphate
  modified_base 6: mod_base = OTHER; note = 2'-deoxy-2'-fluorouridine-3'-phosphate
  modified_base 7: mod_base = OTHER; note = 2'-O-methyluridine-3'-phosphate
  modified_base 8: mod_base = OTHER; note = 2'-deoxy-2'-fluorocytidine-3'-phosphate
  modified_base 9: mod_base = OTHER; note = 2'-O-methylcytidine-3'-phosphate
  modified_base 10: mod_base = OTHER; note = 2'-deoxy-2'-fluoroadenosine-3'-phosphate
  modified_base 11: mod_base = OTHER; note = 2'-O-methylguanosine-3'-phosphate
  modified_base 12: mod_base = OTHER; note = 2'-O-methylguanosine-3'-phosphate
  modified_base 13: mod_base = OTHER; note = 2'-O-methyladenosine-3'-phosphate
  modified_base 14: mod_base = OTHER; note = 2'-deoxy-2'-fluorouridine-3'-phosphate
  modified_base 15: mod_base = OTHER; note = 2'-O-methylguanosine-3'-phosphate
  modified_base 16: mod_base = OTHER; note = 2'-deoxy-2'-fluoroadenosine-3'-phosphate
  modified_base 17: mod_base = OTHER; note = 2'-O-methyladenosine-3'-phosphate
  modified_base 18: mod_base = OTHER; note = 2'-deoxy-2'-fluoroadenosine-3'-phosphate
  modified_base 19: mod_base = OTHER; note = 2'-O-methylguanosine-3'-phosphate
  modified_base 20: mod_base = OTHER; note = 2'-deoxy-2'-fluorouridine-3'-phosphate
  modified_base 21: mod_base = OTHER; note = 2'-O-methylcytidine-3'-phosphorothioate
  modified_base 22: mod_base = OTHER; note = 2'-O-methylcytidine-3'-phosphorothioate
  modified_base 23: mod_base = OTHER; note = 2'-O-methyladenosine
tatatttccaggatgaaagtcca

SEQ ID NO: 338 - RNA, 23 nt, synthetic construct
  source 1..23: mol_type = other RNA
  modified_base 1: mod_base = OTHER; note = 2'-O-methyluridine-3'-phosphorothioate
  modified_base 2: mod_base = OTHER; note = 2'-deoxy-2'-fluoroadenosine-3'-phosphorothioate
  modified_base 3: mod_base = OTHER; note = 2'-O-methyluridine-3'-phosphate
  modified_base 4: mod_base = OTHER; note = 2'-deoxy-2'-fluoroadenosine-3'-phosphate
  modified_base 5: mod_base = OTHER; note = 2'-O-methyluridine-3'-phosphate
  modified_base 6: mod_base = OTHER; note = 2'-deoxy-2'-fluorouridine-3'-phosphate
  modified_base 7: mod_base = OTHER; note = 2'-O-methyluridine-3'-phosphate
  modified_base 8: mod_base = OTHER; note = 2'-deoxy-2'-fluorocytidine-3'-phosphate
  modified_base 9: mod_base = OTHER; note = 2'-O-methylcytidine-3'-phosphate
  modified_base 10: mod_base = OTHER; note = 2'-deoxy-2'-fluoroadenosine-3'-phosphate
  modified_base 11: mod_base = OTHER; note = 2'-O-methylguanosine-3'-phosphate
  modified_base 12: mod_base = OTHER; note = 2'-O-methylguanosine-3'-phosphate
  modified_base 13: mod_base = OTHER; note = 2'-O-methyladenosine-3'-phosphate
  modified_base 14: mod_base = OTHER; note = 2'-deoxy-2'-fluorouridine-3'-phosphate
  modified_base 15: mod_base = OTHER; note = 2'-O-methylguanosine-3'-phosphate
  modified_base 16: mod_base = OTHER; note = 2'-deoxy-2'-fluoroadenosine-3'-phosphate
  modified_base 17: mod_base = OTHER; note = 2'-O-methyladenosine-3'-phosphate
  modified_base 18: mod_base = OTHER; note = 2'-deoxy-2'-fluoroadenosine-3'-phosphate
  modified_base 19: mod_base = OTHER; note = 2'-O-methylguanosine-3'-phosphate
  modified_base 20: mod_base = OTHER; note = 2'-deoxy-2'-fluorouridine-3'-phosphate
  modified_base 21: mod_base = OTHER; note = 2'-O-methylcytidine-3'-phosphorothioate
  modified_base 22: mod_base = OTHER; note = 2'-O-methylcytidine-3'-phosphorothioate
  modified_base 23: mod_base = OTHER; note = 2'-O-methyladenosine
tatatttccaggatgaaagtcca

SEQ ID NO: 339 - RNA, 23 nt, synthetic construct
  source 1..23: mol_type = other RNA
  modified_base 1: mod_base = OTHER; note = 2'-O-methyluridine-3'-phosphorothioate
  modified_base 2: mod_base = OTHER; note = 2'-deoxy-2'-fluoroadenosine-3'-phosphorothioate
  modified_base 3: mod_base = OTHER; note = 2'-O-methyluridine-3'-phosphate
  modified_base 4: mod_base = OTHER; note = 2'-deoxy-2'-fluoroadenosine-3'-phosphate
  modified_base 5: mod_base = OTHER; note = 2'-O-methyluridine-3'-phosphate
  modified_base 6: mod_base = OTHER; note = 2'-deoxy-2'-fluorouridine-3'-phosphate
  modified_base 7: mod_base = OTHER; note = 2'-O-methyluridine-3'-phosphate
  modified_base 8: mod_base = OTHER; note = 2'-deoxy-2'-fluorocytidine-3'-phosphate
  modified_base 9: mod_base = OTHER; note = 2'-O-methylcytidine-3'-phosphate
  modified_base 10: mod_base = OTHER; note = 2'-deoxy-2'-fluoroadenosine-3'-phosphate
  modified_base 11: mod_base = OTHER; note = 2'-O-methylguanosine-3'-phosphate
  modified_base 12: mod_base = OTHER; note = 2'-O-methylguanosine-3'-phosphate
  modified_base 13: mod_base = OTHER; note = 2'-O-methyladenosine-3'-phosphate
  modified_base 14: mod_base = OTHER; note = 2'-deoxy-2'-fluorouridine-3'-phosphate
  modified_base 15: mod_base = OTHER; note = 2'-O-methylguanosine-3'-phosphate
  modified_base 16: mod_base = OTHER; note = 2'-deoxy-2'-fluoroadenosine-3'-phosphate
  modified_base 17: mod_base = OTHER; note = 2'-O-methyladenosine-3'-phosphate
  modified_base 18: mod_base = OTHER; note = 2'-deoxy-2'-fluoroadenosine-3'-phosphate
  modified_base 19: mod_base = OTHER; note = 2'-O-methylguanosine-3'-phosphate
  modified_base 20: mod_base = OTHER; note = 2'-deoxy-2'-fluorouridine-3'-phosphate
  modified_base 21: mod_base = OTHER; note = 2'-O-methylcytidine-3'-phosphorothioate
  modified_base 22: mod_base = OTHER; note = 2'-O-methylcytidine-3'-phosphorothioate
  modified_base 23: mod_base = OTHER; note = 2'-O-methyladenosine
tatatttccaggatgaaagtcca

SEQ ID NO: 340 - RNA, 23 nt, synthetic construct
  source 1..23: mol_type = other RNA
  modified_base 1: mod_base = OTHER; note = 2'-O-methyluridine-3'-phosphorothioate
  modified_base 2: mod_base = OTHER; note = 2'-deoxy-2'-fluoroadenosine-3'-phosphorothioate
  modified_base 3: mod_base = OTHER; note = 2'-O-methyluridine-3'-phosphate
  modified_base 4: mod_base = OTHER; note = 2'-deoxy-2'-fluoroadenosine-3'-phosphate
  modified_base 5: mod_base = OTHER; note = 2'-O-methyluridine-3'-phosphate
  modified_base 6: mod_base = OTHER; note = 2'-deoxy-2'-fluorouridine-3'-phosphate
  modified_base 7: mod_base = OTHER; note = 2'-O-methyluridine-3'-phosphate
  modified_base 8: mod_base = OTHER; note = 2'-deoxy-2'-fluorocytidine-3'-phosphate
  modified_base 9: mod_base = OTHER; note = 2'-O-methylcytidine-3'-phosphate
  modified_base 10: mod_base = OTHER; note = 2'-deoxy-2'-fluoroadenosine-3'-phosphate
  modified_base 11: mod_base = OTHER; note = 2'-O-methylguanosine-3'-phosphate
  modified_base 12: mod_base = OTHER; note = 2'-O-methylguanosine-3'-phosphate
  modified_base 13: mod_base = OTHER; note = 2'-O-methyladenosine-3'-phosphate
  modified_base 14: mod_base = OTHER; note = 2'-deoxy-2'-fluorouridine-3'-phosphate
  modified_base 15: mod_base = OTHER; note = 2'-O-methylguanosine-3'-phosphate
  modified_base 16: mod_base = OTHER; note = 2'-deoxy-2'-fluoroadenosine-3'-phosphate
  modified_base 17: mod_base = OTHER; note = 2'-O-methyladenosine-3'-phosphate
  modified_base 18: mod_base = OTHER; note = 2'-deoxy-2'-fluoroadenosine-3'-phosphate
  modified_base 19: mod_base = OTHER; note = 2'-O-methylguanosine-3'-phosphate
  modified_base 20: mod_base = OTHER; note = 2'-deoxy-2'-fluorouridine-3'-phosphate
  modified_base 21: mod_base = OTHER; note = 2'-O-methylcytidine-3'-phosphorothioate
  modified_base 22: mod_base = OTHER; note = 2'-O-methylcytidine-3'-phosphorothioate
  modified_base 23: mod_base = OTHER; note = 2'-O-methyladenosine
tatatttccaggatgaaagtcca

SEQ ID NO: 341 - RNA, 23 nt, synthetic construct
  source 1..23: mol_type = other RNA
  modified_base 1: mod_base = OTHER; note = 2'-O-methyluridine-3'-phosphorothioate
  modified_base 2: mod_base = OTHER; note = 2'-deoxy-2'-fluoroadenosine-3'-phosphorothioate
  modified_base 3: mod_base = OTHER; note = 2'-O-methyluridine-3'-phosphate
  modified_base 4: mod_base = OTHER; note = 2'-deoxy-2'-fluoroadenosine-3'-phosphate
  modified_base 5: mod_base = OTHER; note = 2'-O-methyluridine-3'-phosphate
  modified_base 6: mod_base = OTHER; note = 2'-deoxy-2'-fluorouridine-3'-phosphate
  modified_base 7: mod_base = OTHER; note = 2'-O-methyluridine-3'-phosphate
  modified_base 8: mod_base = OTHER; note = 2'-deoxy-2'-fluorocytidine-3'-phosphate
  modified_base 9: mod_base = OTHER; note = 2'-O-methylcytidine-3'-phosphate
  modified_base 10: mod_base = OTHER; note = 2'-deoxy-2'-fluoroadenosine-3'-phosphate
  modified_base 11: mod_base = OTHER; note = 2'-O-methylguanosine-3'-phosphate
  modified_base 12: mod_base = OTHER; note = 2'-O-methylguanosine-3'-phosphate
  modified_base 13: mod_base = OTHER; note = 2'-O-methyladenosine-3'-phosphate
  modified_base 14: mod_base = OTHER; note = 2'-deoxy-2'-fluorouridine-3'-phosphate
  modified_base 15: mod_base = OTHER; note = 2'-O-methylguanosine-3'-phosphate
  modified_base 16: mod_base = OTHER; note = 2'-deoxy-2'-fluoroadenosine-3'-phosphate
  modified_base 17: mod_base = OTHER; note = 2'-O-methyladenosine-3'-phosphate
  modified_base 18: mod_base = OTHER; note = 2'-deoxy-2'-fluoroadenosine-3'-phosphate
  modified_base 19: mod_base = OTHER; note = 2'-O-methylguanosine-3'-phosphate
  modified_base 20: mod_base = OTHER; note = 2'-deoxy-2'-fluorouridine-3'-phosphate
  modified_base 21: mod_base = OTHER; note = 2'-O-methylcytidine-3'-phosphorothioate
  modified_base 22: mod_base = OTHER; note = 2'-O-methylcytidine-3'-phosphorothioate
  modified_base 23: mod_base = OTHER; note = 2'-O-methyladenosine
tatatttccaggatgaaagtcca

SEQ ID NO: 342 - RNA, 23 nt, synthetic construct
  source 1..23: mol_type = other RNA
  modified_base 1: mod_base = OTHER; note = 2'-O-methyluridine-3'-phosphorothioate
  modified_base 2: mod_base = OTHER; note = 2'-deoxy-2'-fluoroadenosine-3'-phosphorothioate
  modified_base 3: mod_base = OTHER; note = 2'-O-methyluridine-3'-phosphate
  modified_base 4: mod_base = OTHER; note = 2'-deoxy-2'-fluoroadenosine-3'-phosphate
  modified_base 5: mod_base = OTHER; note = 2'-O-methyluridine-3'-phosphate
  modified_base 6: mod_base = OTHER; note = 2'-deoxy-2'-fluorouridine-3'-phosphate
  modified_base 7: mod_base = OTHER; note = 2'-O-methyluridine-3'-phosphate
  modified_base 8: mod_base = OTHER; note = 2'-deoxy-2'-fluorocytidine-3'-phosphate
  modified_base 9: mod_base = OTHER; note = 2'-O-methylcytidine-3'-phosphate
  modified_base 10: mod_base = OTHER; note = 2'-deoxy-2'-fluoroadenosine-3'-phosphate
  modified_base 11: mod_base = OTHER; note = 2'-O-methylguanosine-3'-phosphate
  modified_base 12: mod_base = OTHER; note = 2'-O-methylguanosine-3'-phosphate
  modified_base 13: mod_base = OTHER; note = 2'-O-methyladenosine-3'-phosphate
  modified_base 14: mod_base = OTHER; note = 2'-deoxy-2'-fluorouridine-3'-phosphate
  modified_base 15: mod_base = OTHER; note = 2'-O-methylguanosine-3'-phosphate
  modified_base 16: mod_base = OTHER; note = 2'-deoxy-2'-fluoroadenosine-3'-phosphate
  modified_base 17: mod_base = OTHER; note = 2'-O-methyladenosine-3'-phosphate
  modified_base 18: mod_base = OTHER; note = 2'-deoxy-2'-fluoroadenosine-3'-phosphate
  modified_base 19: mod_base = OTHER; note = 2'-O-methylguanosine-3'-phosphate
  modified_base 20: mod_base = OTHER; note = 2'-deoxy-2'-fluorouridine-3'-phosphate
  modified_base 21: mod_base = OTHER; note = 2'-O-methylcytidine-3'-phosphorothioate
  modified_base 22: mod_base = OTHER; note = 2'-O-methylcytidine-3'-phosphorothioate
  modified_base 23: mod_base = OTHER; note = 2'-O-methyladenosine
tatatttccaggatgaaagtcca

SEQ ID NO: 343 - RNA, 23 nt, synthetic construct
  source 1..23: mol_type = other RNA
  modified_base 1: mod_base = OTHER; note = 2'-O-methyluridine-3'-phosphorothioate
  modified_base 2: mod_base = OTHER; note = 2'-deoxy-2'-fluoroadenosine-3'-phosphorothioate
  modified_base 3: mod_base = OTHER; note = 2'-O-methyluridine-3'-phosphate
  modified_base 4: mod_base = OTHER; note = 2'-deoxy-2'-fluoroadenosine-3'-phosphate
  modified_base 5: mod_base = OTHER; note = 2'-O-methyluridine-3'-phosphate
  modified_base 6: mod_base = OTHER; note = 2'-deoxy-2'-fluorouridine-3'-phosphate
  modified_base 7: mod_base = OTHER; note = 2'-O-methyluridine-3'-phosphate
  modified_base 8: mod_base = OTHER; note = 2'-deoxy-2'-fluorocytidine-3'-phosphate
  modified_base 9: mod_base = OTHER; note = 2'-O-methylcytidine-3'-phosphate
  modified_base 10: mod_base = OTHER; note = 2'-deoxy-2'-fluoroadenosine-3'-phosphate
  modified_base 11: mod_base = OTHER; note = 2'-O-methylguanosine-3'-phosphate
  modified_base 12: mod_base = OTHER; note = 2'-O-methylguanosine-3'-phosphate
  modified_base 13: mod_base = OTHER; note = 2'-O-methyladenosine-3'-phosphate
  modified_base 14: mod_base = OTHER; note = 2'-deoxy-2'-fluorouridine-3'-phosphate
  modified_base 15: mod_base = OTHER; note = 2'-O-methylguanosine-3'-phosphate
  modified_base 16: mod_base = OTHER; note = 2'-deoxy-2'-fluoroadenosine-3'-phosphate
  modified_base 17: mod_base = OTHER; note = 2'-O-methyladenosine-3'-phosphate
  modified_base 18: mod_base = OTHER; note = 2'-deoxy-2'-fluoroadenosine-3'-phosphate
  modified_base 19: mod_base = OTHER; note = 2'-O-methylguanosine-3'-phosphate
  modified_base 20: mod_base = OTHER; note = 2'-deoxy-2'-fluorouridine-3'-phosphate
  modified_base 21: mod_base = OTHER; note = 2'-O-methylcytidine-3'-phosphorothioate
  modified_base 22: mod_base = OTHER; note = 2'-O-methylcytidine-3'-phosphorothioate
  modified_base 23: mod_base = OTHER; note = 2'-O-methyladenosine
tatatttccaggatgaaagtcca

SEQ ID NO: 344 - RNA, 23 nt, synthetic construct
  source 1..23: mol_type = other RNA
  modified_base 1: mod_base = OTHER; note = 2'-O-methyluridine-3'-phosphorothioate
  modified_base 2: mod_base = OTHER; note = 2'-deoxy-2'-fluoroadenosine-3'-phosphorothioate
  modified_base 3: mod_base = OTHER; note = 2'-O-methyluridine-3'-phosphate
  modified_base 4: mod_base = OTHER; note = 2'-deoxy-2'-fluoroadenosine-3'-phosphate
  modified_base 5: mod_base = OTHER; note = 2'-O-methyluridine-3'-phosphate
  modified_base 6: mod_base = OTHER; note = 2'-deoxy-2'-fluorouridine-3'-phosphate
  modified_base 7: mod_base = OTHER; note = 2'-O-methyluridine-3'-phosphate
  modified_base 8: mod_base = OTHER; note = 2'-deoxy-2'-fluorocytidine-3'-phosphate
  modified_base 9: mod_base = OTHER; note = 2'-O-methylcytidine-3'-phosphate
  modified_base 10: mod_base = OTHER; note = 2'-deoxy-2'-fluoroadenosine-3'-phosphate
  modified_base 11: mod_base = OTHER; note = 2'-O-methylguanosine-3'-phosphate
  modified_base 12: mod_base = OTHER; note = 2'-O-methylguanosine-3'-phosphate
  modified_base 13: mod_base = OTHER; note = 2'-O-methyladenosine-3'-phosphate
  modified_base 14: mod_base = OTHER; note = 2'-deoxy-2'-fluorouridine-3'-phosphate
  modified_base 15: mod_base = OTHER; note = 2'-O-methylguanosine-3'-phosphate
  modified_base 16: mod_base = OTHER; note = 2'-deoxy-2'-fluoroadenosine-3'-phosphate
  modified_base 17: mod_base = OTHER; note = 2'-O-methyladenosine-3'-phosphate
  modified_base 18: mod_base = OTHER; note = 2'-deoxy-2'-fluoroadenosine-3'-phosphate
  modified_base 19: mod_base = OTHER; note = 2'-O-methylguanosine-3'-phosphate
  modified_base 20: mod_base = OTHER; note = 2'-deoxy-2'-fluorouridine-3'-phosphate
  modified_base 21: mod_base = OTHER; note = 2'-O-methylcytidine-3'-phosphorothioate
  modified_base 22: mod_base = OTHER; note = 2'-O-methylcytidine-3'-phosphorothioate
  modified_base 23: mod_base = OTHER; note = 2'-O-methyladenosine
tatatttccaggatgaaagtcca

SEQ ID NO: 345 - RNA, 23 nt, synthetic construct
  source 1..23: mol_type = other RNA
  modified_base 1: mod_base = OTHER; note = 2'-O-methyluridine-3'-phosphorothioate
  modified_base 2: mod_base = OTHER; note = 2'-deoxy-2'-fluoroadenosine-3'-phosphorothioate
  modified_base 3: mod_base = OTHER; note = 2'-O-methyluridine-3'-phosphate
  modified_base 4: mod_base = OTHER; note = 2'-deoxy-2'-fluoroadenosine-3'-phosphate
  modified_base 5: mod_base = OTHER; note = 2'-O-methyluridine-3'-phosphate
  modified_base 6: mod_base = OTHER; note = 2'-deoxy-2'-fluorouridine-3'-phosphate
  modified_base 7: mod_base = OTHER; note = 2'-O-methyluridine-3'-phosphate
  modified_base 8: mod_base = OTHER; note = 2'-deoxy-2'-fluorocytidine-3'-phosphate
  modified_base 9: mod_base = OTHER; note = 2'-O-methylcytidine-3'-phosphate
  modified_base 10: mod_base = OTHER; note = 2'-deoxy-2'-fluoroadenosine-3'-phosphate
  modified_base 11: mod_base = OTHER; note = 2'-O-methylguanosine-3'-phosphate
  modified_base 12: mod_base = OTHER; note = 2'-O-methylguanosine-3'-phosphate
  modified_base 13: mod_base = OTHER; note = 2'-O-methyladenosine-3'-phosphate
  modified_base 14: mod_base = OTHER; note = 2'-deoxy-2'-fluorouridine-3'-phosphate
  modified_base 15: mod_base = OTHER; note = 2'-O-methylguanosine-3'-phosphate
  modified_base 16: mod_base = OTHER; note = 2'-deoxy-2'-fluoroadenosine-3'-phosphate
  modified_base 17: mod_base = OTHER; note = 2'-O-methyladenosine-3'-phosphate
  modified_base 18: mod_base = OTHER; note = 2'-deoxy-2'-fluoroadenosine-3'-phosphate
  modified_base 19: mod_base = OTHER; note = 2'-O-methylguanosine-3'-phosphate
  modified_base 20: mod_base = OTHER; note = 2'-deoxy-2'-fluorouridine-3'-phosphate
  modified_base 21: mod_base = OTHER; note = 2'-O-methylcytidine-3'-phosphorothioate
  modified_base 22: mod_base = OTHER; note = 2'-O-methylcytidine-3'-phosphorothioate
  modified_base 23: mod_base = OTHER; note = 2'-O-methyladenosine
tatatttccaggatgaaagtcca

SEQ ID NO: 346 - RNA, 23 nt, synthetic construct
  source 1..23: mol_type = other RNA
  modified_base 1: mod_base = OTHER; note = 2'-O-methyluridine-3'-phosphorothioate
  modified_base 2: mod_base = OTHER; note = 2'-deoxy-2'-fluoroadenosine-3'-phosphorothioate
  modified_base 3: mod_base = OTHER; note = 2'-O-methyluridine-3'-phosphate
  modified_base 4: mod_base = OTHER; note = 2'-deoxy-2'-fluoroadenosine-3'-phosphate
  modified_base 5: mod_base = OTHER; note = 2'-O-methyluridine-3'-phosphate
  modified_base 6: mod_base = OTHER; note = 2'-deoxy-2'-fluorouridine-3'-phosphate
  modified_base 7: mod_base = OTHER; note = 2'-O-methyluridine-3'-phosphate
  modified_base 8: mod_base = OTHER; note = 2'-deoxy-2'-fluorocytidine-3'-phosphate
  modified_base 9: mod_base = OTHER; note = 2'-O-methylcytidine-3'-phosphate
  modified_base 10: mod_base = OTHER; note = 2'-deoxy-2'-fluoroadenosine-3'-phosphate
  modified_base 11: mod_base = OTHER; note = 2'-O-methylguanosine-3'-phosphate
  modified_base 12: mod_base = OTHER; note = 2'-O-methylguanosine-3'-phosphate
  modified_base 13: mod_base = OTHER; note = 2'-O-methyladenosine-3'-phosphate
  modified_base 14: mod_base = OTHER; note = 2'-deoxy-2'-fluorouridine-3'-phosphate
  modified_base 15: mod_base = OTHER; note = 2'-O-methylguanosine-3'-phosphate
  modified_base 16: mod_base = OTHER; note = 2'-deoxy-2'-fluoroadenosine-3'-phosphate
  modified_base 17: mod_base = OTHER; note = 2'-O-methyladenosine-3'-phosphate
  modified_base 18: mod_base = OTHER; note = 2'-deoxy-2'-fluoroadenosine-3'-phosphate
  modified_base 19: mod_base = OTHER; note = 2'-O-methylguanosine-3'-phosphate
  modified_base 20: mod_base = OTHER; note = 2'-deoxy-2'-fluorouridine-3'-phosphate
  modified_base 21: mod_base = OTHER; note = 2'-O-methylcytidine-3'-phosphorothioate
  modified_base 22: mod_base = OTHER; note = 2'-O-methylcytidine-3'-phosphorothioate
  modified_base 23: mod_base = OTHER; note = 2'-O-methyladenosine
tatatttccaggatgaaagtcca

SEQ ID NO: 347 - DNA, 23 bp, synthetic construct
  source 1..23: mol_type = other DNA
  modified_base 1: mod_base = OTHER; note = 2'-O-methyluridine-3'-phosphorothioate
  modified_base 2: mod_base = OTHER; note = 2'-deoxyadenosine-3'-phosphorothioate
  modified_base 3: mod_base = OTHER; note = 2'-O-methyluridine-3'-phosphate
  modified_base 4: mod_base = OTHER; note = 2'-O-methyladenosine-3'-phosphate
  modified_base 5: mod_base = OTHER; note = 2'-O-methyluridine-3'-phosphate
  modified_base 6: mod_base = OTHER; note = 2'-O-methyluridine-3'-phosphate
  modified_base 7: mod_base = OTHER; note = 2'-O-methyluridine-3'-phosphate
  modified_base 8: mod_base = OTHER; note = 2'-O-methylcytidine-3'-phosphate
  modified_base 9: mod_base = OTHER; note = 2'-O-methylcytidine-3'-phosphate
  modified_base 11: mod_base = OTHER; note = 2'-O-methylguanosine-3'-phosphate
  modified_base 12: mod_base = OTHER; note = 2'-O-methylguanosine-3'-phosphate
  modified_base 13: mod_base = OTHER; note = 2'-O-methyladenosine-3'-phosphate
  modified_base 15: mod_base = OTHER; note = 2'-O-methylguanosine-3'-phosphate
  modified_base 16: mod_base = OTHER; note = 2'-O-methyladenosine-3'-phosphate
  modified_base 17: mod_base = OTHER; note = 2'-O-methyladenosine-3'-phosphate
  modified_base 18: mod_base = OTHER; note = 2'-O-methyladenosine-3'-phosphate
  modified_base 19: mod_base = OTHER; note = 2'-O-methylguanosine-3'-phosphate
  modified_base 20: mod_base = OTHER; note = 2'-O-methyluridine-3'-phosphate
  modified_base 21: mod_base = OTHER; note = 2'-O-methylcytidine-3'-phosphorothioate
  modified_base 22: mod_base = OTHER; note = 2'-O-methylcytidine-3'-phosphorothioate
  modified_base 23: mod_base = OTHER; note = 2'-O-methyladenosine
  misc_feature 1: note = RNA
  misc_feature 3..9: note = RNA
  misc_feature 11..13: note = RNA
  misc_feature 15..23: note = RNA
  misc_feature 2: note = DNA
  misc_feature 10: note = DNA
  misc_feature 14: note = DNA
tatatttccaggatgaaagtcca

SEQ ID NO: 348 - DNA, 23 bp, synthetic construct
  source 1..23: mol_type = other DNA
  modified_base 1: mod_base = OTHER; note = 2'-O-methyluridine-3'-phosphorothioate
  modified_base 2: mod_base = OTHER; note = 2'-deoxyadenosine-3'-phosphorothioate
  modified_base 3: mod_base = OTHER; note = 2'-O-methyluridine-3'-phosphate
  modified_base 4: mod_base = OTHER; note = 2'-O-methyladenosine-3'-phosphate
  modified_base 5: mod_base = OTHER; note = 2'-O-methyluridine-3'-phosphate
  modified_base 6: mod_base = OTHER; note = 2'-O-methyluridine-3'-phosphate
  modified_base 7: mod_base = OTHER; note = 2'-O-methyluridine-3'-phosphate
  modified_base 8: mod_base = OTHER; note = 2'-O-methylcytidine-3'-phosphate
  modified_base 9: mod_base = OTHER; note = 2'-O-methylcytidine-3'-phosphate
  modified_base 10: mod_base = OTHER; note = 2'-O-methyladenosine-3'-phosphate
  modified_base 11: mod_base = OTHER; note = 2'-O-methylguanosine-3'-phosphate
  modified_base 12: mod_base = OTHER; note = 2'-O-methylguanosine-3'-phosphate
  modified_base 13: mod_base = OTHER; note = 2'-O-methyladenosine-3'-phosphate
  modified_base 15: mod_base = OTHER; note = 2'-O-methylguanosine-3'-phosphate
  modified_base 16: mod_base = OTHER; note = 2'-O-methyladenosine-3'-phosphate
  modified_base 17: mod_base = OTHER; note = 2'-O-methyladenosine-3'-phosphate
  modified_base 18: mod_base = OTHER; note = 2'-O-methyladenosine-3'-phosphate
  modified_base 19: mod_base = OTHER; note = 2'-O-methylguanosine-3'-phosphate
  modified_base 20: mod_base = OTHER; note = 2'-O-methyluridine-3'-phosphate
  modified_base 21: mod_base = OTHER; note = 2'-O-methylcytidine-3'-phosphorothioate
  modified_base 22: mod_base = OTHER; note = 2'-O-methylcytidine-3'-phosphorothioate
  modified_base 23: mod_base = OTHER; note = 2'-O-methyladenosine
  misc_feature 1: note = RNA
  misc_feature 3..13: note = RNA
  misc_feature 15..23: note = RNA
  misc_feature 2: note = DNA
  misc_feature 14: note = DNA
tatatttccaggatgaaagtcca

SEQ ID NO: 349 - DNA, 23 bp, synthetic construct
  source 1..23: mol_type = other DNA
  modified_base 1: mod_base = OTHER; note = 2'-O-methyluridine-3'-phosphorothioate
  modified_base 2: mod_base = OTHER; note = adenosine-3'-phosphorothioate
  modified_base 3: mod_base = OTHER; note = 2'-O-methyluridine-3'-phosphate
  modified_base 4: mod_base = OTHER; note = 2'-O-methyladenosine-3'-phosphate
  modified_base 5: mod_base = OTHER; note = 2'-O-methyluridine-3'-phosphate
  modified_base 6: mod_base = OTHER; note = 2'-O-methyluridine-3'-phosphate
  modified_base 7: mod_base = OTHER; note = 2'-O-methyluridine-3'-phosphate
  modified_base 8: mod_base = OTHER; note = 2'-O-methylcytidine-3'-phosphate
  modified_base 9: mod_base = OTHER; note = 2'-O-methylcytidine-3'-phosphate
  modified_base 10: mod_base = OTHER; note = 2'-O-methyladenosine-3'-phosphate
  modified_base 11: mod_base = OTHER; note = 2'-O-methylguanosine-3'-phosphate
  modified_base 12: mod_base = OTHER; note = 2'-O-methylguanosine-3'-phosphate
  modified_base 13: mod_base = OTHER; note = 2'-O-methyladenosine-3'-phosphate
  modified_base 15: mod_base = OTHER; note = 2'-O-methylguanosine-3'-phosphate
  modified_base 16: mod_base = OTHER; note = 2'-O-methyladenosine-3'-phosphate
  modified_base 17: mod_base = OTHER; note = 2'-O-methyladenosine-3'-phosphate
  modified_base 18: mod_base = OTHER; note = 2'-O-methyladenosine-3'-phosphate
  modified_base 19: mod_base = OTHER; note = 2'-O-methylguanosine-3'-phosphate
  modified_base 20: mod_base = OTHER; note = 2'-O-methyluridine-3'-phosphate
  modified_base 21: mod_base = OTHER; note = 2'-O-methylcytidine-3'-phosphorothioate
  modified_base 22: mod_base = OTHER; note = 2'-O-methylcytidine-3'-phosphorothioate
  modified_base 23: mod_base = OTHER; note = 2'-O-methyladenosine
  misc_feature 1..13: note = RNA
  misc_feature 15..23: note = RNA
  misc_feature 14: note = DNA
tatatttccaggatgaaagtcca

SEQ ID NO: 350 - DNA, 23 bp, synthetic construct
  source 1..23: mol_type = other DNA
  modified_base 1: mod_base = OTHER; note = 2'-O-methyluridine-3'-phosphorothioate
  modified_base 2: mod_base = OTHER; note = 2'-deoxyadenosine-3'-phosphorothioate
  modified_base 3: mod_base = OTHER; note = 2'-O-methyluridine-3'-phosphate
  modified_base 4: mod_base = OTHER; note = 2'-O-methyladenosine-3'-phosphate
  modified_base 5: mod_base = OTHER; note = 2'-O-methyluridine-3'-phosphate
  modified_base 7: mod_base = OTHER; note = 2'-O-methyluridine-3'-phosphate
  modified_base 8: mod_base = OTHER; note = 2'-O-methylcytidine-3'-phosphate
  modified_base 9: mod_base = OTHER; note = 2'-O-methylcytidine-3'-phosphate
  modified_base 10: mod_base = OTHER; note = 2'-O-methyladenosine-3'-phosphate
  modified_base 11: mod_base = OTHER; note = 2'-O-methylguanosine-3'-phosphate
  modified_base 12: mod_base = OTHER; note = 2'-O-methylguanosine-3'-phosphate
  modified_base 13: mod_base = OTHER; note = 2'-O-methyladenosine-3'-phosphate
  modified_base 15: mod_base = OTHER; note = 2'-O-methylguanosine-3'-phosphate
  modified_base 16: mod_base = OTHER; note = 2'-O-methyladenosine-3'-phosphate
  modified_base 17: mod_base = OTHER; note = 2'-O-methyladenosine-3'-phosphate
  modified_base 18: mod_base = OTHER; note = 2'-O-methyladenosine-3'-phosphate
  modified_base 19: mod_base = OTHER; note = 2'-O-methylguanosine-3'-phosphate
  modified_base 20: mod_base = OTHER; note = 2'-O-methyluridine-3'-phosphate
  modified_base 21: mod_base = OTHER; note = 2'-O-methylcytidine-3'-phosphorothioate
  modified_base 22: mod_base = OTHER; note = 2'-O-methylcytidine-3'-phosphorothioate
  modified_base 23: mod_base = OTHER; note = 2'-O-methyladenosine
  misc_feature 1: note = RNA
  misc_feature 3..5: note = RNA
  misc_feature 7..13: note = RNA
  misc_feature 15..23: note = RNA
  misc_feature 2: note = DNA
  misc_feature 6: note = DNA
  misc_feature 14: note = DNA
tatatttccaggatgaaagtcca

SEQ ID NO: 351 - DNA, 23 bp, synthetic construct
  source 1..23: mol_type = other DNA
  modified_base 1: mod_base = OTHER; note = 2'-O-methyluridine-3'-phosphorothioate
  modified_base 2: mod_base = OTHER; note = adenosine-3'-phosphorothioate
  modified_base 3: mod_base = OTHER; note = 2'-O-methyluridine-3'-phosphate
  modified_base 4: mod_base = OTHER; note = 2'-O-methyladenosine-3'-phosphate
  modified_base 5: mod_base = OTHER; note = 2'-O-methyluridine-3'-phosphate
  modified_base 7: mod_base = OTHER; note = 2'-O-methyluridine-3'-phosphate
  modified_base 8: mod_base = OTHER; note = 2'-O-methylcytidine-3'-phosphate
  modified_base 9: mod_base = OTHER; note = 2'-O-methylcytidine-3'-phosphate
  modified_base 10: mod_base = OTHER; note = 2'-O-methyladenosine-3'-phosphate
  modified_base 11: mod_base = OTHER; note = 2'-O-methylguanosine-3'-phosphate
  modified_base 12: mod_base = OTHER; note = 2'-O-methylguanosine-3'-phosphate
  modified_base 13: mod_base = OTHER; note = 2'-O-methyladenosine-3'-phosphate
  modified_base 15: mod_base = OTHER; note = 2'-O-methylguanosine-3'-phosphate
  modified_base 16: mod_base = OTHER; note = 2'-O-methyladenosine-3'-phosphate
  modified_base 17: mod_base = OTHER; note = 2'-O-methyladenosine-3'-phosphate
  modified_base 18: mod_base = OTHER; note = 2'-O-methyladenosine-3'-phosphate
  modified_base 19: mod_base = OTHER; note = 2'-O-methylguanosine-3'-phosphate
  modified_base 20: mod_base = OTHER; note = 2'-O-methyluridine-3'-phosphate
  modified_base 21: mod_base = OTHER; note = 2'-O-methylcytidine-3'-phosphorothioate
  modified_base 22: mod_base = OTHER; note = 2'-O-methylcytidine-3'-phosphorothioate
  modified_base 23: mod_base = OTHER; note = 2'-O-methyladenosine
  misc_feature 1..5: note = RNA
  misc_feature 7..13: note = RNA
  misc_feature 15..23: note = RNA
  misc_feature 6: note = DNA
  misc_feature 14: note = DNA
tatatttccaggatgaaagtcca

SEQ ID NO: 352 - DNA, 23 bp, synthetic construct
  source 1..23: mol_type = other DNA
  modified_base 1: mod_base = OTHER; note = 2'-O-methyluridine-3'-phosphorothioate
  modified_base 2: mod_base = OTHER; note = 2'-deoxyadenosine-3'-phosphorothioate
  modified_base 3: mod_base = OTHER; note = 2'-O-methyluridine-3'-phosphate
  modified_base 4: mod_base = OTHER; note = 2'-O-methyladenosine-3'-phosphate
  modified_base 5: mod_base = OTHER; note = 2'-O-methyluridine-3'-phosphate
  modified_base 6: mod_base = OTHER; note = 2'-O-methyluridine-3'-phosphate
  modified_base 7: mod_base = OTHER; note = 2'-O-methyluridine-3'-phosphate
  modified_base 8: mod_base = OTHER; note = 2'-O-methylcytidine-3'-phosphate
  modified_base 9: mod_base = OTHER; note = 2'-O-methylcytidine-3'-phosphate
  modified_base 10: mod_base = OTHER; note = 2'-O-methyladenosine-3'-phosphate
  modified_base 11: mod_base = OTHER; note = 2'-O-methylguanosine-3'-phosphate
  modified_base 12: mod_base = OTHER; note = 2'-O-methylguanosine-3'-phosphate
  modified_base 13: mod_base = OTHER; note = 2'-O-methyladenosine-3'-phosphate
  modified_base 15: mod_base = OTHER; note = 2'-O-methylguanosine-3'-phosphate
  modified_base 17: mod_base = OTHER; note = 2'-O-methyladenosine-3'-phosphate
  modified_base 18: mod_base = OTHER; note = 2'-O-methyladenosine-3'-phosphate
  modified_base 19: mod_base = OTHER; note = 2'-O-methylguanosine-3'-phosphate
  modified_base 20: mod_base = OTHER; note = 2'-O-methyluridine-3'-phosphate
  modified_base 21: mod_base = OTHER; note = 2'-O-methylcytidine-3'-phosphorothioate
  modified_base 22: mod_base = OTHER; note = 2'-O-methylcytidine-3'-phosphorothioate
  modified_base 23: mod_base = OTHER; note = 2'-O-methyladenosine
  misc_feature 1: note = RNA
  misc_feature 3..13: note = RNA
  misc_feature 15: note = RNA
  misc_feature 17..23: note = RNA
  misc_feature 2: note = DNA
  misc_feature 14: note = DNA
  misc_feature 16: note = DNA
tatatttccaggatgaaagtcca

SEQ ID NO: 353 - DNA, 23 bp, synthetic construct
  source 1..23: mol_type = other DNA
  modified_base 1: mod_base = OTHER; note = 2'-O-methyluridine-3'-phosphorothioate
  modified_base 2: mod_base = OTHER; note = 2'-deoxyadenosine-3'-phosphorothioate
  modified_base 3: mod_base = OTHER; note = 2'-O-methyluridine-3'-phosphate
  modified_base 4: mod_base = OTHER; note = 2'-O-methyladenosine-3'-phosphate
  modified_base 5: mod_base = OTHER; note = 2'-O-methyluridine-3'-phosphate
  modified_base 7: mod_base = OTHER; note = 2'-O-methyluridine-3'-phosphate
  modified_base 8: mod_base = OTHER; note = 2'-O-methylcytidine-3'-phosphate
  modified_base 9: mod_base = OTHER; note = 2'-O-methylcytidine-3'-phosphate
  modified_base 10: mod_base = OTHER; note = 2'-O-methyladenosine-3'-phosphate
  modified_base 11: mod_base = OTHER; note = 2'-O-methylguanosine-3'-phosphate
  modified_base 12: mod_base = OTHER; note = 2'-O-methylguanosine-3'-phosphate
  modified_base 13: mod_base = OTHER; note = 2'-O-methyladenosine-3'-phosphate
  modified_base 15: mod_base = OTHER; note = 2'-O-methylguanosine-3'-phosphate
  modified_base 17: mod_base = OTHER; note = 2'-O-methyladenosine-3'-phosphate
  modified_base 18: mod_base = OTHER; note = 2'-O-methyladenosine-3'-phosphate
  modified_base 19: mod_base = OTHER; note = 2'-O-methylguanosine-3'-phosphate
  modified_base 20: mod_base = OTHER; note = 2'-O-methyluridine-3'-phosphate
  modified_base 21: mod_base = OTHER; note = 2'-O-methylcytidine-3'-phosphorothioate
  modified_base 22: mod_base = OTHER; note = 2'-O-methylcytidine-3'-phosphorothioate
  modified_base 23: mod_base = OTHER; note = 2'-O-methyladenosine
  misc_feature 1: note = RNA
  misc_feature 3..5: note = RNA
  misc_feature 7..13: note = RNA
  misc_feature 15: note = RNA
  misc_feature 17..23: note = RNA
  misc_feature 2: note = DNA
  misc_feature 6: note = DNA
  misc_feature 14: note = DNA
  misc_feature 16: note = DNA
tatatttccaggatgaaagtcca

SEQ ID NO: 354 - DNA, 23 bp, synthetic construct
  source 1..23: mol_type = other DNA
  modified_base 1: mod_base = OTHER; note = 2'-O-methyluridine-3'-phosphorothioate
  modified_base 2: mod_base = OTHER; note = 2'-deoxyadenosine-3'-phosphorothioate
  modified_base 3: mod_base = OTHER; note = 2'-O-methyluridine-3'-phosphate
  modified_base 4: mod_base = OTHER; note = 2'-O-methyladenosine-3'-phosphate
  modified_base 5: mod_base = OTHER; note = 2'-O-methyluridine-3'-phosphate
  modified_base 6: mod_base = OTHER; note = 2'-O-methyluridine-3'-phosphate
  modified_base 7: mod_base = OTHER; note = 2'-O-methyluridine-3'-phosphate
  modified_base 8: mod_base = OTHER; note = 2'-O-methylcytidine-3'-phosphate
  modified_base 9: mod_base = OTHER; note = 2'-O-methylcytidine-3'-phosphate
  modified_base 11: mod_base = OTHER; note = 2'-O-methylguanosine-3'-phosphate
  modified_base 12: mod_base = OTHER; note = 2'-O-methylguanosine-3'-phosphate
  modified_base 13: mod_base = OTHER; note = 2'-O-methyladenosine-3'-phosphate
  modified_base 15: mod_base = OTHER; note = 2'-O-methylguanosine-3'-phosphate
  modified_base 16: mod_base = OTHER; note = 2'-O-methyladenosine-3'-phosphate
  modified_base 17: mod_base = OTHER; note = 2'-O-methyladenosine-3'-phosphate
  modified_base 18: mod_base = OTHER; note = 2'-O-methyladenosine-3'-phosphate
  modified_base 19: mod_base = OTHER; note = 2'-O-methylguanosine-3'-phosphate
  modified_base 20: mod_base = OTHER; note = 2'-O-methyluridine-3'-phosphate
  modified_base 21: mod_base = OTHER; note = 2'-O-methylcytidine-3'-phosphorothioate
  modified_base 22: mod_base = OTHER; note = 2'-O-methylcytidine-3'-phosphorothioate
  modified_base 23: mod_base = OTHER; note = 2'-O-methyladenosine
  misc_feature 1: note = RNA
  misc_feature 3..9: note = RNA
  misc_feature 11..13: note = RNA
  misc_feature 15..23: note = RNA
  misc_feature 2: note = DNA
  misc_feature 10: note = DNA
  misc_feature 14: note = DNA
tatatttccaggatgaaagtcca

SEQ ID NO: 355 - RNA, 23 nt, synthetic construct
  source 1..23: mol_type = other RNA
  modified_base 1: mod_base = OTHER; note = 2'-O-methyluridine-3'-phosphorothioate
  modified_base 2: mod_base = OTHER; note = 2'-deoxy-2'-fluoroguanosine-3'-phosphorothioate
  modified_base 3: mod_base = OTHER; note = 2'-O-methyladenosine-3'-phosphate
  modified_base 4: mod_base = OTHER; note = 2'-O-methylcytidine-3'-phosphate
  modified_base 5: mod_base = OTHER; note = 2'-O-methyladenosine-3'-phosphate
  modified_base 6: mod_base = OTHER; note = 2'-deoxy-2'-fluorouridine-3'-phosphate
  modified_base 7: mod_base = OTHER; note = 2'-O-methylcytidine-3'-phosphate
  modified_base 8: mod_base = OTHER; note = 2'-deoxy-2'-fluorouridine-3'-phosphate
  modified_base 9: mod_base = OTHER; note = 2'-deoxy-2'-fluorouridine-3'-phosphate
  modified_base 10: mod_base = OTHER; note = 2'-O-methylguanosine-3'-phosphate
  modified_base 11: mod_base = OTHER; note = 2'-O-methyladenosine-3'-phosphate
  modified_base 12: mod_base = OTHER; note = 2'-O-methyladenosine-3'-phosphate
  modified_base 13: mod_base = OTHER; note = 2'-O-methylcytidine-3'-phosphate
  modified_base 14: mod_base = OTHER; note = 2'-deoxy-2'-fluoroadenosine-3'-phosphate
  modified_base 15: mod_base = OTHER; note = 2'-O-methylcytidine-3'-phosphate
  modified_base 16: mod_base = OTHER; note = 2'-deoxy-2'-fluorocytidine-3'-phosphate
  modified_base 17: mod_base = OTHER; note = 2'-O-methyluridine-3'-phosphate
  modified_base 18: mod_base = OTHER; note = 2'-O-methyluridine-3'-phosphate
  modified_base 19: mod_base = OTHER; note = 2'-O-methyluridine-3'-phosphate
  modified_base 20: mod_base = OTHER; note = 2'-O-methylcytidine-3'-phosphate
  modified_base 21: mod_base = OTHER; note = 2'-O-methyluridine-3'-phosphorothioate
  modified_base 22: mod_base = OTHER; note = 2'-O-methylcytidine-3'-phosphorothioate
  modified_base 23: mod_base = OTHER; note = 2'-O-methylcytidine
tgacatcttgaacacctttctcc

SEQ ID NO: 356 - RNA, 23 nt, synthetic construct
  source 1..23: mol_type = other RNA
  modified_base 1: mod_base = OTHER; note = 2'-O-methyladenosine-3'-phosphorothioate
  modified_base 2: mod_base = OTHER; note = 2'-deoxy-2'-fluoroguanosine-3'-phosphorothioate
  modified_base 3: mod_base = OTHER; note = 2'-O-methyluridine-3'-phosphate
  modified_base 4: mod_base = OTHER; note = 2'-O-methyluridine-3'-phosphate
  modified_base 5: mod_base = OTHER; note = 2'-O-methyladenosine-3'-phosphate
  modified_base 6: mod_base = OTHER; note = 2'-deoxy-2'-fluoroadenosine-3'-phosphate
  modified_base 7: mod_base = OTHER; note = 2'-O-methyluridine-3'-phosphate
  modified_base 8: mod_base = OTHER; note = 2'-deoxy-2'-fluoroadenosine-3'-phosphate
  modified_base 9: mod_base = OTHER; note = 2'-deoxy-2'-fluorouridine-3'-phosphate
  modified_base 10: mod_base = OTHER; note = 2'-O-methyladenosine-3'-phosphate
  modified_base 11: mod_base = OTHER; note = 2'-O-methyluridine-3'-phosphate
  modified_base 12: mod_base = OTHER; note = 2'-O-methyluridine-3'-phosphate
  modified_base 13: mod_base = OTHER; note = 2'-O-methyluridine-3'-phosphate
  modified_base 14: mod_base = OTHER; note = 2'-deoxy-2'-fluorocytidine-3'-phosphate
  modified_base 15: mod_base = OTHER; note = 2'-O-methylcytidine-3'-phosphate
  modified_base 16: mod_base = OTHER; note = 2'-deoxy-2'-fluoroadenosine-3'-phosphate
  modified_base 17: mod_base = OTHER; note = 2'-O-methylguanosine-3'-phosphate
  modified_base 18: mod_base = OTHER; note = 2'-O-methylguanosine-3'-phosphate
  modified_base 19: mod_base = OTHER; note = 2'-O-methyladenosine-3'-phosphate
  modified_base 20: mod_base = OTHER; note = 2'-O-methyluridine-3'-phosphate
  modified_base 21: mod_base = OTHER; note = 2'-O-methylguanosine-3'-phosphorothioate
  modified_base 22: mod_base = OTHER; note = 2'-O-methyladenosine-3'-phosphorothioate
  modified_base 23: mod_base = OTHER; note = 2'-O-methyladenosine
agttaatatatttccaggatgaa

SEQ ID NO: 357 - RNA, 23 nt, synthetic construct
  source 1..23: mol_type = other RNA
  modified_base 1: mod_base = OTHER; note = 2'-O-methyluridine-3'-phosphorothioate
  modified_base 2: mod_base = OTHER; note = 2'-deoxy-2'-fluorouridine-3'-phosphorothioate
  modified_base 3: mod_base = OTHER; note = 2'-O-methylguanosine-3'-phosphate
  modified_base 4: mod_base = OTHER; note = 2'-O-methyluridine-3'-phosphate
  modified_base 5: mod_base = OTHER; note = 2'-O-methylcytidine-3'-phosphate
  modified_base 6: mod_base = OTHER; note = 2'-deoxy-2'-fluoroguanosine-3'-phosphate
  modified_base 7: mod_base = OTHER; note = 2'-O-methyladenosine-3'-phosphate
  modified_base 8: mod_base = OTHER; note = 2'-deoxy-2'-fluorouridine-3'-phosphate
  modified_base 9: mod_base = OTHER; note = 2'-deoxy-2'-fluoroguanosine-3'-phosphate
  modified_base 10: mod_base = OTHER; note = 2'-O-methyladenosine-3'-phosphate
  modified_base 11: mod_base = OTHER; note = 2'-O-methylcytidine-3'-phosphate
  modified_base 12: mod_base = OTHER; note = 2'-O-methyluridine-3'-phosphate
  modified_base 13: mod_base = OTHER; note = 2'-O-methyluridine-3'-phosphate
  modified_base 14: mod_base = OTHER; note = 2'-deoxy-2'-fluorouridine-3'-phosphate
  modified_base 15: mod_base = OTHER; note = 2'-O-methylcytidine-3'-phosphate
  modified_base 16: mod_base = OTHER; note = 2'-deoxy-2'-fluoroadenosine-3'-phosphate
  modified_base 17: mod_base = OTHER; note = 2'-O-methylcytidine-3'-phosphate
  modified_base 18: mod_base = OTHER; note = 2'-O-methyladenosine-3'-phosphate
  modified_base 19: mod_base = OTHER; note = 2'-O-methyluridine-3'-phosphate
  modified_base 20: mod_base = OTHER; note = 2'-O-methyluridine-3'-phosphate
  modified_base 21: mod_base = OTHER; note = 2'-O-methylcytidine-3'-phosphorothioate
  modified_base 22: mod_base = OTHER; note = 2'-O-methyluridine-3'-phosphorothioate
  modified_base 23: mod_base = OTHER; note = 2'-O-methylguanosine
ttgtcgatgactttcacattctg

SEQ ID NO: 358 - RNA, 23 nt, synthetic construct
  source 1..23: mol_type = other RNA
  modified_base 1: mod_base = OTHER; note = 2'-O-methyluridine-3'-phosphorothioate
  modified_base 2: mod_base = OTHER; note = 2'-deoxy-2'-fluoroadenosine-3'-phosphorothioate
  modified_base 3: mod_base = OTHER; note = 2'-O-methyluridine-3'-phosphate
  modified_base 4: mod_base = OTHER; note = 2'-O-methylguanosine-3'-phosphate
  modified_base 5: mod_base = OTHER; note = 2'-O-methylguanosine-3'-phosphate
  modified_base 6: mod_base = OTHER; note = 2'-deoxy-2'-fluoroguanosine-3'-phosphate
  modified_base 7: mod_base = OTHER; note = 2'-O-methyladenosine-3'-phosphate
  modified_base 8: mod_base = OTHER; note = 2'-deoxy-2'-fluoroadenosine-3'-phosphate
  modified_base 9: mod_base = OTHER; note = 2'-deoxy-2'-fluoroadenosine-3'-phosphate
  modified_base 10: mod_base = OTHER; note = 2'-O-methyladenosine-3'-phosphate
  modified_base 11: mod_base = OTHER; note = 2'-O-methyluridine-3'-phosphate
  modified_base 12: mod_base = OTHER; note = 2'-O-methyladenosine-3'-phosphate
  modified_base 13: mod_base = OTHER; note = 2'-O-methyluridine-3'-phosphate
  modified_base 14: mod_base = OTHER; note = 2'-deoxy-2'-fluorouridine-3'-phosphate
  modified_base 15: mod_base = OTHER; note = 2'-O-methylguanosine-3'-phosphate
  modified_base 16: mod_base = OTHER; note = 2'-deoxy-2'-fluorouridine-3'-phosphate
  modified_base 17: mod_base = OTHER; note = 2'-O-methylguanosine-3'-phosphate
  modified_base 18: mod_base = OTHER; note = 2'-O-methylcytidine-3'-phosphate
  modified_base 19: mod_base = OTHER; note = 2'-O-methyladenosine-3'-phosphate
  modified_base 20: mod_base = OTHER; note = 2'-O-methylcytidine-3'-phosphate
  modified_base 21: mod_base = OTHER; note = 2'-O-methyluridine-3'-phosphorothioate
  modified_base 22: mod_base = OTHER; note = 2'-O-methylguanosine-3'-phosphorothioate
  modified_base 23: mod_base = OTHER; note = 2'-O-methyluridine
tatgggaaaatattgtgcactgt

SEQ ID NO: 359 - RNA, 23 nt, synthetic construct
  source 1..23: mol_type = other RNA
  modified_base 1: mod_base = OTHER; note = 2'-O-methyladenosine-3'-phosphorothioate
  modified_base 2: mod_base = OTHER; note = 2'-deoxy-2'-fluoroadenosine-3'-phosphorothioate
  modified_base 3: mod_base = OTHER; note = 2'-O-methyluridine-3'-phosphate
  modified_base 4: mod_base = OTHER; note = 2'-O-methylguanosine-3'-phosphate
  modified_base 5: mod_base = OTHER; note = 2'-O-methyluridine-3'-phosphate
  modified_base 6: mod_base = OTHER; note = 2'-deoxy-2'-fluorocytidine-3'-phosphate
  modified_base 7: mod_base = OTHER; note = 2'-O-methyluridine-3'-phosphate
  modified_base 8: mod_base = OTHER; note = 2'-deoxy-2'-fluorouridine-3'-phosphate
  modified_base 9: mod_base = OTHER; note = 2'-deoxy-2'-fluoroguanosine-3'-phosphate
  modified_base 10: mod_base = OTHER; note = 2'-O-methyluridine-3'-phosphate
  modified_base 11: mod_base = OTHER; note = 2'-O-methylcytidine-3'-phosphate
  modified_base 12: mod_base = OTHER; note = 2'-O-methylguanosine-3'-phosphate
  modified_base 13: mod_base = OTHER; note = 2'-O-methyladenosine-3'-phosphate
  modified_base 14: mod_base = OTHER; note = 2'-deoxy-2'-fluorouridine-3'-phosphate
  modified_base 15: mod_base = OTHER; note = 2'-O-methylguanosine-3'-phosphate
  modified_base 16: mod_base = OTHER; note = 2'-deoxy-2'-fluoroadenosine-3'-phosphate
  modified_base 17: mod_base = OTHER; note = 2'-O-methylcytidine-3'-phosphate
  modified_base 18: mod_base = OTHER; note = 2'-O-methyluridine-3'-phosphate
  modified_base 19: mod_base = OTHER; note = 2'-O-methyluridine-3'-phosphate
  modified_base 20: mod_base = OTHER; note = 2'-O-methyluridine-3'-phosphate
  modified_base 21: mod_base = OTHER; note = 2'-O-methylcytidine-3'-phosphorothioate
  modified_base 22: mod_base = OTHER; note = 2'-O-methyladenosine-3'-phosphorothioate
  modified_base 23: mod_base = OTHER; note = 2'-O-methylcytidine
aatgtcttgtcgatgactttcac

SEQ ID NO: 360 - RNA, 23 nt, synthetic construct
  source 1..23: mol_type = other RNA
  modified_base 1: mod_base = OTHER; note = 2'-O-methyluridine-3'-phosphorothioate
  modified_base 2: mod_base = OTHER; note = 2'-deoxy-2'-fluorouridine-3'-phosphorothioate
  modified_base 3: mod_base = OTHER; note = 2'-O-methyluridine-3'-phosphate
  modified_base 4: mod_base = OTHER; note = 2'-O-methylguanosine-3'-phosphate
  modified_base 5: mod_base = OTHER; note = 2'-O-methyluridine-3'-phosphate
  modified_base 6: mod_base = OTHER; note = 2'-deoxy-2'-fluorocytidine-3'-phosphate
  modified_base 7: mod_base = OTHER; note = 2'-O-methylguanosine-3'-phosphate
  modified_base 8: mod_base = OTHER; note = 2'-deoxy-2'-fluoroadenosine-3'-phosphate
  modified_base 9: mod_base = OTHER; note = 2'-deoxy-2'-fluorouridine-3'-phosphate
  modified_base 10: mod_base = OTHER; note = 2'-O-methylguanosine-3'-phosphate
  modified_base 11: mod_base = OTHER; note = 2'-O-methyladenosine-3'-phosphate
  modified_base 12: mod_base = OTHER; note = 2'-O-methylcytidine-3'-phosphate
  modified_base 13: mod_base = OTHER; note = 2'-O-methyluridine-3'-phosphate
  modified_base 14: mod_base = OTHER; note = 2'-deoxy-2'-fluorouridine-3'-phosphate
  modified_base 15: mod_base = OTHER; note = 2'-O-methyluridine-3'-phosphate
  modified_base 16: mod_base = OTHER; note = 2'-deoxy-2'-fluorocytidine-3'-phosphate
  modified_base 17: mod_base = OTHER; note = 2'-O-methyladenosine-3'-phosphate
  modified_base 18: mod_base = OTHER; note = 2'-O-methylcytidine-3'-phosphate
  modified_base 19: mod_base = OTHER; note = 2'-O-methyladenosine-3'-phosphate
  modified_base 20: mod_base = OTHER; note = 2'-O-methyluridine-3'-phosphate
  modified_base 21: mod_base = OTHER; note = 2'-O-methyluridine-3'-phosphorothioate
  modified_base 22: mod_base = OTHER; note = 2'-O-methylcytidine-3'-phosphorothioate
  modified_base 23: mod_base = OTHER; note = 2'-O-methyluridine
tttgtcgatgactttcacattct

SEQ ID NO: 361 - RNA, 23 nt, synthetic construct
  source 1..23: mol_type = other RNA
  modified_base 1: mod_base = OTHER; note = 2'-O-methyluridine-3'-phosphorothioate
  modified_base 2: mod_base = OTHER; note = 2'-deoxy-2'-fluoroadenosine-3'-phosphorothioate
  modified_base 3: mod_base = OTHER; note = 2'-O-methyladenosine-3'-phosphate
  modified_base 4: mod_base = OTHER; note = 2'-O-methylcytidine-3'-phosphate
  modified_base 5: mod_base = OTHER; note = 2'-O-methyladenosine-3'-phosphate
  modified_base 6: mod_base = OTHER; note = 2'-deoxy-2'-fluoroguanosine-3'-phosphate
  modified_base 7: mod_base = OTHER; note = 2'-O-methyluridine-3'-phosphate
  modified_base 8: mod_base = OTHER; note = 2'-deoxy-2'-fluorouridine-3'-phosphate
  modified_base 9: mod_base = OTHER; note = 2'-deoxy-2'-fluoroadenosine-3'-phosphate
  modified_base 10: mod_base = OTHER; note = 2'-O-methyladenosine-3'-phosphate
  modified_base 11: mod_base = OTHER; note = 2'-O-methyluridine-3'-phosphate
  modified_base 12: mod_base = OTHER; note = 2'-O-methyladenosine-3'-phosphate
  modified_base 13: mod_base = OTHER; note = 2'-O-methyluridine-3'-phosphate
  modified_base 14: mod_base = OTHER; note = 2'-deoxy-2'-fluoroadenosine-3'-phosphate
  modified_base 15: mod_base = OTHER; note = 2'-O-methyluridine-3'-phosphate
  modified_base 16: mod_base = OTHER; note = 2'-deoxy-2'-fluorouridine-3'-phosphate
  modified_base 17: mod_base = OTHER; note = 2'-O-methyluridine-3'-phosphate
  modified_base 18: mod_base = OTHER; note = 2'-O-methylcytidine-3'-phosphate
  modified_base 19: mod_base = OTHER; note = 2'-O-methylcytidine-3'-phosphate
  modified_base 20: mod_base = OTHER; note = 2'-O-methyladenosine-3'-phosphate
  modified_base 21: mod_base = OTHER; note = 2'-O-methylguanosine-3'-phosphorothioate
  modified_base 22: mod_base = OTHER; note = 2'-O-methylguanosine-3'-phosphorothioate
  modified_base 23: mod_base = OTHER; note = 2'-O-methyladenosine
taacagttaatatatttccagga

SEQ ID NO: 362 - RNA, 23 nt, synthetic construct
  source 1..23: mol_type = other RNA
  modified_base 1: mod_base = OTHER; note = 2'-O-methyladenosine-3'-phosphorothioate
  modified_base 2: mod_base = OTHER; note = 2'-deoxy-2'-fluoroadenosine-3'-phosphorothioate
  modified_base 3: mod_base = OTHER; note = 2'-O-methyladenosine-3'-phosphate
  modified_base 4: mod_base = OTHER; note = 2'-O-methyluridine-3'-phosphate
  modified_base 5: mod_base = OTHER; note = 2'-O-methyladenosine-3'-phosphate
  modified_base 6: mod_base = OTHER; note = 2'-deoxy-2'-fluoroadenosine-3'-phosphate
  modified_base 7: mod_base = OTHER; note = 2'-O-methyluridine-3'-phosphate
  modified_base 8: mod_base = OTHER; note = 2'-deoxy-2'-fluoroadenosine-3'-phosphate
  modified_base 9: mod_base = OTHER; note = 2'-deoxy-2'-fluorocytidine-3'-phosphate
  modified_base 10: mod_base = OTHER; note = 2'-O-methyladenosine-3'-phosphate
  modified_base 11: mod_base = OTHER; note = 2'-O-methylguanosine-3'-phosphate
  modified_base 12: mod_base = OTHER; note = 2'-O-methyladenosine-3'-phosphate
  modified_base 13: mod_base = OTHER; note = 2'-O-methyluridine-3'-phosphate
  modified_base 14: mod_base = OTHER; note = 2'-deoxy-2'-fluoroguanosine-3'-phosphate
  modified_base 15: mod_base = OTHER; note = 2'-O-methylguanosine-3'-phosphate
  modified_base 16: mod_base = OTHER; note = 2'-deoxy-2'-fluoroguanosine-3'-phosphate
  modified_base 17: mod_base = OTHER; note = 2'-O-methyladenosine-3'-phosphate
  modified_base 18: mod_base = OTHER; note = 2'-O-methyladenosine-3'-phosphate
  modified_base 19: mod_base = OTHER; note = 2'-O-methyladenosine-3'-phosphate
  modified_base 20: mod_base = OTHER; note = 2'-O-methyladenosine-3'-phosphate
  modified_base 21: mod_base = OTHER; note = 2'-O-methyluridine-3'-phosphorothioate
  modified_base 22: mod_base = OTHER; note = 2'-O-methyladenosine-3'-phosphorothioate
  modified_base 23: mod_base = OTHER; note = 2'-O-methyluridine
aaataatacagatgggaaaatat

SEQ ID NO: 363 - RNA, 23 nt, synthetic construct
  source 1..23: mol_type = other RNA
  modified_base 1: mod_base = OTHER; note = 2'-O-methyluridine-3'-phosphorothioate
  modified_base 2: mod_base = OTHER; note = 2'-deoxy-2'-fluorouridine-3'-phosphorothioate
  modified_base 3: mod_base = OTHER; note = 2'-O-methyluridine-3'-phosphate
  modified_base 4: mod_base = OTHER; note = 2'-O-methyluridine-3'-phosphate
  modified_base 5: mod_base = OTHER; note = 2'-O-methylguanosine-3'-phosphate
  modified_base 6: mod_base = OTHER; note = 2'-deoxy-2'-fluorouridine-3'-phosphate
  modified_base 7: mod_base = OTHER; note = 2'-O-methyluridine-3'-phosphate
  modified_base 8: mod_base = OTHER; note = 2'-deoxy-2'-fluoroguanosine-3'-phosphate
  modified_base 9: mod_base = OTHER; note = 2'-deoxy-2'-fluoroguanosine-3'-phosphate
  modified_base 10: mod_base = OTHER; note = 2'-O-methyladenosine-3'-phosphate
  modified_base 11: mod_base = OTHER; note = 2'-O-methyladenosine-3'-phosphate
  modified_base 12: mod_base = OTHER; note = 2'-O-methyladenosine-3'-phosphate
  modified_base 13: mod_base = OTHER; note = 2'-O-methyladenosine-3'-phosphate
  modified_base 14: mod_base = OTHER; note = 2'-deoxy-2'-fluoroguanosine-3'-phosphate
  modified_base 15: mod_base = OTHER; note = 2'-O-methyladenosine-3'-phosphate
  modified_base 16: mod_base = OTHER; note = 2'-deoxy-2'-fluoroadenosine-3'-phosphate
  modified_base 17: mod_base = OTHER; note = 2'-O-methylcytidine-3'-phosphate
  modified_base 18: mod_base = OTHER; note = 2'-O-methylguanosine-3'-phosphate
  modified_base 19: mod_base = OTHER; note = 2'-O-methyladenosine-3'-phosphate
  modified_base 20: mod_base = OTHER; note = 2'-O-methylcytidine-3'-phosphate
  modified_base 21: mod_base = OTHER; note = 2'-O-methyladenosine-3'-phosphorothioate
  modified_base 22: mod_base = OTHER; note = 2'-O-methylcytidine-3'-phosphorothioate
  modified_base 23: mod_base = OTHER; note = 2'-O-methylcytidine
ttttgttggaaaagaacgacacc

SEQ ID NO: 364 - RNA, 23 nt, synthetic construct
  source 1..23: mol_type = other RNA
  modified_base 1: mod_base = OTHER; note = 2'-O-methyluridine-3'-phosphorothioate
  modified_base 2: mod_base = OTHER; note = 2'-deoxy-2'-fluoroadenosine-3'-phosphorothioate
  modified_base 3: mod_base = OTHER; note = 2'-O-methylguanosine-3'-phosphate
  modified_base 4: mod_base = OTHER; note = 2'-O-methyluridine-3'-phosphate
  modified_base 5: mod_base = OTHER; note = 2'-O-methyluridine-3'-phosphate
  modified_base 6: mod_base = OTHER; note = 2'-deoxy-2'-fluoroadenosine-3'-phosphate
  modified_base 7: mod_base = OTHER; note = 2'-O-methyladenosine-3'-phosphate
  modified_base 8: mod_base = OTHER; note = 2'-deoxy-2'-fluorouridine-3'-phosphate
  modified_base 9: mod_base = OTHER; note = 2'-deoxy-2'-fluoroadenosine-3'-phosphate
  modified_base 10: mod_base = OTHER; note = 2'-O-methyluridine-3'-phosphate
  modified_base 11: mod_base = OTHER; note = 2'-O-methyladenosine-3'-phosphate
  modified_base 12: mod_base = OTHER; note = 2'-O-methyluridine-3'-phosphate
  modified_base 13: mod_base = OTHER; note = 2'-O-methyluridine-3'-phosphate
  modified_base 14: mod_base = OTHER; note = 2'-deoxy-2'-fluorouridine-3'-phosphate
  modified_base 15: mod_base = OTHER; note = 2'-O-methylcytidine-3'-phosphate
  modified_base 16: mod_base = OTHER; note = 2'-deoxy-2'-fluorocytidine-3'-phosphate
  modified_base 17: mod_base = OTHER; note = 2'-O-methyladenosine-3'-phosphate
  modified_base 18: mod_base = OTHER; note = 2'-O-methylguanosine-3'-phosphate
  modified_base 19: mod_base = OTHER; note = 2'-O-methylguanosine-3'-phosphate
  modified_base 20: mod_base = OTHER; note = 2'-O-methyladenosine-3'-phosphate
  modified_base 21: mod_base = OTHER; note = 2'-O-methyluridine-3'-phosphorothioate
  modified_base 22: mod_base = OTHER; note = 2'-O-methylguanosine-3'-phosphorothioate
  modified_base 23: mod_base = OTHER; note = 2'-O-methyladenosine
tagttaatatatttccaggatga

SEQ ID NO: 365 - RNA, 23 nt, synthetic construct
  source 1..23: mol_type = other RNA
  modified_base 1: mod_base = OTHER; note = 2'-O-methyluridine-3'-phosphorothioate
  modified_base 2: mod_base = OTHER; note = 2'-deoxy-2'-fluoroadenosine-3'-phosphorothioate
  modified_base 3: mod_base = OTHER; note = 2'-O-methyluridine-3'-phosphate
  modified_base 4: mod_base = OTHER; note = 2'-O-methylcytidine-3'-phosphate
  modified_base 5: mod_base = OTHER; note = 2'-O-methyladenosine-3'-phosphate
  modified_base 6: mod_base = OTHER; note = 2'-deoxy-2'-fluorouridine-3'-phosphate
  modified_base 7: mod_base = OTHER; note = 2'-O-methylcytidine-3'-phosphate
  modified_base 8: mod_base = OTHER; note = 2'-deoxy-2'-fluoroadenosine-3'-phosphate
  modified_base 9: mod_base = OTHER; note = 2'-deoxy-2'-fluorocytidine-3'-phosphate
  modified_base 10: mod_base = OTHER; note = 2'-O-methylcytidine-3'-phosphate
  modified_base 11: mod_base = OTHER; note = 2'-O-methyluridine-3'-phosphate
  modified_base 12: mod_base = OTHER; note = 2'-O-methylcytidine-3'-phosphate
  modified_base 13: mod_base = OTHER; note = 2'-O-methyluridine-3'-phosphate
  modified_base 14: mod_base = OTHER; note = 2'-deoxy-2'-fluorocytidine-3'-phosphate
  modified_base 15: mod_base = OTHER; note = 2'-O-methyladenosine-3'-phosphate
  modified_base 16: mod_base = OTHER; note = 2'-deoxy-2'-fluoroadenosine-3'-phosphate
  modified_base 17: mod_base = OTHER; note = 2'-O-methyladenosine-3'-phosphate
  modified_base 18: mod_base = OTHER; note = 2'-O-methyladenosine-3'-phosphate
  modified_base 19: mod_base = OTHER; note = 2'-O-methyluridine-3'-phosphate
  modified_base 20: mod_base = OTHER; note = 2'-O-methylguanosine-3'-phosphate
  modified_base 21: mod_base = OTHER; note = 2'-O-methylcytidine-3'-phosphorothioate
  modified_base 22: mod_base = OTHER; note = 2'-O-methylcytidine-3'-phosphorothioate
  modified_base 23: mod_base = OTHER; note = 2'-O-methylcytidine
tatcatcacctctcaaaatgccc

SEQ ID NO: 366 - RNA, 23 nt, synthetic construct
  source 1..23: mol_type = other RNA
  modified_base 1: mod_base = OTHER; note = 2'-O-methyluridine-3'-phosphorothioate
  modified_base 2: mod_base = OTHER; note = 2'-deoxy-2'-fluorouridine-3'-phosphorothioate
  modified_base 3: mod_base = OTHER; note = 2'-O-methylguanosine-3'-phosphate
  modified_base 4: mod_base = OTHER; note = 2'-O-methyladenosine-3'-phosphate
  modified_base 5: mod_base = OTHER; note = 2'-O-methyladenosine-3'-phosphate
  modified_base 6: mod_base = OTHER; note = 2'-deoxy-2'-fluorocytidine-3'-phosphate
  modified_base 7: mod_base = OTHER; note = 2'-O-methyladenosine-3'-phosphate
  modified_base 8: mod_base = OTHER; note = 2'-deoxy-2'-fluorocytidine-3'-phosphate
  modified_base 9: mod_base = OTHER; note = 2'-deoxy-2'-fluorocytidine-3'-phosphate
  modified_base 10: mod_base = OTHER; note = 2'-O-methyluridine-3'-phosphate
  modified_base 11: mod_base = OTHER; note = 2'-O-methyluridine-3'-phosphate
  modified_base 12: mod_base = OTHER; note = 2'-O-methyluridine-3'-phosphate
  modified_base 13: mod_base = OTHER; note = 2'-O-methylcytidine-3'-phosphate
  modified_base 14: mod_base = OTHER; note = 2'-deoxy-2'-fluorouridine-3'-phosphate
  modified_base 15: mod_base = OTHER; note = 2'-O-methylcytidine-3'-phosphate
  modified_base 16: mod_base = OTHER; note = 2'-deoxy-2'-fluorocytidine-3'-phosphate
  modified_base 17: mod_base = OTHER; note = 2'-O-methylcytidine-3'-phosphate
  modified_base 18: mod_base = OTHER; note = 2'-O-methylcytidine-3'-phosphate
  modified_base 19: mod_base = OTHER; note = 2'-O-methylcytidine-3'-phosphate
  modified_base 20: mod_base = OTHER; note = 2'-O-methyluridine-3'-phosphate
  modified_base 21: mod_base = OTHER; note = 2'-O-methylguanosine-3'-phosphorothioate
  modified_base 22: mod_base = OTHER; note = 2'-O-methylguanosine-3'-phosphorothioate
  modified_base 23: mod_base = OTHER; note = 2'-O-methyladenosine
ttgaacacctttctccccctgga

SEQ ID NO: 367 - RNA, 23 nt, synthetic construct
  source 1..23: mol_type = other RNA
  modified_base 1: mod_base = OTHER; note = 2'-O-methyluridine-3'-phosphorothioate
  modified_base 2: mod_base = OTHER; note = 2'-deoxy-2'-fluorouridine-3'-phosphorothioate
  modified_base 3: mod_base = OTHER; note = 2'-O-methyluridine-3'-phosphate
  modified_base 4: mod_base = OTHER; note = 2'-O-methyladenosine-3'-phosphate
  modified_base 5: mod_base = OTHER; note = 2'-O-methyladenosine-3'-phosphate
  modified_base 6: mod_base = OTHER; note = 2'-deoxy-2'-fluorocytidine-3'-phosphate
  modified_base 7: mod_base = OTHER; note = 2'-O-methyladenosine-3'-phosphate
  modified_base 8: mod_base = OTHER; note = 2'-deoxy-2'-fluoroguanosine-3'-phosphate
  modified_base 9: mod_base = OTHER; note = 2'-deoxy-2'-fluorouridine-3'-phosphate
  modified_base 10: mod_base = OTHER; note = 2'-O-methyluridine-3'-phosphate
  modified_base 11: mod_base = OTHER; note = 2'-O-methyladenosine-3'-phosphate
  modified_base 12: mod_base = OTHER; note = 2'-O-methyladenosine-3'-phosphate
  modified_base 13: mod_base = OTHER; note = 2'-O-methyluridine-3'-phosphate
  modified_base 14: mod_base = OTHER; note = 2'-deoxy-2'-fluoroadenosine-3'-phosphate
  modified_base 15: mod_base = OTHER; note = 2'-O-methyluridine-3'-phosphate
  modified_base 16: mod_base = OTHER; note = 2'-deoxy-2'-fluoroadenosine-3'-phosphate
  modified_base 17: mod_base = OTHER; note = 2'-O-methyluridine-3'-phosphate
  modified_base 18: mod_base = OTHER; note = 2'-O-methyluridine-3'-phosphate
  modified_base 19: mod_base = OTHER; note = 2'-O-methyluridine-3'-phosphate
  modified_base 20: mod_base = OTHER; note = 2'-O-methylcytidine-3'-phosphate
  modified_base 21: mod_base = OTHER; note = 2'-O-methylcytidine-3'-phosphorothioate
  modified_base 22: mod_base = OTHER; note = 2'-O-methyladenosine-3'-phosphorothioate
  modified_base 23: mod_base = OTHER; note = 2'-O-methylguanosine
tttaacagttaatatatttccag

SEQ ID NO: 368 - RNA, 23 nt, synthetic construct
  source 1..23: mol_type = other RNA
  modified_base 1: mod_base = OTHER; note = 2'-O-methyladenosine-3'-phosphorothioate
  modified_base 2: mod_base = OTHER; note = 2'-deoxy-2'-fluoroadenosine-3'-phosphorothioate
  modified_base 3: mod_base = OTHER; note = 2'-O-methylguanosine-3'-phosphate
  modified_base 4: mod_base = OTHER; note = 2'-O-methylguanosine-3'-phosphate
  modified_base 5: mod_base = OTHER; note = 2'-O-methyladenosine-3'-phosphate
  modified_base 6: mod_base = OTHER; note = 2'-deoxy-2'-fluorouridine-3'-phosphate
  modified_base 7: mod_base = OTHER; note = 2'-O-methyluridine-3'-phosphate
  modified_base 8: mod_base = OTHER; note = 2'-deoxy-2'-fluorouridine-3'-phosphate
  modified_base 9: mod_base = OTHER; note = 2'-deoxy-2'-fluorouridine-3'-phosphate
  modified_base 10: mod_base = OTHER; note = 2'-O-methyluridine-3'-phosphate
  modified_base 11: mod_base = OTHER; note = 2'-O-methylcytidine-3'-phosphate
  modified_base 12: mod_base = OTHER; note = 2'-O-methylcytidine-3'-phosphate
  modified_base 13: mod_base = OTHER; note = 2'-O-methyluridine-3'-phosphate
  modified_base 14: mod_base = OTHER; note = 2'-deoxy-2'-fluorocytidine-3'-phosphate
  modified_base 15: mod_base = OTHER; note = 2'-O-methyladenosine-3'-phosphate
  modified_base 16: mod_base = OTHER; note = 2'-deoxy-2'-fluorocytidine-3'-phosphate
  modified_base 17: mod_base = OTHER; note = 2'-O-methylcytidine-3'-phosphate
  modified_base 18: mod_base = OTHER; note = 2'-O-methyladenosine-3'-phosphate
  modified_base 19: mod_base = OTHER; note = 2'-O-methyladenosine-3'-phosphate
  modified_base 20: mod_base = OTHER; note = 2'-O-methyluridine-3'-phosphate
  modified_base 21: mod_base = OTHER; note = 2'-O-methylguanosine-3'-phosphorothioate
  modified_base 22: mod_base = OTHER; note = 2'-O-methyluridine-3'-phosphorothioate
  modified_base 23: mod_base = OTHER; note = 2'-O-methylcytidine
aaggatttttcctcaccaatgtc

SEQ ID NO: 369 - RNA, 23 nt, synthetic construct
  source 1..23: mol_type = other RNA
  modified_base 1: mod_base = OTHER; note = 2'-O-methyluridine-3'-phosphorothioate
  modified_base 2: mod_base = OTHER; note = 2'-deoxy-2'-fluoroadenosine-3'-phosphorothioate
  modified_base 3: mod_base = OTHER; note = 2'-O-methyluridine-3'-phosphate
  modified_base 4: mod_base = OTHER; note = 2'-O-methylcytidine-3'-phosphate
  modified_base 5: mod_base = OTHER; note = 2'-O-methyluridine-3'-phosphate
  modified_base 6: mod_base = OTHER; note = 2'-deoxy-2'-fluorouridine-3'-phosphate
  modified_base 7: mod_base = OTHER; note = 2'-O-methylguanosine-3'-phosphate
  modified_base 8: mod_base = OTHER; note = 2'-deoxy-2'-fluoroadenosine-3'-phosphate
  modified_base 9: mod_base = OTHER; note = 2'-deoxy-2'-fluoroadenosine-3'-phosphate
  modified_base 10: mod_base = OTHER; note = 2'-O-methylcytidine-3'-phosphate
  modified_base 11: mod_base = OTHER; note = 2'-O-methyladenosine-3'-phosphate
  modified_base 12: mod_base = OTHER; note = 2'-O-methylcytidine-3'-phosphate
  modified_base 13: mod_base = OTHER; note = 2'-O-methylcytidine-3'-phosphate
  modified_base 14: mod_base = OTHER; note = 2'-deoxy-2'-fluorouridine-3'-phosphate
  modified_base 15: mod_base = OTHER; note = 2'-O-methyluridine-3'-phosphate
  modified_base 16: mod_base = OTHER; note = 2'-deoxy-2'-fluorouridine-3'-phosphate
  modified_base 17: mod_base = OTHER; note = 2'-O-methylcytidine-3'-phosphate
  modified_base 18: mod_base = OTHER; note = 2'-O-methyluridine-3'-phosphate
  modified_base 19: mod_base = OTHER; note = 2'-O-methylcytidine-3'-phosphate
  modified_base 20: mod_base = OTHER; note = 2'-O-methylcytidine-3'-phosphate
  modified_base 21: mod_base = OTHER; note = 2'-O-methylcytidine-3'-phosphorothioate
  modified_base 22: mod_base = OTHER; note = 2'-O-methylcytidine-3'-phosphorothioate
  modified_base 23: mod_base = OTHER; note = 2'-O-methylcytidine
tatcttgaacacctttctccccc

SEQ ID NO: 370 - RNA, 23 nt, synthetic construct
  source 1..23: mol_type = other RNA
  modified_base 1: mod_base = OTHER; note = 2'-O-methyladenosine-3'-phosphorothioate
  modified_base 2: mod_base = OTHER; note = 2'-deoxy-2'-fluorouridine-3'-phosphorothioate
  modified_base 3: mod_base = OTHER; note = 2'-O-methylcytidine-3'-phosphate
  modified_base 4: mod_base = OTHER; note = 2'-O-methyladenosine-3'-phosphate
  modified_base 5: mod_base = OTHER; note = 2'-O-methyluridine-3'-phosphate
  modified_base 6: mod_base = OTHER; note = 2'-deoxy-2'-fluorocytidine-3'-phosphate
  modified_base 7: mod_base = OTHER; note = 2'-O-methyladenosine-3'-phosphate
  modified_base 8: mod_base = OTHER; note = 2'-deoxy-2'-fluorocytidine-3'-phosphate
  modified_base 9: mod_base = OTHER; note = 2'-deoxy-2'-fluorocytidine-3'-phosphate
  modified_base 10: mod_base = OTHER; note = 2'-O-methyluridine-3'-phosphate
  modified_base 11: mod_base = OTHER; note = 2'-O-methylcytidine-3'-phosphate
  modified_base 12: mod_base = OTHER; note = 2'-O-methyluridine-3'-phosphate
  modified_base 13: mod_base = OTHER; note = 2'-O-methylcytidine-3'-phosphate
  modified_base 14: mod_base = OTHER; note = 2'-deoxy-2'-fluoroadenosine-3'-phosphate
  modified_base 15: mod_base = OTHER; note = 2'-O-methyladenosine-3'-phosphate
  modified_base 16: mod_base = OTHER; note = 2'-deoxy-2'-fluoroadenosine-3'-phosphate
  modified_base 17: mod_base = OTHER; note = 2'-O-methyladenosine-3'-phosphate
  modified_base 18: mod_base = OTHER; note = 2'-O-methyluridine-3'-phosphate
  modified_base 19: mod_base = OTHER; note = 2'-O-methylguanosine-3'-phosphate
  modified_base 20: mod_base = OTHER; note = 2'-O-methylcytidine-3'-phosphate
  modified_base 21: mod_base = OTHER; note = 2'-O-methylcytidine-3'-phosphorothioate
  modified_base 22: mod_base = OTHER; note = 2'-O-methylcytidine-3'-phosphorothioate
  modified_base 23: mod_base = OTHER; note = 2'-O-methyluridine
atcatcacctctcaaaatgccct

SEQ ID NO: 371 - RNA, 23 nt, synthetic construct
  source 1..23: mol_type = other RNA
  modified_base 1: mod_base = OTHER; note = 2'-O-methyladenosine-3'-phosphorothioate
  modified_base 2: mod_base = OTHER; note = 2'-deoxy-2'-fluoroadenosine-3'-phosphorothioate
  modified_base 3: mod_base = OTHER; note = 2'-O-methyladenosine-3'-phosphate
  modified_base 4: mod_base = OTHER; note = 2'-O-methyladenosine-3'-phosphate
  modified_base 5: mod_base = OTHER; note = 2'-O-methylguanosine-3'-phosphate
  modified_base 6: mod_base = OTHER; note = 2'-deoxy-2'-fluoroadenosine-3'-phosphate
  modified_base 7: mod_base = OTHER; note = 2'-O-methyladenosine-3'-phosphate
  modified_base 8: mod_base = OTHER; note = 2'-deoxy-2'-fluorocytidine-3'-phosphate
  modified_base 9: mod_base = OTHER; note = 2'-deoxy-2'-fluoroguanosine-3'-phosphate
  modified_base 10: mod_base = OTHER; note = 2'-O-methyladenosine-3'-phosphate
  modified_base 11: mod_base = OTHER; note = 2'-O-methylcytidine-3'-phosphate
  modified_base 12: mod_base = OTHER; note = 2'-O-methyladenosine-3'-phosphate
  modified_base 13: mod_base = OTHER; note = 2'-O-methylcytidine-3'-phosphate
  modified_base 14: mod_base = OTHER; note = 2'-deoxy-2'-fluorocytidine-3'-phosphate
  modified_base 15: mod_base = OTHER; note = 2'-O-methylcytidine-3'-phosphate
  modified_base 16: mod_base = OTHER; note = 2'-deoxy-2'-fluorouridine-3'-phosphate
  modified_base 17: mod_base = OTHER; note = 2'-O-methyluridine-3'-phosphate
  modified_base 18: mod_base = OTHER; note = 2'-O-methyluridine-3'-phosphate
  modified_base 19: mod_base = OTHER; note = 2'-O-methylguanosine-3'-phosphate
  modified_base 20: mod_base = OTHER; note = 2'-O-methyluridine-3'-phosphate
  modified_base 21: mod_base = OTHER; note = 2'-O-methyladenosine-3'-phosphorothioate
  modified_base 22: mod_base = OTHER; note = 2'-O-methyluridine-3'-phosphorothioate
  modified_base 23: mod_base = OTHER; note = 2'-O-methyluridine
aaaagaacgacaccctttgtatt

SEQ ID NO: 372 - RNA, 23 nt, synthetic construct
  source 1..23: mol_type = other RNA
  modified_base 1: mod_base = OTHER; note = 2'-O-methyluridine-3'-phosphorothioate
  modified_base 2: mod_base = OTHER; note = 2'-deoxy-2'-fluoroguanosine-3'-phosphorothioate
  modified_base 3: mod_base = OTHER; note = 2'-O-methyladenosine-3'-phosphate
  modified_base 4: mod_base = OTHER; note = 2'-O-methyluridine-3'-phosphate
  modified_base 5: mod_base = OTHER; note = 2'-O-methyluridine-3'-phosphate
  modified_base 6: mod_base = OTHER; note = 2'-deoxy-2'-fluorocytidine-3'-phosphate
  modified_base 7: mod_base = OTHER; note = 2'-O-methylguanosine-3'-phosphate
  modified_base 8: mod_base = OTHER; note = 2'-deoxy-2'-fluoroadenosine-3'-phosphate
  modified_base 9: mod_base = OTHER; note = 2'-deoxy-2'-fluorocytidine-3'-phosphate
  modified_base 10: mod_base = OTHER; note = 2'-O-methyladenosine-3'-phosphate
  modified_base 11: mod_base = OTHER; note = 2'-O-methylcytidine-3'-phosphate
  modified_base 12: mod_base = OTHER; note = 2'-O-methylcytidine-3'-phosphate
  modified_base 13: mod_base = OTHER; note = 2'-O-methyladenosine-3'-phosphate
  modified_base 14: mod_base = OTHER; note = 2'-deoxy-2'-fluoroadenosine-3'-phosphate
  modified_base 15: mod_base = OTHER; note = 2'-O-methylguanosine-3'-phosphate
  modified_base 16: mod_base = OTHER; note = 2'-deoxy-2'-fluoroadenosine-3'-phosphate
  modified_base 17: mod_base = OTHER; note = 2'-O-methyluridine-3'-phosphate
  modified_base 18: mod_base = OTHER; note = 2'-O-methylcytidine-3'-phosphate
  modified_base 19: mod_base = OTHER; note = 2'-O-methylcytidine-3'-phosphate
  modified_base 20: mod_base = OTHER; note = 2'-O-methylcytidine-3'-phosphate
  modified_base 21: mod_base = OTHER; note = 2'-O-methyladenosine-3'-phosphorothioate
  modified_base 22: mod_base = OTHER; note = 2'-O-methyluridine-3'-phosphorothioate
  modified_base 23: mod_base = OTHER; note = 2'-O-methyluridine
tgattcgacaccaagatcccatt

SEQ ID NO: 373 - RNA, 23 nt, synthetic construct
  source 1..23: mol_type = other RNA
  modified_base 1: mod_base = OTHER; note = 2'-O-methyluridine-3'-phosphorothioate
  modified_base 2: mod_base = OTHER; note = 2'-deoxy-2'-fluoroadenosine-3'-phosphorothioate
  modified_base 3: mod_base = OTHER; note = 2'-O-methyladenosine-3'-phosphate
  modified_base 4: mod_base = OTHER; note = 2'-O-methyladenosine-3'-phosphate
  modified_base 5: mod_base = OTHER; note = 2'-O-methyladenosine-3'-phosphate
  modified_base 6: mod_base = OTHER; note = 2'-deoxy-2'-fluorouridine-3'-phosphate
  modified_base 7: mod_base = OTHER; note = 2'-O-methyladenosine-3'-phosphate
  modified_base 8: mod_base = OTHER; note = 2'-deoxy-2'-fluorouridine-3'-phosphate
  modified_base 9: mod_base = OTHER; note = 2'-deoxy-2'-fluorouridine-3'-phosphate
  modified_base 10: mod_base = OTHER; note = 2'-O-methylguanosine-3'-phosphate
  modified_base 11: mod_base = OTHER; note = 2'-O-methyluridine-3'-phosphate
  modified_base 12: mod_base = OTHER; note = 2'-O-methylguanosine-3'-phosphate
  modified_base 13: mod_base = OTHER; note = 2'-O-methylcytidine-3'-phosphate
  modified_base 14: mod_base = OTHER; note = 2'-deoxy-2'-fluoroadenosine-3'-phosphate
  modified_base 15: mod_base = OTHER; note = 2'-O-methylcytidine-3'-phosphate
  modified_base 16: mod_base = OTHER; note = 2'-deoxy-2'-fluorouridine-3'-phosphate
  modified_base 17: mod_base = OTHER; note = 2'-O-methylguanosine-3'-phosphate
  modified_base 18: mod_base = OTHER; note = 2'-O-methyluridine-3'-phosphate
  modified_base 19: mod_base = OTHER; note = 2'-O-methylcytidine-3'-phosphate
  modified_base 20: mod_base = OTHER; note = 2'-O-methyladenosine-3'-phosphate
  modified_base 21: mod_base = OTHER; note = 2'-O-methylguanosine-3'-phosphorothioate
  modified_base 22: mod_base = OTHER; note = 2'-O-methyladenosine-3'-phosphorothioate
  modified_base 23: mod_base = OTHER; note = 2'-O-methyluridine
taaaatattgtgcactgtcagat

SEQ ID NO: 374 - RNA, 23 nt, synthetic construct
  source 1..23: mol_type = other RNA
  modified_base 1: mod_base = OTHER; note = 2'-O-methyladenosine-3'-phosphorothioate
  modified_base 2: mod_base = OTHER; note = 2'-deoxy-2'-fluorouridine-3'-phosphorothioate
  modified_base 3: mod_base = OTHER; note = 2'-O-methylguanosine-3'-phosphate
  modified_base 4: mod_base = OTHER; note = 2'-O-methylguanosine-3'-phosphate
  modified_base 5: mod_base = OTHER; note = 2'-O-methylguanosine-3'-phosphate
  modified_base 6: mod_base = OTHER; note = 2'-deoxy-2'-fluoroadenosine-3'-phosphate
  modified_base 7: mod_base = OTHER; note = 2'-O-methyladenosine-3'-phosphate
  modified_base 8: mod_base = OTHER; note = 2'-deoxy-2'-fluoroadenosine-3'-phosphate
  modified_base 9: mod_base = OTHER; note = 2'-deoxy-2'-fluoroadenosine-3'-phosphate
  modified_base 10: mod_base = OTHER; note = 2'-O-methyluridine-3'-phosphate
  modified_base 11: mod_base = OTHER; note = 2'-O-methyladenosine-3'-phosphate
  modified_base 12: mod_base = OTHER; note = 2'-O-methyluridine-3'-phosphate
  modified_base 13: mod_base = OTHER; note = 2'-O-methyluridine-3'-phosphate
  modified_base 14: mod_base = OTHER; note = 2'-deoxy-2'-fluoroguanosine-3'-phosphate
  modified_base 15: mod_base = OTHER; note = 2'-O-methyluridine-3'-phosphate
  modified_base 16: mod_base = OTHER; note = 2'-deoxy-2'-fluoroguanosine-3'-phosphate
  modified_base 17: mod_base = OTHER; note = 2'-O-methylcytidine-3'-phosphate
  modified_base 18: mod_base = OTHER; note = 2'-O-methyladenosine-3'-phosphate
  modified_base 19: mod_base = OTHER; note = 2'-O-methylcytidine-3'-phosphate
  modified_base 20: mod_base = OTHER; note = 2'-O-methyluridine-3'-phosphate
  modified_base 21: mod_base = OTHER; note = 2'-O-methylguanosine-3'-phosphorothioate
  modified_base 22: mod_base = OTHER; note = 2'-O-methyluridine-3'-phosphorothioate
  modified_base 23: mod_base = OTHER; note = 2'-O-methylcytidine
atgggaaaatattgtgcactgtc

SEQ ID NO: 375 - RNA, 23 nt, synthetic construct
  source 1..23: mol_type = other RNA
  modified_base 1: mod_base = OTHER; note = 2'-O-methyluridine-3'-phosphorothioate
  modified_base 2: mod_base = OTHER; note = 2'-deoxy-2'-fluorouridine-3'-phosphorothioate
  modified_base 3: mod_base = OTHER; note = 2'-O-methyladenosine-3'-phosphate
  modified_base 4: mod_base = OTHER; note = 2'-O-methylguanosine-3'-phosphate
  modified_base 5: mod_base = OTHER; note = 2'-O-methylguanosine-3'-phosphate
  modified_base 6: mod_base = OTHER; note = 2'-deoxy-2'-fluoroadenosine-3'-phosphate
  modified_base 7: mod_base = OTHER; note = 2'-O-methylcytidine-3'-phosphate
  modified_base 8: mod_base = OTHER; note = 2'-deoxy-2'-fluoroadenosine-3'-phosphate
  modified_base 9: mod_base = OTHER; note = 2'-deoxy-2'-fluorocytidine-3'-phosphate
  modified_base 10: mod_base = OTHER; note = 2'-O-methylcytidine-3'-phosphate
  modified_base 11: mod_base = OTHER; note = 2'-O-methylcytidine-3'-phosphate
  modified_base 12: mod_base = OTHER; note = 2'-O-methyladenosine-3'-phosphate
  modified_base 13: mod_base = OTHER; note = 2'-O-methyluridine-3'-phosphate
  modified_base 14: mod_base = OTHER; note = 2'-deoxy-2'-fluorouridine-3'-phosphate
  modified_base 15: mod_base = OTHER; note = 2'-O-methylguanosine-3'-phosphate
  modified_base 16: mod_base = OTHER; note = 2'-deoxy-2'-fluoroadenosine-3'-phosphate
  modified_base 17: mod_base = OTHER; note = 2'-O-methyladenosine-3'-phosphate
  modified_base 18: mod_base = OTHER; note = 2'-O-methyladenosine-3'-phosphate
  modified_base 19: mod_base = OTHER; note = 2'-O-methyladenosine-3'-phosphate
  modified_base 20: mod_base = OTHER; note = 2'-O-methylguanosine-3'-phosphate
  modified_base 21: mod_base = OTHER; note = 2'-O-methyluridine-3'-phosphorothioate
  modified_base 22: mod_base = OTHER; note = 2'-O-methylcytidine-3'-phosphorothioate
  modified_base 23: mod_base = OTHER; note = 2'-O-methyladenosine
ttaggacacccattgaaaagtca

SEQ ID NO: 376 - RNA, 23 nt, synthetic construct
  source 1..23: mol_type = other RNA
  modified_base 1: mod_base = OTHER; note = 2'-O-methyladenosine-3'-phosphorothioate
  modified_base 2: mod_base = OTHER; note = 2'-deoxy-2'-fluoroguanosine-3'-phosphorothioate
  modified_base 3: mod_base = OTHER; note = 2'-O-methylguanosine-3'-phosphate
  modified_base 4: mod_base = OTHER; note = 2'-O-methyladenosine-3'-phosphate
  modified_base 5: mod_base = OTHER; note = 2'-O-methyluridine-3'-phosphate
  modified_base 6: mod_base = OTHER; note = 2'-deoxy-2'-fluorouridine-3'-phosphate
  modified_base 7: mod_base = OTHER; note = 2'-O-methyluridine-3'-phosphate
  modified_base 8: mod_base = OTHER; note = 2'-deoxy-2'-fluorouridine-3'-phosphate
  modified_base 9: mod_base = OTHER; note = 2'-deoxy-2'-fluorouridine-3'-phosphate
  modified_base 10: mod_base = OTHER; note = 2'-O-methylcytidine-3'-phosphate
  modified_base 11: mod_base = OTHER; note = 2'-O-methylcytidine-3'-phosphate
  modified_base 12: mod_base = OTHER; note = 2'-O-methyluridine-3'-phosphate
  modified_base 13: mod_base = OTHER; note = 2'-O-methylcytidine-3'-phosphate
  modified_base 14: mod_base = OTHER; note = 2'-deoxy-2'-fluoroadenosine-3'-phosphate
  modified_base 15: mod_base = OTHER; note = 2'-O-methylcytidine-3'-phosphate
  modified_base 16: mod_base = OTHER; note = 2'-deoxy-2'-fluorocytidine-3'-phosphate
  modified_base 17: mod_base = OTHER; note = 2'-O-methyladenosine-3'-phosphate
  modified_base 18: mod_base = OTHER; note = 2'-O-methyladenosine-3'-phosphate
  modified_base 19: mod_base = OTHER; note = 2'-O-methyluridine-3'-phosphate
  modified_base 20: mod_base = OTHER; note = 2'-O-methylguanosine-3'-phosphate
  modified_base 21: mod_base = OTHER; note = 2'-O-methyluridine-3'-phosphorothioate
  modified_base 22: mod_base = OTHER; note = 2'-O-methylcytidine-3'-phosphorothioate
  modified_base 23: mod_base = OTHER; note = 2'-O-methyluridine
aggatttttcctcaccaatgtct

SEQ ID NO: 377 - RNA, 23 nt, synthetic construct
  source 1..23: mol_type = other RNA
  modified_base 1: mod_base = OTHER; note = 2'-O-methyluridine-3'-phosphorothioate
  modified_base 2: mod_base = OTHER; note = 2'-deoxy-2'-fluorocytidine-3'-phosphorothioate
  modified_base 3: mod_base = OTHER; note = 2'-O-methyladenosine-3'-phosphate
  modified_base 4: mod_base = OTHER; note = 2'-O-methyluridine-3'-phosphate
  modified_base 5: mod_base = OTHER; note = 2'-O-methyluridine-3'-phosphate
  modified_base 6: mod_base = OTHER; note = 2'-deoxy-2'-fluoroguanosine-3'-phosphate
  modified_base 7: mod_base = OTHER; note = 2'-O-methyladenosine-3'-phosphate
  modified_base 8: mod_base = OTHER; note = 2'-deoxy-2'-fluoroadenosine-3'-phosphate
  modified_base 9: mod_base = OTHER; note = 2'-deoxy-2'-fluoroadenosine-3'-phosphate
  modified_base 10: mod_base = OTHER; note = 2'-O-methyladenosine-3'-phosphate
  modified_base 11: mod_base = OTHER; note = 2'-O-methylguanosine-3'-phosphate
  modified_base 12: mod_base = OTHER; note = 2'-O-methyluridine-3'-phosphate
  modified_base 13: mod_base = OTHER; note = 2'-O-methylcytidine-3'-phosphate
  modified_base 14: mod_base = OTHER; note = 2'-deoxy-2'-fluoroadenosine-3'-phosphate
  modified_base 15: mod_base = OTHER; note = 2'-O-methyladenosine-3'-phosphate
  modified_base 16: mod_base = OTHER; note = 2'-deoxy-2'-fluoroadenosine-3'-phosphate
  modified_base 17: mod_base = OTHER; note = 2'-O-methyladenosine-3'-phosphate
  modified_base 18: mod_base = OTHER; note = 2'-O-methylguanosine-3'-phosphate
  modified_base 19: mod_base = OTHER; note = 2'-O-methylcytidine-3'-phosphate
  modified_base 20: mod_base = OTHER; note = 2'-O-methyladenosine-3'-phosphate
  modified_base 21: mod_base = OTHER; note = 2'-O-methyladenosine-3'-phosphorothioate
  modified_base 22: mod_base = OTHER; note = 2'-O-methyluridine-3'-phosphorothioate
  modified_base 23: mod_base = OTHER; note = 2'-O-methylguanosine
tcattgaaaagtcaaaagcaatg

SEQ ID NO: 378 - RNA, 23 nt, synthetic construct
  source 1..23: mol_type = other RNA
  modified_base 1: mod_base = OTHER; note = 2'-O-methyluridine-3'-phosphorothioate
  modified_base 2: mod_base = OTHER; note = 2'-deoxy-2'-fluorocytidine-3'-phosphorothioate
  modified_base 3: mod_base = OTHER; note = 2'-O-methyladenosine-3'-phosphate
  modified_base 4: mod_base = OTHER; note = 2'-O-methyluridine-3'-phosphate
  modified_base 5: mod_base = OTHER; note = 2'-O-methylcytidine-3'-phosphate
  modified_base 6: mod_base = OTHER; note = 2'-deoxy-2'-fluoroadenosine-3'-phosphate
  modified_base 7: mod_base = OTHER; note = 2'-O-methyluridine-3'-phosphate
  modified_base 8: mod_base = OTHER; note = 2'-deoxy-2'-fluorocytidine-3'-phosphate
  modified_base 9: mod_base = OTHER; note = 2'-deoxy-2'-fluoroadenosine-3'-phosphate
  modified_base 10: mod_base = OTHER; note = 2'-O-methylcytidine-3'-phosphate
  modified_base 11: mod_base = OTHER; note = 2'-O-methylcytidine-3'-phosphate
  modified_base 12: mod_base = OTHER; note = 2'-O-methyluridine-3'-phosphate
  modified_base 13: mod_base = OTHER; note = 2'-O-methylcytidine-3'-phosphate
  modified_base 14: mod_base = OTHER; note = 2'-deoxy-2'-fluorouridine-3'-phosphate
  modified_base 15: mod_base = OTHER; note = 2'-O-methylcytidine-3'-phosphate
  modified_base 16: mod_base = OTHER; note = 2'-deoxy-2'-fluoroadenosine-3'-phosphate
  modified_base 17: mod_base = OTHER; note = 2'-O-methyladenosine-3'-phosphate
  modified_base 18: mod_base = OTHER; note = 2'-O-methyladenosine-3'-phosphate
  modified_base 19: mod_base = OTHER; note = 2'-O-methyladenosine-3'-phosphate
  modified_base 20: mod_base = OTHER; note = 2'-O-methyluridine-3'-phosphate
  modified_base 21: mod_base = OTHER; note = 2'-O-methylguanosine-3'-phosphorothioate
  modified_base 22: mod_base = OTHER; note = 2'-O-methylcytidine-3'-phosphorothioate
  modified_base 23: mod_base = OTHER; note = 2'-O-methylcytidine
tcatcatcacctctcaaaatgcc

SEQ ID NO: 379 - RNA, 23 nt, synthetic construct
  source 1..23: mol_type = other RNA
  modified_base 1: mod_base = OTHER; note = 2'-O-methyluridine-3'-phosphorothioate
  modified_base 2: mod_base = OTHER; note = 2'-deoxy-2'-fluoroguanosine-3'-phosphorothioate
  modified_base 3: mod_base = OTHER; note = 2'-O-methyladenosine-3'-phosphate
  modified_base 4: mod_base = OTHER; note = 2'-O-methylcytidine-3'-phosphate
  modified_base 5: mod_base = OTHER; note = 2'-O-methyladenosine-3'-phosphate
  modified_base 6: mod_base = OTHER; note = 2'-deoxy-2'-fluorocytidine-3'-phosphate
  modified_base 7: mod_base = OTHER; note = 2'-O-methylcytidine-3'-phosphate
  modified_base 8: mod_base = OTHER; note = 2'-deoxy-2'-fluorocytidine-3'-phosphate
  modified_base 9: mod_base = OTHER; note = 2'-deoxy-2'-fluoroadenosine-3'-phosphate
  modified_base 10: mod_base = OTHER; note = 2'-O-methyluridine-3'-phosphate
  modified_base 11: mod_base = OTHER; note = 2'-O-methyluridine-3'-phosphate
  modified_base 12: mod_base = OTHER; note = 2'-O-methylguanosine-3'-phosphate
  modified_base 13: mod_base = OTHER; note = 2'-O-methyladenosine-3'-phosphate
  modified_base 14: mod_base = OTHER; note = 2'-deoxy-2'-fluoroadenosine-3'-phosphate
  modified_base 15: mod_base = OTHER; note = 2'-O-methyladenosine-3'-phosphate
  modified_base 16: mod_base = OTHER; note = 2'-deoxy-2'-fluoroadenosine-3'-phosphate
  modified_base 17: mod_base = OTHER; note = 2'-O-methylguanosine-3'-phosphate
  modified_base 18: mod_base = OTHER; note = 2'-O-methyluridine-3'-phosphate
  modified_base 19: mod_base = OTHER; note = 2'-O-methylcytidine-3'-phosphate
  modified_base 20: mod_base = OTHER; note = 2'-O-methyladenosine-3'-phosphate
  modified_base 21: mod_base = OTHER; note = 2'-O-methyladenosine-3'-phosphorothioate
  modified_base 22: mod_base = OTHER; note = 2'-O-methyladenosine-3'-phosphorothioate
  modified_base 23: mod_base = OTHER; note = 2'-O-methyladenosine
tgacacccattgaaaagtcaaaa

SEQ ID NO: 380 - RNA, 23 nt, synthetic construct
  source 1..23: mol_type = other RNA
  modified_base 1: mod_base = OTHER; note = 2'-O-methyluridine-3'-phosphorothioate
  modified_base 2: mod_base = OTHER; note = 2'-deoxy-2'-fluorocytidine-3'-phosphorothioate
  modified_base 3: mod_base = OTHER; note = 2'-O-methyluridine-3'-phosphate
  modified_base 4: mod_base = OTHER; note = 2'-O-methylguanosine-3'-phosphate
  modified_base 5: mod_base = OTHER; note = 2'-O-methyluridine-3'-phosphate
  modified_base 6: mod_base = OTHER; note = 2'-deoxy-2'-fluorocytidine-3'-phosphate
  modified_base 7: mod_base = OTHER; note = 2'-O-methylcytidine-3'-phosphate
  modified_base 8: mod_base = OTHER; note = 2'-deoxy-2'-fluorouridine-3'-phosphate
  modified_base 9: mod_base = OTHER; note = 2'-deoxy-2'-fluoroadenosine-3'-phosphate
  modified_base 10: mod_base = OTHER; note = 2'-O-methyladenosine-3'-phosphate
  modified_base 11: mod_base = OTHER; note = 2'-O-methyladenosine-3'-phosphate
  modified_base 12: mod_base = OTHER; note = 2'-O-methyladenosine-3'-phosphate
  modified_base 13: mod_base = OTHER; note = 2'-O-methylcytidine-3'-phosphate
  modified_base 14: mod_base = OTHER; note = 2'-deoxy-2'-fluoroadenosine-3'-phosphate
  modified_base 15: mod_base = OTHER; note = 2'-O-methylguanosine-3'-phosphate
  modified_base 16: mod_base = OTHER; note = 2'-deoxy-2'-fluoroadenosine-3'-phosphate
  modified_base 17: mod_base = OTHER; note = 2'-O-methyladenosine-3'-phosphate
  modified_base 18: mod_base = OTHER; note = 2'-O-methylguanosine-3'-phosphate
  modified_base 19: mod_base = OTHER; note = 2'-O-methyluridine-3'-phosphate
  modified_base 20: mod_base = OTHER; note = 2'-O-methylcytidine-3'-phosphate
  modified_base 21: mod_base = OTHER; note = 2'-O-methylguanosine-3'-phosphorothioate
  modified_base 22: mod_base = OTHER; note = 2'-O-methyladenosine-3'-phosphorothioate
  modified_base 23: mod_base = OTHER; note = 2'-O-methylcytidine
tctgtcctaaaacagaagtcgac

SEQ ID NO: 381 - RNA, 23 nt, synthetic construct
  source 1..23: mol_type = other RNA
  modified_base 1: mod_base = OTHER; note = 2'-O-methyluridine-3'-phosphorothioate
  modified_base 2: mod_base = OTHER; note = 2'-deoxy-2'-fluoroadenosine-3'-phosphorothioate
  modified_base 3: mod_base = OTHER; note = 2'-O-methyluridine-3'-phosphate
  modified_base 4: mod_base = OTHER; note = 2'-O-methyluridine-3'-phosphate
  modified_base 5: mod_base = OTHER; note = 2'-O-methylcytidine-3'-phosphate
  modified_base 6: mod_base = OTHER; note = 2'-deoxy-2'-fluorouridine-3'-phosphate
  modified_base 7: mod_base = OTHER; note = 2'-O-methylguanosine-3'-phosphate
  modified_base 8: mod_base = OTHER; note = 2'-deoxy-2'-fluoroguanosine-3'-phosphate
  modified_base 9: mod_base = OTHER; note = 2'-deoxy-2'-fluorocytidine-3'-phosphate
  modified_base 10: mod_base = OTHER; note = 2'-O-methyladenosine-3'-phosphate
  modified_base 11: mod_base = OTHER; note = 2'-O-methylcytidine-3'-phosphate
  modified_base 12: mod_base = OTHER; note = 2'-O-methylcytidine-3'-phosphate
  modified_base 13: mod_base = OTHER; note = 2'-O-methylcytidine-3'-phosphate
  modified_base 14: mod_base = OTHER; note = 2'-deoxy-2'-fluoroadenosine-3'-phosphate
  modified_base 15: mod_base = OTHER; note = 2'-O-methylcytidine-3'-phosphate
  modified_base 16: mod_base = OTHER; note = 2'-deoxy-2'-fluorouridine-3'-phosphate
  modified_base 17: mod_base = OTHER; note = 2'-O-methylcytidine-3'-phosphate
  modified_base 18: mod_base = OTHER; note = 2'-O-methyladenosine-3'-phosphate
  modified_base 19: mod_base = OTHER; note = 2'-O-methylguanosine-3'-phosphate
  modified_base 20: mod_base = OTHER; note = 2'-O-methyladenosine-3'-phosphate
  modified_base 21: mod_base = OTHER; note = 2'-O-methylguanosine-3'-phosphorothioate
  modified_base 22: mod_base = OTHER; note = 2'-O-methylcytidine-3'-phosphorothioate
  modified_base 23: mod_base = OTHER; note = 2'-O-methylcytidine
tattctggcacccactcagagcc

SEQ ID NO: 382 - RNA, 23 nt, synthetic construct
  source 1..23: mol_type = other RNA
  modified_base 1: mod_base = OTHER; note = 2'-O-methyluridine-3'-phosphorothioate
  modified_base 2: mod_base = OTHER; note = 2'-deoxy-2'-fluoroadenosine-3'-phosphorothioate
  modified_base 3: mod_base = OTHER; note = 2'-O-methylcytidine-3'-phosphate
  modified_base 4: mod_base = OTHER; note = 2'-O-methyluridine-3'-phosphate
  modified_base 5: mod_base = OTHER; note = 2'-O-methyluridine-3'-phosphate
  modified_base 6: mod_base = OTHER; note = 2'-deoxy-2'-fluorouridine-3'-phosphate
  modified_base 7: mod_base = OTHER; note = 2'-O-methylcytidine-3'-phosphate
  modified_base 8: mod_base = OTHER; note = 2'-deoxy-2'-fluoroadenosine-3'-phosphate
  modified_base 9: mod_base = OTHER; note = 2'-deoxy-2'-fluorocytidine-3'-phosphate
  modified_base 10: mod_base = OTHER; note = 2'-O-methyladenosine-3'-phosphate
  modified_base 11: mod_base = OTHER; note = 2'-O-methyluridine-3'-phosphate
  modified_base 12: mod_base = OTHER; note = 2'-O-methyluridine-3'-phosphate
  modified_base 13: mod_base = OTHER; note = 2'-O-methylcytidine-3'-phosphate
  modified_base 14: mod_base = OTHER; note = 2'-deoxy-2'-fluorouridine-3'-phosphate
  modified_base 15: mod_base = OTHER; note = 2'-O-methylguanosine-3'-phosphate
  modified_base 16: mod_base = OTHER; note = 2'-deoxy-2'-fluoroguanosine-3'-phosphate
  modified_base 17: mod_base = OTHER; note = 2'-O-methylcytidine-3'-phosphate
  modified_base 18: mod_base = OTHER; note = 2'-O-methyladenosine-3'-phosphate
  modified_base 19: mod_base = OTHER; note = 2'-O-methylcytidine-3'-phosphate
  modified_base 20: mod_base = OTHER; note = 2'-O-methylcytidine-3'-phosphate
  modified_base 21: mod_base = OTHER; note = 2'-O-methylcytidine-3'-phosphorothioate
  modified_base 22: mod_base = OTHER; note = 2'-O-methyladenosine-3'-phosphorothioate
  modified_base 23: mod_base = OTHER; note = 2'-O-methylcytidine
tactttcacattctggcacccac

SEQ ID NO: 383 - RNA, 23 nt, synthetic construct
  source 1..23: mol_type = other RNA
  modified_base 1: mod_base = OTHER; note = 2'-O-methyluridine-3'-phosphorothioate
  modified_base 2: mod_base = OTHER; note = 2'-deoxy-2'-fluoroguanosine-3'-phosphorothioate
  modified_base 3: mod_base = OTHER; note = 2'-O-methyluridine-3'-phosphate
  modified_base 4: mod_base = OTHER; note = 2'-O-methyluridine-3'-phosphate
  modified_base 5: mod_base = OTHER; note = 2'-O-methylcytidine-3'-phosphate
  modified_base 6: mod_base = OTHER; note = 2'-deoxy-2'-fluorocytidine-3'-phosphate
  modified_base 7: mod_base = OTHER; note = 2'-O-methyluridine-3'-phosphate
  modified_base 8: mod_base = OTHER; note = 2'-deoxy-2'-fluoroadenosine-3'-phosphate
  modified_base 9: mod_base = OTHER; note = 2'-deoxy-2'-fluoroguanosine-3'-phosphate
  modified_base 10: mod_base = OTHER; note = 2'-O-methylguanosine-3'-phosphate
  modified_base 11: mod_base = OTHER; note = 2'-O-methyladenosine-3'-phosphate
  modified_base 12: mod_base = OTHER; note = 2'-O-methylcytidine-3'-phosphate
  modified_base 13: mod_base = OTHER; note = 2'-O-methyladenosine-3'-phosphate
  modified_base 14: mod_base = OTHER; note = 2'-deoxy-2'-fluorocytidine-3'-phosphate
  modified_base 15: mod_base = OTHER; note = 2'-O-methylcytidine-3'-phosphate
  modified_base 16: mod_base = OTHER; note = 2'-deoxy-2'-fluorocytidine-3'-phosphate
  modified_base 17: mod_base = OTHER; note = 2'-O-methyladenosine-3'-phosphate
  modified_base 18: mod_base = OTHER; note = 2'-O-methyluridine-3'-phosphate
  modified_base 19: mod_base = OTHER; note = 2'-O-methyluridine-3'-phosphate
  modified_base 20: mod_base = OTHER; note = 2'-O-methylguanosine-3'-phosphate
  modified_base 21: mod_base = OTHER; note = 2'-O-methyladenosine-3'-phosphorothioate
  modified_base 22: mod_base = OTHER; note = 2'-O-methyladenosine-3'-phosphorothioate
  modified_base 23: mod_base = OTHER; note = 2'-O-methyladenosine
tgttcctaggacacccattgaaa

SEQ ID NO: 384 - RNA, 23 nt, synthetic construct
  source 1..23: mol_type = other RNA
  modified_base 1: mod_base = OTHER; note = 2'-O-methyluridine-3'-phosphorothioate
  modified_base 2: mod_base = OTHER; note = 2'-deoxy-2'-fluoroadenosine-3'-phosphorothioate
  modified_base 3: mod_base = OTHER; note = 2'-O-methyladenosine-3'-phosphate
  modified_base 4: mod_base = OTHER; note = 2'-O-methyluridine-3'-phosphate
  modified_base 5: mod_base = OTHER; note = 2'-O-methylguanosine-3'-phosphate
  modified_base 6: mod_base = OTHER; note = 2'-deoxy-2'-fluorouridine-3'-phosphate
  modified_base 7: mod_base = OTHER; note = 2'-O-methylcytidine-3'-phosphate
  modified_base 8: mod_base = OTHER; note = 2'-deoxy-2'-fluorouridine-3'-phosphate
  modified_base 9: mod_base = OTHER; note = 2'-deoxy-2'-fluorouridine-3'-phosphate
  modified_base 10: mod_base = OTHER; note = 2'-O-methylguanosine-3'-phosphate
  modified_base 11: mod_base = OTHER; note = 2'-O-methyluridine-3'-phosphate
  modified_base 12: mod_base = OTHER; note = 2'-O-methylcytidine-3'-phosphate
  modified_base 13: mod_base = OTHER; note = 2'-O-methylguanosine-3'-phosphate
  modified_base 14: mod_base = OTHER; note = 2'-deoxy-2'-fluoroadenosine-3'-phosphate
  modified_base 15: mod_base = OTHER; note = 2'-O-methyluridine-3'-phosphate
  modified_base 16: mod_base = OTHER; note = 2'-deoxy-2'-fluoroguanosine-3'-phosphate
  modified_base 17: mod_base = OTHER; note = 2'-O-methyladenosine-3'-phosphate
  modified_base 18: mod_base = OTHER; note = 2'-O-methylcytidine-3'-phosphate
  modified_base 19: mod_base = OTHER; note = 2'-O-methyluridine-3'-phosphate
  modified_base 20: mod_base = OTHER; note = 2'-O-methyluridine-3'-phosphate
  modified_base 21: mod_base = OTHER; note = 2'-O-methyluridine-3'-phosphorothioate
  modified_base 22: mod_base = OTHER; note = 2'-O-methylcytidine-3'-phosphorothioate
  modified_base 23: mod_base = OTHER; note = 2'-O-methyladenosine
taatgtcttgtcgatgactttca

SEQ ID NO: 385 - RNA, 23 nt, synthetic construct
  source 1..23: mol_type = other RNA
  modified_base 1: mod_base = OTHER; note = 2'-O-methyluridine-3'-phosphorothioate
  modified_base 2: mod_base = OTHER; note = 2'-deoxy-2'-fluoroguanosine-3'-phosphorothioate
  modified_base 3: mod_base = OTHER; note = 2'-O-methylcytidine-3'-phosphate
  modified_base 4: mod_base = OTHER; note = 2'-O-methyladenosine-3'-phosphate
  modified_base 5: mod_base = OTHER; note = 2'-O-methyluridine-3'-phosphate
  modified_base 6: mod_base = OTHER; note = 2'-deoxy-2'-fluorocytidine-3'-phosphate
  modified_base 7: mod_base = OTHER; note = 2'-O-methyladenosine-3'-phosphate
  modified_base 8: mod_base = OTHER; note = 2'-deoxy-2'-fluorouridine-3'-phosphate
  modified_base 9: mod_base = OTHER; note = 2'-deoxy-2'-fluorocytidine-3'-phosphate
  modified_base 10: mod_base = OTHER; note = 2'-O-methyladenosine-3'-phosphate
  modified_base 11: mod_base = OTHER; note = 2'-O-methylcytidine-3'-phosphate
  modified_base 12: mod_base = OTHER; note = 2'-O-methylcytidine-3'-phosphate
  modified_base 13: mod_base = OTHER; note = 2'-O-methyluridine-3'-phosphate
  modified_base 14: mod_base = OTHER; note = 2'-deoxy-2'-fluorocytidine-3'-phosphate
  modified_base 15: mod_base = OTHER; note = 2'-O-methyluridine-3'-phosphate
  modified_base 16: mod_base = OTHER; note = 2'-deoxy-2'-fluorocytidine-3'-phosphate
  modified_base 17: mod_base = OTHER; note = 2'-O-methyladenosine-3'-phosphate
  modified_base 18: mod_base = OTHER; note = 2'-O-methyladenosine-3'-phosphate
  modified_base 19: mod_base = OTHER; note = 2'-O-methyladenosine-3'-phosphate
  modified_base 20: mod_base = OTHER; note = 2'-O-methyladenosine-3'-phosphate
  modified_base 21: mod_base = OTHER; note = 2'-O-methyluridine-3'-phosphorothioate
  modified_base 22: mod_base = OTHER; note = 2'-O-methylguanosine-3'-phosphorothioate
  modified_base 23: mod_base = OTHER; note = 2'-O-methylcytidine
tgcatcatcacctctcaaaatgc

SEQ ID NO: 386 - RNA, 23 nt, synthetic construct
  source 1..23: mol_type = other RNA
  modified_base 1: mod_base = OTHER; note = 2'-O-methyluridine-3'-phosphorothioate
  modified_base 2: mod_base = OTHER; note = 2'-deoxy-2'-fluorocytidine-3'-phosphorothioate
  modified_base 3: mod_base = OTHER; note = 2'-O-methyluridine-3'-phosphate
  modified_base 4: mod_base = OTHER; note = 2'-O-methylcytidine-3'-phosphate
  modified_base 5: mod_base = OTHER; note = 2'-O-methyladenosine-3'-phosphate
  modified_base 6: mod_base = OTHER; note = 2'-deoxy-2'-fluorocytidine-3'-phosphate
  modified_base 7: mod_base = OTHER; note = 2'-O-methylcytidine-3'-phosphate
  modified_base 8: mod_base = OTHER; note = 2'-deoxy-2'-fluoroadenosine-3'-phosphate
  modified_base 9: mod_base = OTHER; note = 2'-deoxy-2'-fluoroadenosine-3'-phosphate
  modified_base 10: mod_base = OTHER; note = 2'-O-methyluridine-3'-phosphate
  modified_base 11: mod_base = OTHER; note = 2'-O-methylguanosine-3'-phosphate
  modified_base 12: mod_base = OTHER; note = 2'-O-methyluridine-3'-phosphate
  modified_base 13: mod_base = OTHER; note = 2'-O-methylcytidine-3'-phosphate
  modified_base 14: mod_base = OTHER; note = 2'-deoxy-2'-fluorouridine-3'-phosphate
  modified_base 15: mod_base = OTHER; note = 2'-O-methyluridine-3'-phosphate
  modified_base 16: mod_base = OTHER; note = 2'-deoxy-2'-fluoroguanosine-3'-phosphate
  modified_base 17: mod_base = OTHER; note = 2'-O-methyluridine-3'-phosphate
  modified_base 18: mod_base = OTHER; note = 2'-O-methylcytidine-3'-phosphate
  modified_base 19: mod_base = OTHER; note = 2'-O-methylguanosine-3'-phosphate
  modified_base 20: mod_base = OTHER; note = 2'-O-methyladenosine-3'-phosphate
  modified_base 21: mod_base = OTHER; note = 2'-O-methyluridine-3'-phosphorothioate
  modified_base 22: mod_base = OTHER; note = 2'-O-methylguanosine-3'-phosphorothioate
  modified_base 23: mod_base = OTHER; note = 2'-O-methyladenosine
tctcaccaatgtcttgtcgatga

SEQ ID NO: 387 - RNA, 23 nt, synthetic construct
  source 1..23: mol_type = other RNA
  modified_base 1: mod_base = OTHER; note = 2'-O-methyluridine-3'-phosphorothioate
  modified_base 2: mod_base = OTHER; note = 2'-deoxy-2'-fluoroguanosine-3'-phosphorothioate
  modified_base 3: mod_base = OTHER; note = 2'-O-methyladenosine-3'-phosphate
  modified_base 4: mod_base = OTHER; note = 2'-O-methylcytidine-3'-phosphate
  modified_base 5: mod_base = OTHER; note = 2'-O-methyluridine-3'-phosphate
  modified_base 6: mod_base = OTHER; note = 2'-deoxy-2'-fluorouridine-3'-phosphate
  modified_base 7: mod_base = OTHER; note = 2'-O-methyluridine-3'-phosphate
  modified_base 8: mod_base = OTHER; note = 2'-deoxy-2'-fluorocytidine-3'-phosphate
  modified_base 9: mod_base = OTHER; note = 2'-deoxy-2'-fluoroadenosine-3'-phosphate
  modified_base 10: mod_base = OTHER; note = 2'-O-methylcytidine-3'-phosphate
  modified_base 11: mod_base = OTHER; note = 2'-O-methyladenosine-3'-phosphate
  modified_base 12: mod_base = OTHER; note = 2'-O-methyluridine-3'-phosphate
  modified_base 13: mod_base = OTHER; note = 2'-O-methyluridine-3'-phosphate
  modified_base 14: mod_base = OTHER; note = 2'-deoxy-2'-fluorocytidine-3'-phosphate
  modified_base 15: mod_base = OTHER; note = 2'-O-methyluridine-3'-phosphate
  modified_base 16: mod_base = OTHER; note = 2'-deoxy-2'-fluoroguanosine-3'-phosphate
  modified_base 17: mod_base = OTHER; note = 2'-O-methylguanosine-3'-phosphate
  modified_base 18: mod_base = OTHER; note = 2'-O-methylcytidine-3'-phosphate
  modified_base 19: mod_base = OTHER; note = 2'-O-methyladenosine-3'-phosphate
  modified_base 20: mod_base = OTHER; note = 2'-O-methylcytidine-3'-phosphate
  modified_base 21: mod_base = OTHER; note = 2'-O-methylcytidine-3'-phosphorothioate
  modified_base 22: mod_base = OTHER; note = 2'-O-methylcytidine-3'-phosphorothioate
  modified_base 23: mod_base = OTHER; note = 2'-O-methyladenosine
tgactttcacattctggcaccca

SEQ ID NO: 388 - RNA, 23 nt, synthetic construct
  source 1..23: mol_type = other RNA
  modified_base 1: mod_base = OTHER; note = 2'-O-methyluridine-3'-phosphorothioate
  modified_base 2: mod_base = OTHER; note = 2'-deoxy-2'-fluoroguanosine-3'-phosphorothioate
  modified_base 3: mod_base = OTHER; note = 2'-O-methylguanosine-3'-phosphate
  modified_base 4: mod_base = OTHER; note = 2'-O-methyladenosine-3'-phosphate
  modified_base 5: mod_base = OTHER; note = 2'-O-methyladenosine-3'-phosphate
  modified_base 6: mod_base = OTHER; note = 2'-deoxy-2'-fluoroadenosine-3'-phosphate
  modified_base 7: mod_base = OTHER; note = 2'-O-methyladenosine-3'-phosphate
  modified_base 8: mod_base = OTHER; note = 2'-deoxy-2'-fluorouridine-3'-phosphate
  modified_base 9: mod_base = OTHER; note = 2'-deoxy-2'-fluoroadenosine-3'-phosphate
  modified_base 10: mod_base = OTHER; note = 2'-O-methyluridine-3'-phosphate
  modified_base 11: mod_base = OTHER; note = 2'-O-methyluridine-3'-phosphate
  modified_base 12: mod_base = OTHER; note = 2'-O-methylguanosine-3'-phosphate
  modified_base 13: mod_base = OTHER; note = 2'-O-methyluridine-3'-phosphate
  modified_base 14: mod_base = OTHER; note = 2'-deoxy-2'-fluoroguanosine-3'-phosphate
  modified_base 15: mod_base = OTHER; note = 2'-O-methylcytidine-3'-phosphate
  modified_base 16: mod_base = OTHER; note = 2'-deoxy-2'-fluoroadenosine-3'-phosphate
  modified_base 17: mod_base = OTHER; note = 2'-O-methylcytidine-3'-phosphate
  modified_base 18: mod_base = OTHER; note = 2'-O-methyluridine-3'-phosphate
  modified_base 19: mod_base = OTHER; note = 2'-O-methylguanosine-3'-phosphate
  modified_base 20: mod_base = OTHER; note = 2'-O-methyluridine-3'-phosphate
  modified_base 21: mod_base = OTHER; note = 2'-O-methylcytidine-3'-phosphorothioate
  modified_base 22: mod_base = OTHER; note = 2'-O-methyladenosine-3'-phosphorothioate
  modified_base 23: mod_base = OTHER; note = 2'-O-methylguanosine
tggaaaatattgtgcactgtcag

SEQ ID NO: 389 - RNA, 23 nt, synthetic construct
  source 1..23: mol_type = other RNA
  modified_base 1: mod_base = OTHER; note = 2'-O-methyluridine-3'-phosphorothioate
  modified_base 2: mod_base = OTHER; note = 2'-deoxy-2'-fluorouridine-3'-phosphorothioate
  modified_base 3: mod_base = OTHER; note = 2'-O-methylcytidine-3'-phosphate
  modified_base 4: mod_base = OTHER; note = 2'-O-methyluridine-3'-phosphate
  modified_base 5: mod_base = OTHER; note = 2'-O-methylguanosine-3'-phosphate
  modified_base 6: mod_base = OTHER; note = 2'-deoxy-2'-fluorocytidine-3'-phosphate
  modified_base 7: mod_base = OTHER; note = 2'-O-methyladenosine-3'-phosphate
  modified_base 8: mod_base = OTHER; note = 2'-deoxy-2'-fluorocytidine-3'-phosphate
  modified_base 9: mod_base = OTHER; note = 2'-deoxy-2'-fluoroadenosine-3'-phosphate
  modified_base 10: mod_base = OTHER; note = 2'-O-methylguanosine-3'-phosphate
  modified_base 11: mod_base = OTHER; note = 2'-O-methyluridine-3'-phosphate
  modified_base 12: mod_base = OTHER; note = 2'-O-methylguanosine-3'-phosphate
  modified_base 13: mod_base = OTHER; note = 2'-O-methyluridine-3'-phosphate
  modified_base 14: mod_base = OTHER; note = 2'-deoxy-2'-fluorocytidine-3'-phosphate
  modified_base 15: mod_base = OTHER; note = 2'-O-methyluridine-3'-phosphate
  modified_base 16: mod_base = OTHER; note = 2'-deoxy-2'-fluorocytidine-3'-phosphate
  modified_base 17: mod_base = OTHER; note = 2'-O-methyluridine-3'-phosphate
  modified_base 18: mod_base = OTHER; note = 2'-O-methyluridine-3'-phosphate
  modified_base 19: mod_base = OTHER; note = 2'-O-methyluridine-3'-phosphate
  modified_base 20: mod_base = OTHER; note = 2'-O-methylguanosine-3'-phosphate
  modified_base 21: mod_base = OTHER; note = 2'-O-methyluridine-3'-phosphorothioate
  modified_base 22: mod_base = OTHER; note = 2'-O-methylcytidine-3'-phosphorothioate
  modified_base 23: mod_base = OTHER; note = 2'-O-methyladenosine
ttctgcacagtgtctctttgtca

SEQ ID NO: 390 - RNA, 23 nt, synthetic construct
  source 1..23: mol_type = other RNA
  modified_base 1: mod_base = OTHER; note = 2'-O-methyluridine-3'-phosphorothioate
  modified_base 2: mod_base = OTHER; note = 2'-deoxy-2'-fluorocytidine-3'-phosphorothioate
  modified_base 3: mod_base = OTHER; note = 2'-O-methylcytidine-3'-phosphate
  modified_base 4: mod_base = OTHER; note = 2'-O-methyluridine-3'-phosphate
  modified_base 5: mod_base = OTHER; note = 2'-O-methyladenosine-3'-phosphate
  modified_base 6: mod_base = OTHER; note = 2'-deoxy-2'-fluoroguanosine-3'-phosphate
  modified_base 7: mod_base = OTHER; note = 2'-O-methylguanosine-3'-phosphate
  modified_base 8: mod_base = OTHER; note = 2'-deoxy-2'-fluoroadenosine-3'-phosphate
  modified_base 9: mod_base = OTHER; note = 2'-deoxy-2'-fluorocytidine-3'-phosphate
  modified_base 10: mod_base = OTHER; note = 2'-O-methyladenosine-3'-phosphate
  modified_base 11: mod_base = OTHER; note = 2'-O-methylcytidine-3'-phosphate
  modified_base 12: mod_base = OTHER; note = 2'-O-methylcytidine-3'-phosphate
  modified_base 13: mod_base = OTHER; note = 2'-O-methylcytidine-3'-phosphate
  modified_base 14: mod_base = OTHER; note = 2'-deoxy-2'-fluoroadenosine-3'-phosphate
  modified_base 15: mod_base = OTHER; note = 2'-O-methyluridine-3'-phosphate
  modified_base 16: mod_base = OTHER; note = 2'-deoxy-2'-fluorouridine-3'-phosphate
  modified_base 17: mod_base = OTHER; note = 2'-O-methylguanosine-3'-phosphate
  modified_base 18: mod_base = OTHER; note = 2'-O-methyladenosine-3'-phosphate
  modified_base 19: mod_base = OTHER; note = 2'-O-methyladenosine-3'-phosphate
  modified_base 20: mod_base = OTHER; note = 2'-O-methyladenosine-3'-phosphate
  modified_base 21: mod_base = OTHER; note = 2'-O-methyladenosine-3'-phosphorothioate
  modified_base 22: mod_base = OTHER; note = 2'-O-methylguanosine-3'-phosphorothioate
  modified_base 23: mod_base = OTHER; note = 2'-O-methyluridine
tcctaggacacccattgaaaagt

SEQ ID NO: 391 - RNA, 23 nt, synthetic construct
  source 1..23: mol_type = other RNA
  modified_base 1: mod_base = OTHER; note = 2'-O-methyladenosine-3'-phosphorothioate
  modified_base 2: mod_base = OTHER; note = 2'-deoxy-2'-fluorocytidine-3'-phosphorothioate
  modified_base 3: mod_base = OTHER; note = 2'-O-methyluridine-3'-phosphate
  modified_base 4: mod_base = OTHER; note = 2'-O-methylguanosine-3'-phosphate
  modified_base 5: mod_base = OTHER; note = 2'-O-methyluridine-3'-phosphate
  modified_base 6: mod_base = OTHER; note = 2'-deoxy-2'-fluorocytidine-3'-phosphate
  modified_base 7: mod_base = OTHER; note = 2'-O-methyladenosine-3'-phosphate
  modified_base 8: mod_base = OTHER; note = 2'-deoxy-2'-fluoroguanosine-3'-phosphate
  modified_base 9: mod_base = OTHER; note = 2'-deoxy-2'-fluoroadenosine-3'-phosphate
  modified_base 10: mod_base = OTHER; note = 2'-O-methyluridine-3'-phosphate
  modified_base 11: mod_base = OTHER; note = 2'-O-methylcytidine-3'-phosphate
  modified_base 12: mod_base = OTHER; note = 2'-O-methyluridine-3'-phosphate
  modified_base 13: mod_base = OTHER; note = 2'-O-methyluridine-3'-phosphate
  modified_base 14: mod_base = OTHER; note = 2'-deoxy-2'-fluoroguanosine-3'-phosphate
  modified_base 15: mod_base = OTHER; note = 2'-O-methylguanosine-3'-phosphate
  modified_base 16: mod_base = OTHER; note = 2'-deoxy-2'-fluoroadenosine-3'-phosphate
  modified_base 17: mod_base = OTHER; note = 2'-O-methyladenosine-3'-phosphate
  modified_base 18: mod_base = OTHER; note = 2'-O-methyladenosine-3'-phosphate
  modified_base 19: mod_base = OTHER; note = 2'-O-methylcytidine-3'-phosphate
  modified_base 20: mod_base = OTHER; note = 2'-O-methylguanosine-3'-phosphate
  modified_base 21: mod_base = OTHER; note = 2'-O-methylguanosine-3'-phosphorothioate
  modified_base 22: mod_base = OTHER; note = 2'-O-methylcytidine-3'-phosphorothioate
  modified_base 23: mod_base = OTHER; note = 2'-O-methylcytidine
actgtcagatcttggaaacggcc

SEQ ID NO: 392 - RNA, 23 nt, synthetic construct
  source 1..23: mol_type = other RNA
  modified_base 1: mod_base = OTHER; note = 2'-O-methyluridine-3'-phosphorothioate
  modified_base 2: mod_base = OTHER; note = 2'-deoxy-2'-fluorouridine-3'-phosphorothioate
  modified_base 3: mod_base = OTHER; note = 2'-O-methyluridine-3'-phosphate
  modified_base 4: mod_base = OTHER; note = 2'-O-methylguanosine-3'-phosphate
  modified_base 5: mod_base = OTHER; note = 2'-O-methyladenosine-3'-phosphate
  modified_base 6: mod_base = OTHER; note = 2'-deoxy-2'-fluoroadenosine-3'-phosphate
  modified_base 7: mod_base = OTHER; note = 2'-O-methylcytidine-3'-phosphate
  modified_base 8: mod_base = OTHER; note = 2'-deoxy-2'-fluoroadenosine-3'-phosphate
  modified_base 9: mod_base = OTHER; note = 2'-deoxy-2'-fluorocytidine-3'-phosphate
  modified_base 10: mod_base = OTHER; note = 2'-O-methylcytidine-3'-phosphate
  modified_base 11: mod_base = OTHER; note = 2'-O-methyluridine-3'-phosphate
  modified_base 12: mod_base = OTHER; note = 2'-O-methyluridine-3'-phosphate
  modified_base 13: mod_base = OTHER; note = 2'-O-methyluridine-3'-phosphate
  modified_base 14: mod_base = OTHER; note = 2'-deoxy-2'-fluorocytidine-3'-phosphate
  modified_base 15: mod_base = OTHER; note = 2'-O-methyluridine-3'-phosphate
  modified_base 16: mod_base = OTHER; note = 2'-deoxy-2'-fluorocytidine-3'-phosphate
  modified_base 17: mod_base = OTHER; note = 2'-O-methylcytidine-3'-phosphate
  modified_base 18: mod_base = OTHER; note = 2'-O-methylcytidine-3'-phosphate
  modified_base 19: mod_base = OTHER; note = 2'-O-methylcytidine-3'-phosphate
  modified_base 20: mod_base = OTHER; note = 2'-O-methylcytidine-3'-phosphate
  modified_base 21: mod_base = OTHER; note = 2'-O-methyluridine-3'-phosphorothioate
  modified_base 22: mod_base = OTHER; note = 2'-O-methylguanosine-3'-phosphorothioate
  modified_base 23: mod_base = OTHER; note = 2'-O-methylguanosine
tttgaacacctttctccccctgg

SEQ ID NO: 393 - RNA, 23 nt, synthetic construct
  source 1..23: mol_type = other RNA
  modified_base 1: mod_base = OTHER; note = 2'-O-methyladenosine-3'-phosphorothioate
  modified_base 2: mod_base = OTHER; note = 2'-deoxy-2'-fluorocytidine-3'-phosphorothioate
  modified_base 3: mod_base = OTHER; note = 2'-O-methylcytidine-3'-phosphate
  modified_base 4: mod_base = OTHER; note = 2'-O-methyladenosine-3'-phosphate
  modified_base 5: mod_base = OTHER; note = 2'-O-methyladenosine-3'-phosphate
  modified_base 6: mod_base = OTHER; note = 2'-deoxy-2'-fluorouridine-3'-phosphate
  modified_base 7: mod_base = OTHER; note = 2'-O-methylguanosine-3'-phosphate
  modified_base 8: mod_base = OTHER; note = 2'-deoxy-2'-fluorouridine-3'-phosphate
  modified_base 9: mod_base = OTHER; note = 2'-deoxy-2'-fluorocytidine-3'-phosphate
  modified_base 10: mod_base = OTHER; note = 2'-O-methyluridine-3'-phosphate
  modified_base 11: mod_base = OTHER; note = 2'-O-methyluridine-3'-phosphate
  modified_base 12: mod_base = OTHER; note = 2'-O-methylguanosine-3'-phosphate
  modified_base 13: mod_base = OTHER; note = 2'-O-methyluridine-3'-phosphate
  modified_base 14: mod_base = OTHER; note = 2'-deoxy-2'-fluorocytidine-3'-phosphate
  modified_base 15: mod_base = OTHER; note = 2'-O-methylguanosine-3'-phosphate
  modified_base 16: mod_base = OTHER; note = 2'-deoxy-2'-fluoroadenosine-3'-phosphate
  modified_base 17: mod_base = OTHER; note = 2'-O-methyluridine-3'-phosphate
  modified_base 18: mod_base = OTHER; note = 2'-O-methylguanosine-3'-phosphate
  modified_base 19: mod_base = OTHER; note = 2'-O-methyladenosine-3'-phosphate
  modified_base 20: mod_base = OTHER; note = 2'-O-methylcytidine-3'-phosphate
  modified_base 21: mod_base = OTHER; note = 2'-O-methyluridine-3'-phosphorothioate
  modified_base 22: mod_base = OTHER; note = 2'-O-methyluridine-3'-phosphorothioate
  modified_base 23: mod_base = OTHER; note = 2'-O-methyluridine
accaatgtcttgtcgatgacttt

SEQ ID NO: 394 - RNA, 21 nt, synthetic construct
  source 1..21: mol_type = other RNA
gaatgtgaaagtcatcgacaa

SEQ ID NO: 395 - RNA, 21 nt, synthetic construct
  source 1..21: mol_type = other RNA
ttttcaatgggtgtcctagga

SEQ ID NO: 396 - RNA, 21 nt, synthetic construct
  source 1..21: mol_type = other RNA
gaaagtcatcgacaagacatt

SEQ ID NO: 397 - RNA, 21 nt, synthetic construct
  source 1..21: mol_type = other RNA
tcatcgacaagacattggtga

SEQ ID NO: 398 - RNA, 21 nt, synthetic construct
  source 1..21: mol_type = other RNA
tttcaatgggtgtcctaggaa

SEQ ID NO: 399 - RNA, 21 nt, synthetic construct
  source 1..21: mol_type = other RNA
aatgggtgtcctaggaacctt

SEQ ID NO: 400 - RNA, 21 nt, synthetic construct
  source 1..21: mol_type = other RNA
gacagtgcacaatattttcca

SEQ ID NO: 401 - RNA, 21 nt, synthetic construct
  source 1..21: mol_type = other RNA
acttttcaatgggtgtcctaa

SEQ ID NO: 402 - RNA, 21 nt, synthetic construct
  source 1..21: mol_type = other RNA
aagtcatcgacaagacattga

SEQ ID NO: 403 - RNA, 21 nt, synthetic construct
  source 1..21: mol_type = other RNA
atcgacaagacattggtgaga

SEQ ID NO: 404 - RNA, 21 nt, synthetic construct
  source 1..21: mol_type = other RNA
gggagaaaggtgttcaagata

SEQ ID NO: 405 - RNA, 21 nt, synthetic construct
  source 1..21: mol_type = other RNA
cttttcaatgggtgtcctaga

SEQ ID NO: 406 - RNA, 21 nt, synthetic construct
  source 1..21: mol_type = other RNA
tcaatgggtgtcctaggaaca

SEQ ID NO: 407 - RNA, 21 nt, synthetic construct
  source 1..21: mol_type = other RNA
ttgacttttcaatgggtgtca

SEQ ID NO: 408 - RNA, 21 nt, synthetic construct
  source 1..21: mol_type = other RNA
aaagtcatcgacaagacatta

SEQ ID NO: 409 - RNA, 21 nt, synthetic construct
  source 1..21: mol_type = other RNA
cagggggagaaaggtgttcaa

SEQ ID NO: 410 - RNA, 21 nt, synthetic construct
  source 1..21: mol_type = other RNA
cattggtgaggaaaaatcctt

SEQ ID NO: 411 - RNA, 21 nt, synthetic construct
  source 1..21: mol_type = other RNA
acattggtgaggaaaaatcct

SEQ ID NO: 412 - RNA, 21 nt, synthetic construct
  source 1..21: mol_type = other RNA
agggggagaaaggtgttcaaa

SEQ ID NO: 413 - RNA, 21 nt, synthetic construct
  source 1..21: mol_type = other RNA
ctcaggatgaaaaattttgaa

SEQ ID NO: 414 - RNA, 21 nt, synthetic construct
  source 1..21: mol_type = other RNA
cagcatgtattacttgacaaa

SEQ ID NO: 415 - RNA, 21 nt, synthetic construct
  source 1..21: mol_type = other RNA
tatgaacaacatgctaaatca

SEQ ID NO: 416 - RNA, 21 nt, synthetic construct
  source 1..21: mol_type = other RNA
atatatccaaatgttttagga

SEQ ID NO: 417 - RNA, 21 nt, synthetic construct
  source 1..21: mol_type = other RNA
ccagatggaagctgtatccaa

SEQ ID NO: 418 - RNA, 21 nt, synthetic construct
  source 1..21: mol_type = other RNA
gactttcatcctggaaatata

SEQ ID NO: 419 - RNA, 21 nt, synthetic construct
  source 1..21: mol_type = other RNA
ccccggctaatttgtatcaat

SEQ ID NO: 420 - RNA, 21 nt, synthetic construct
  source 1..21: mol_type = other RNA
ttaaacatggcttgaatggga

SEQ ID NO: 421 - RNA, 21 nt, synthetic construct
  source 1..21: mol_type = other RNA
aatgtgtttagacaacgtcat

SEQ ID NO: 422 - RNA, 21 nt, synthetic construct
  source 1..21: mol_type = other RNA
actaaaggaagaattccggtt

SEQ ID NO: 423 - RNA, 21 nt, synthetic construct
  source 1..21: mol_type = other RNA
tatatccaaatgttttaggat

SEQ ID NO: 424 - RNA, 21 nt, synthetic construct
  source 1..21: mol_type = other RNA
gtgcggaaaggcactgatgtt

SEQ ID NO: 425 - RNA, 21 nt, synthetic construct
  source 1..21: mol_type = other RNA
taaaacagtggttcttaaatt

SEQ ID NO: 426 - RNA, 21 nt, synthetic construct
  source 1..21: mol_type = other RNA
atgaaaaattttgaaaccagt

SEQ ID NO: 427 - RNA, 21 nt, synthetic construct
  source 1..21: mol_type = other RNA
aacaaaatagcaatccctttt

SEQ ID NO: 428 - RNA, 21 nt, synthetic construct
  source 1..21: mol_type = other RNA
ctgaaacagatctgtcgactt

SEQ ID NO: 429 - RNA, 21 nt, synthetic construct
  source 1..21: mol_type = other RNA
ttgttgcaaagggcattttga

SEQ ID NO: 430 - RNA, 21 nt, synthetic construct
  source 1..21: mol_type = other RNA
ctcattgtttattaacctgta

SEQ ID NO: 431 - RNA, 21 nt, synthetic construct
  source 1..21: mol_type = other RNA
caacaaaatagcaatcccttt

SEQ ID NO: 432 - RNA, 21 nt, synthetic construct
  source 1..21: mol_type = other RNA
cattgtttattaacctgtatt

SEQ ID NO: 433 - RNA, 21 nt, synthetic construct
  source 1..21: mol_type = other RNA
tatcagctgggaagatatcaa

SEQ ID NO: 434 - RNA, 21 nt, synthetic construct
  source 1..21: mol_type = other RNA
tgtcctaggaaccttttagaa

SEQ ID NO: 435 - RNA, 21 nt, synthetic construct
  source 1..21: mol_type = other RNA
tccaacaaaatagcaatccct

SEQ ID NO: 436 - RNA, 21 nt, synthetic construct
  source 1..21: mol_type = other RNA
ggtgtgcggaaaggcactgat

SEQ ID NO: 437 - RNA, 21 nt, synthetic construct
  source 1..21: mol_type = other RNA
ttgaaaccagtactttatcat

SEQ ID NO: 438 - RNA, 21 nt, synthetic construct
  source 1..21: mol_type = other RNA
tacttccaaagtctatatata

SEQ ID NO: 439 - RNA, 21 nt, synthetic construct
  source 1..21: mol_type = other RNA
tcctaggaaccttttagaaat

SEQ ID NO: 440 - RNA, 21 nt, synthetic construct
  source 1..21: mol_type = other RNA
ctcctgaggaaaattttggaa

SEQ ID NO: 441 - RNA, 21 nt, synthetic construct
  source 1..21: mol_type = other RNA
gctccggaatgttgctgaaat

SEQ ID NO: 442 - RNA, 21 nt, synthetic construct
  source 1..21: mol_type = other RNA
gtgtttgtggggagaccaata

SEQ ID NO: 443 - RNA, 23 nt, synthetic construct
  source 1..23: mol_type = other RNA
ttgtcgatgactttcacattctg

SEQ ID NO: 444 - RNA, 23 nt, synthetic construct
  source 1..23: mol_type = other RNA
tcctaggacacccattgaaaagt

SEQ ID NO: 445 - RNA, 23 nt, synthetic construct
  source 1..23: mol_type = other RNA
aatgtcttgtcgatgactttcac

SEQ ID NO: 446 - RNA, 23 nt, synthetic construct
  source 1..23: mol_type = other RNA
tcaccaatgtcttgtcgatgact

SEQ ID NO: 447 - RNA, 23 nt, synthetic construct
  source 1..23: mol_type = other RNA
ttcctaggacacccattgaaaag

SEQ ID NO: 448 - RNA, 23 nt, synthetic construct
  source 1..23: mol_type = other RNA
aaggttcctaggacacccattga

SEQ ID NO: 449 - RNA, 23 nt, synthetic construct
  source 1..23: mol_type = other RNA
tggaaaatattgtgcactgtcag

SEQ ID NO: 450 - RNA, 23 nt, synthetic construct
  source 1..23: mol_type = other RNA
ttaggacacccattgaaaagtca

SEQ ID NO: 451 - RNA, 23 nt, synthetic construct
  source 1..23: mol_type = other RNA
tcaatgtcttgtcgatgactttc

SEQ ID NO: 452 - RNA, 23 nt, synthetic construct
  source 1..23: mol_type = other RNA
tctcaccaatgtcttgtcgatga

SEQ ID NO: 453 - RNA, 23 nt, synthetic construct
  source 1..23: mol_type = other RNA
tatcttgaacacctttctccccc

SEQ ID NO: 454 - RNA, 23 nt, synthetic construct
  source 1..23: mol_type = other RNA
tctaggacacccattgaaaagtc

SEQ ID NO: 455 - RNA, 23 nt, synthetic construct
  source 1..23: mol_type = other RNA
tgttcctaggacacccattgaaa

SEQ ID NO: 456 - RNA, 23 nt, synthetic construct
  source 1..23: mol_type = other RNA
tgacacccattgaaaagtcaaaa

SEQ ID NO: 457 - RNA, 23 nt, synthetic construct
  source 1..23: mol_type = other RNA
taatgtcttgtcgatgactttca

SEQ ID NO: 458 - RNA, 23 nt, synthetic construct
  source 1..23: mol_type = other RNA
ttgaacacctttctccccctgga

SEQ ID NO: 459 - RNA, 23 nt, synthetic construct
  source 1..23: mol_type = other RNA
aaggatttttcctcaccaatgtc

SEQ ID NO: 460 - RNA, 23 nt, synthetic construct
  source 1..23: mol_type = other RNA
aggatttttcctcaccaatgtct

SEQ ID NO: 461 - RNA, 23 nt, synthetic construct
  source 1..23: mol_type = other RNA
tttgaacacctttctccccctgg

SEQ ID NO: 462 - RNA, 23 nt, synthetic construct
  source 1..23: mol_type = other RNA
ttcaaaatttttcatcctgagtt

SEQ ID NO: 463 - RNA, 23 nt, synthetic construct
  source 1..23: mol_type = other RNA
tttgtcaagtaatacatgctgaa

SEQ ID NO: 464 - RNA, 23 nt, synthetic construct
  source 1..23: mol_type = other RNA
tgatttagcatgttgttcataat

SEQ ID NO: 465 - RNA, 23 nt, synthetic construct
  source 1..23: mol_type = other RNA
tcctaaaacatttggatatattc

SEQ ID NO: 466 - RNA, 23 nt, synthetic construct
  source 1..23: mol_type = other RNA
ttggatacagcttccatctggaa

SEQ ID NO: 467 - RNA, 23 nt, synthetic construct
  source 1..23: mol_type = other RNA
tatatttccaggatgaaagtcca

SEQ ID NO: 468 - RNA, 23 nt, synthetic construct
  source 1..23: mol_type = other RNA
attgatacaaattagccggggga

SEQ ID NO: 469 - RNA, 23 nt, synthetic construct
  source 1..23: mol_type = other RNA
tcccattcaagccatgtttaaca

SEQ ID NO: 470 - RNA, 23 nt, synthetic construct
  source 1..23: mol_type = other RNA
atgacgttgtctaaacacatttt

SEQ ID NO: 471 - RNA, 23 nt, synthetic construct
  source 1..23: mol_type = other RNA
aaccggaattcttcctttagtat

SEQ ID NO: 472 - RNA, 23 nt, synthetic construct
  source 1..23: mol_type = other RNA
atcctaaaacatttggatatatt

SEQ ID NO: 473 - RNA, 23 nt, synthetic construct
  source 1..23: mol_type = other RNA
aacatcagtgcctttccgcacac

SEQ ID NO: 474 - RNA, 23 nt, synthetic construct
  source 1..23: mol_type = other RNA
aatttaagaaccactgttttaaa

SEQ ID NO: 475 - RNA, 23 nt, synthetic construct
  source 1..23: mol_type = other RNA
actggtttcaaaatttttcatcc

SEQ ID NO: 476 - RNA, 23 nt, synthetic construct
  source 1..23: mol_type = other RNA
aaaagggattgctattttgttgg

SEQ ID NO: 477 - RNA, 23 nt, synthetic construct
  source 1..23: mol_type = other RNA
aagtcgacagatctgtttcagca

SEQ ID NO: 478 - RNA, 23 nt, synthetic construct
  source 1..23: mol_type = other RNA
tcaaaatgccctttgcaacaatt

SEQ ID NO: 479 - RNA, 23 nt, synthetic construct
  source 1..23: mol_type = other RNA
tacaggttaataaacaatgagat

SEQ ID NO: 480 - RNA, 23 nt, synthetic construct
  source 1..23: mol_type = other RNA
aaagggattgctattttgttgga

SEQ ID NO: 481 - RNA, 23 nt, synthetic construct
  source 1..23: mol_type = other RNA
aatacaggttaataaacaatgag

SEQ ID NO: 482 - RNA, 23 nt, synthetic construct
  source 1..23: mol_type = other RNA
ttgatatcttcccagctgataga

SEQ ID NO: 483 - RNA, 23 nt, synthetic construct
  source 1..23: mol_type = other RNA
ttctaaaaggttcctaggacacc

SEQ ID NO: 484 - RNA, 23 nt, synthetic construct
  source 1..23: mol_type = other RNA
agggattgctattttgttggaaa

SEQ ID NO: 485 - RNA, 23 nt, synthetic construct
  source 1..23: mol_type = other RNA
atcagtgcctttccgcacacccc

SEQ ID NO: 486 - RNA, 23 nt, synthetic construct
  source 1..23: mol_type = other RNA
atgataaagtactggtttcaaaa

SEQ ID NO: 487 - RNA, 23 nt, synthetic construct
  source 1..23: mol_type = other RNA
tatatatagactttggaagtact

SEQ ID NO: 488 - RNA, 23 nt, synthetic construct
  source 1..23: mol_type = other RNA
atttctaaaaggttcctaggaca

SEQ ID NO: 489 - RNA, 23 nt, synthetic construct
  source 1..23: mol_type = other RNA
ttccaaaattttcctcaggagaa

SEQ ID NO: 490 - RNA, 23 nt, synthetic construct
  source 1..23: mol_type = other RNA
atttcagcaacattccggagcat

SEQ ID NO: 491 - RNA, 23 nt, synthetic construct
  source 1..23: mol_type = other RNA
tattggtctccccacaaacacag

SEQ ID NO: 492 - RNA, 21 nt, synthetic construct
  source 1..21: mol_type = other RNA
atggtggtaatttgtgatttt

SEQ ID NO: 493 - RNA, 21 nt, synthetic construct
  source 1..21: mol_type = other RNA
gacttgcatcctggaaatata

SEQ ID NO: 494 - RNA, 21 nt, synthetic construct
  source 1..21: mol_type = other RNA
ggaagggaaggtagaagtctt

SEQ ID NO: 495 - RNA, 21 nt, synthetic construct
  source 1..21: mol_type = other RNA
tgtcttctgtttagatttcct

SEQ ID NO: 496 - RNA, 21 nt, synthetic construct
  source 1..21: mol_type = other RNA
ctttggctgtttccaagatct

SEQ ID NO: 497 - RNA, 21 nt, synthetic construct
  source 1..21: mol_type = other RNA
aatgtgtttgggcaacgtcat

SEQ ID NO: 498 - RNA, 21 nt, synthetic construct
  source 1..21: mol_type = other RNA
tgtgactgtggacacccctta

SEQ ID NO: 499 - RNA, 21 nt, synthetic construct
  source 1..21: mol_type = other RNA
gatggggtgccagctactatt

SEQ ID NO: 500 - RNA, 21 nt, synthetic construct
  source 1..21: mol_type = other RNA
gaaaatgtgtttgggcaacgt

SEQ ID NO: 501 - RNA, 21 nt, synthetic construct
  source 1..21: mol_type = other RNA
ggctgtttccaagatctgaca

SEQ ID NO: 502 - RNA, 21 nt, synthetic construct
  source 1..21: mol_type = other RNA
tccaacaaaatagccacccct

SEQ ID NO: 503 - RNA, 21 nt, synthetic construct
  source 1..21: mol_type = other RNA
gtcttctgtttagatttcctt

SEQ ID NO: 504 - RNA, 21 nt, synthetic construct
  source 1..21: mol_type = other RNA
tggaagggaaggtagaagtct

SEQ ID NO: 505 - RNA, 21 nt, synthetic construct
  source 1..21: mol_type = other RNA
tcctttggctgtttccaagat

SEQ ID NO: 506 - RNA, 21 nt, synthetic construct
  source 1..21: mol_type = other RNA
catctctcagctgggatgata

SEQ ID NO: 507 - RNA, 21 nt, synthetic construct
  source 1..21: mol_type = other RNA
ggggtgccagctactattgat

SEQ ID NO: 508 - RNA, 21 nt, synthetic construct
  source 1..21: mol_type = other RNA
atgtgtttgggcaacgtcata

SEQ ID NO: 509 - RNA, 21 nt, synthetic construct
  source 1..21: mol_type = other RNA
ctgtttagatttccttaagaa

SEQ ID NO: 510 - RNA, 21 nt, synthetic construct
  source 1..21: mol_type = other RNA
agaaagaaatggacttgcata

SEQ ID NO: 511 - RNA, 21 nt, synthetic construct
  source 1..21: mol_type = other RNA
gcatcctggaaatatattaaa

SEQ ID NO: 512 - RNA, 21 nt, synthetic construct
  source 1..21: mol_type = other RNA
cctgtcagaccatgggaacta

SEQ ID NO: 513 - RNA, 21 nt, synthetic construct
  source 1..21: mol_type = other RNA
aaacatggtgtggatgggata

SEQ ID NO: 514 - RNA, 23 nt, synthetic construct
  source 1..23: mol_type = other RNA
aaaatcacaaattaccaccatcc

SEQ ID NO: 515 - RNA, 23 nt, synthetic construct
  source 1..23: mol_type = other RNA
tatatttccaggatgcaagtcca

SEQ ID NO: 516 - RNA, 23 nt, synthetic construct
  source 1..23: mol_type = other RNA
aagacttctaccttcccttccac

SEQ ID NO: 517 - RNA, 23 nt, synthetic construct
  source 1..23: mol_type = other RNA
aggaaatctaaacagaagacagg

SEQ ID NO: 518 - RNA, 23 nt, synthetic construct
  source 1..23: mol_type = other RNA
agatcttggaaacagccaaagga

SEQ ID NO: 519 - RNA, 23 nt, synthetic construct
  source 1..23: mol_type = other RNA
atgacgttgcccaaacacatttt

SEQ ID NO: 520 - RNA, 23 nt, synthetic construct
  source 1..23: mol_type = other RNA
taaggggtgtccacagtcacaaa

SEQ ID NO: 521 - RNA, 23 nt, synthetic construct
  source 1..23: mol_type = other RNA
aatagtagctggcaccccatcca

SEQ ID NO: 522 - RNA, 23 nt, synthetic construct
  source 1..23: mol_type = other RNA
acgttgcccaaacacattttcaa

SEQ ID NO: 523 - RNA, 23 nt, synthetic construct
  source 1..23: mol_type = other RNA
tgtcagatcttggaaacagccaa

SEQ ID NO: 524 - RNA, 23 nt, synthetic construct
  source 1..23: mol_type = other RNA
aggggtggctattttgttggaaa

SEQ ID NO: 525 - RNA, 23 nt, synthetic construct
  source 1..23: mol_type = other RNA
aaggaaatctaaacagaagacag

SEQ ID NO: 526 - RNA, 23 nt, synthetic construct
  source 1..23: mol_type = other RNA
agacttctaccttcccttccaca

SEQ ID NO: 527 - RNA, 23 nt, synthetic construct
  source 1..23: mol_type = other RNA
atcttggaaacagccaaaggatt

SEQ ID NO: 528 - RNA, 23 nt, synthetic construct
  source 1..23: mol_type = other RNA
tatcatcccagctgagagatggg

SEQ ID NO: 529 - RNA, 23 nt, synthetic construct
  source 1..23: mol_type = other RNA
atcaatagtagctggcaccccat

SEQ ID NO: 530 - RNA, 23 nt, synthetic construct
  source 1..23: mol_type = other RNA
tatgacgttgcccaaacacattt

SEQ ID NO: 531 - RNA, 23 nt, synthetic construct
  source 1..23: mol_type = other RNA
ttcttaaggaaatctaaacagaa

SEQ ID NO: 532 - RNA, 23 nt, synthetic construct
  source 1..23: mol_type = other RNA
tatgcaagtccatttctttctag

SEQ ID NO: 533 - RNA, 23 nt, synthetic construct
  source 1..23: mol_type = other RNA
tttaatatatttccaggatgcaa

SEQ ID NO: 534 - RNA, 23 nt, synthetic construct
  source 1..23: mol_type = other RNA
tagttcccatggtctgacaggct

SEQ ID NO: 535 - RNA, 23 nt, synthetic construct
  source 1..23: mol_type = other RNA
tatcccatccacaccatgtttaa

SEQ ID NO: 536 - RNA, 21 nt, synthetic construct
  source 1..21: mol_type = other RNA
gaatgtgaaagtcatcgacaa

SEQ ID NO: 537 - RNA, 21 nt, synthetic construct
  source 1..21: mol_type = other RNA
gaatgtgaaagtcatcgacaa

SEQ ID NO: 538 - RNA, 21 nt, synthetic construct
  source 1..21: mol_type = other RNA
gaatgtgaaagtcatcgacaa

SEQ ID NO: 539 - RNA, 21 nt, synthetic construct
  source 1..21: mol_type = other RNA
gaatgtgaaagtcatcgacaa

SEQ ID NO: 540 - RNA, 21 nt, synthetic construct
  source 1..21: mol_type = other RNA
gaatgtgaaagtcatcgacaa

SEQ ID NO: 541 - RNA, 21 nt, synthetic construct
  source 1..21: mol_type = other RNA
gaatgtgaaagtcatcgacaa

SEQ ID NO: 542 - RNA, 21 nt, synthetic construct
  source 1..21: mol_type = other RNA
gaatgtgaaagtcatcgacaa

SEQ ID NO: 543 - RNA, 21 nt, synthetic construct
  source 1..21: mol_type = other RNA
gaatgtgaaagtcatcgacaa

SEQ ID NO: 544 - RNA, 19 nt, synthetic construct
  source 1..19: mol_type = other RNA
atgtgaaagtcatcgacaa

SEQ ID NO: 545 - RNA, 19 nt, synthetic construct
  source 1..19: mol_type = other RNA
atgtgaaagtcatcgacaa

SEQ ID NO: 546 - RNA, 21 nt, synthetic construct
  source 1..21: mol_type = other RNA
gaatgtgaaagtcatcgacaa

SEQ ID NO: 547 - RNA, 21 nt, synthetic construct
  source 1..21: mol_type = other RNA
gaatgtgaaagtcatcgacaa

SEQ ID NO: 548 - RNA, 21 nt, synthetic construct
  source 1..21: mol_type = other RNA
gaatgtgaaagtcatcgacaa

SEQ ID NO: 549 - RNA, 21 nt, synthetic construct
  source 1..21: mol_type = other RNA
gaatgtgaaagtcatcgacaa

SEQ ID NO: 550 - RNA, 21 nt, synthetic construct
  source 1..21: mol_type = other RNA
gaatgtgaaagtcatcgacaa

SEQ ID NO: 551 - RNA, 21 nt, synthetic construct
  source 1..21: mol_type = other RNA
gaatgtgaaagtcatcgacaa

SEQ ID NO: 552 - RNA, 21 nt, synthetic construct
  source 1..21: mol_type = other RNA
gaatgtgaaagtcatcgacaa

SEQ ID NO: 553 - RNA, 21 nt, synthetic construct
  source 1..21: mol_type = other RNA
gaatgtgaaagtcatcgacaa

SEQ ID NO: 554 - RNA, 21 nt, synthetic construct
  source 1..21: mol_type = other RNA
gaatgtgaaagtcatcgacaa

SEQ ID NO: 555 - RNA, 21 nt, synthetic construct
  source 1..21: mol_type = other RNA
gaatgtgaaagtcatcgacaa

SEQ ID NO: 556 - RNA, 21 nt, synthetic construct
  source 1..21: mol_type = other RNA
gaatgtgaaagtcatcgacaa

SEQ ID NO: 557 - RNA, 21 nt, synthetic construct
  source 1..21: mol_type = other RNA
  modified_base 6: mod_base = OTHER; note = 5'-methyluridine-3'-phosphate
gaatgtgaaagtcatcgacaa

SEQ ID NO: 558 - RNA, 21 nt, synthetic construct
  source 1..21: mol_type = other RNA
gaatgtgaaagtcatcgacaa

SEQ ID NO: 559 - RNA, 21 nt, synthetic construct
  source 1..21: mol_type = other RNA
  modified_base 6: mod_base = OTHER; note = 5'-methyluridine-3'-phosphate
gaatgtgaaagtcatcgacaa

SEQ ID NO: 560 - RNA, 21 nt, synthetic construct
  source 1..21: mol_type = other RNA
gaatgtgaaagtcatcgacaa

SEQ ID NO: 561 - RNA, 21 nt, synthetic construct
  source 1..21: mol_type = other RNA
gaatgtgaaagtcatcgacaa

SEQ ID NO: 562 - RNA, 21 nt, synthetic construct
  source 1..21: mol_type = other RNA
  modified_base 17: mod_base = OTHER; note = 5'-methyluridine-3'-phosphate
gaatgtgaaagtcatctacaa

SEQ ID NO: 563 - RNA, 20 nt, synthetic construct
  source 1..20: mol_type = other RNA
gaatgtgaaagtcatcacaa

SEQ ID NO: 564 - RNA, 21 nt, synthetic construct
  source 1..21: mol_type = other RNA
  modified_base 15: mod_base = OTHER; note = 5'-methyluridine-3'-phosphate
  modified_base 17: mod_base = OTHER; note = 5'-methyluridine-3'-phosphate
gaatgtgaaagtcatctacaa

SEQ ID NO: 565 - RNA, 21 nt, synthetic construct
  source 1..21: mol_type = other RNA
gaatgtgaaagtcatcgacaa

SEQ ID NO: 566 - RNA, 21 nt, synthetic construct
  source 1..21: mol_type = other RNA
  modified_base 17: mod_base = OTHER; note = 5'-methyluridine-3'-phosphate
gaatgtgaaagtcatctacaa

SEQ ID NO: 567 - RNA, 20 nt, synthetic construct
  source 1..20: mol_type = other RNA
gaatgtgaaagtcatcacaa

SEQ ID NO: 568 - RNA, 21 nt, synthetic construct
  source 1..21: mol_type = other RNA
gaatgtgaaagtcatcgacaa

SEQ ID NO: 569 - RNA, 21 nt, synthetic construct
  source 1..21: mol_type = other RNA
gaatgtgaaagtcatcgacaa

SEQ ID NO: 570 - RNA, 21 nt, synthetic construct
  source 1..21: mol_type = other RNA
gaatgtgaaagtcatcgacaa

SEQ ID NO: 571 - RNA, 21 nt, synthetic construct
  source 1..21: mol_type = other RNA
gaatgtgaaagtcatcgacaa

SEQ ID NO: 572 - RNA, 21 nt, synthetic construct
  source 1..21: mol_type = other RNA
gaatgtgaaagtcatcgacaa

SEQ ID NO: 573 - RNA, 21 nt, synthetic construct
  source 1..21: mol_type = other RNA
gaatgtgaaagtcatcgacaa

SEQ ID NO: 574 - RNA, 21 nt, synthetic construct
  source 1..21: mol_type = other RNA
gaatgtgaaagtcatcgacaa

SEQ ID NO: 575 - RNA, 21 nt, synthetic construct
  source 1..21: mol_type = other RNA
gactttcatcctggaaatata

SEQ ID NO: 576 - RNA, 21 nt, synthetic construct
  source 1..21: mol_type = other RNA
gactttcatcctggaaatata

SEQ ID NO: 577 - RNA, 21 nt, synthetic construct
  source 1..21: mol_type = other RNA
gactttcatcctggaaatata

SEQ ID NO: 578 - RNA, 21 nt, synthetic construct
  source 1..21: mol_type = other RNA
gactttcatcctggaaatata

SEQ ID NO: 579 - RNA, 21 nt, synthetic construct
  source 1..21: mol_type = other RNA
gactttcatcctggaaatata

SEQ ID NO: 580 - RNA, 21 nt, synthetic construct
  source 1..21: mol_type = other RNA
gactttcatcctggaaatata

SEQ ID NO: 581 - RNA, 19 nt, synthetic construct
  source 1..19: mol_type = other RNA
ctttcatcctggaaatata

SEQ ID NO: 582 - RNA, 19 nt, synthetic construct
  source 1..19: mol_type = other RNA
ctttcatcctggaaatata

SEQ ID NO: 583 - RNA, 21 nt, synthetic construct
  source 1..21: mol_type = other RNA
gactttcatcctggaaatata

SEQ ID NO: 584 - RNA, 21 nt, synthetic construct
  source 1..21: mol_type = other RNA
gactttcatcctggaaatata

SEQ ID NO: 585 - RNA, 21 nt, synthetic construct
  source 1..21: mol_type = other RNA
gactttcatcctggaaatata

SEQ ID NO: 586 - RNA, 21 nt, synthetic construct
  source 1..21: mol_type = other RNA
gactttcatcctggaaatata

SEQ ID NO: 587 - RNA, 21 nt, synthetic construct
  source 1..21: mol_type = other RNA
gactttcatcctggaaatata

SEQ ID NO: 588 - RNA, 21 nt, synthetic construct
  source 1..21: mol_type = other RNA
gactttcatcctggaaatata

SEQ ID NO: 589 - RNA, 21 nt, synthetic construct
  source 1..21: mol_type = other RNA
gactttcatcctggaaatata

SEQ ID NO: 590 - RNA, 21 nt, synthetic construct
  source 1..21: mol_type = other RNA
gactttcatcctggaaatata

SEQ ID NO: 591 - RNA, 21 nt, synthetic construct
  source 1..21: mol_type = other RNA
gactttcatcctggaaatata

SEQ ID NO: 592 - RNA, 21 nt, synthetic construct
  source 1..21: mol_type = other RNA
gactttcatcctggaaatata

SEQ ID NO: 593 - RNA, 21 nt, synthetic construct
  source 1..21: mol_type = other RNA
gactttcatcctggaaatata

SEQ ID NO: 594 - RNA, 21 nt, synthetic construct
  source 1..21: mol_type = other RNA
gactttcatcctggaaatata

SEQ ID NO: 595 - RNA, 21 nt, synthetic construct
  source 1..21: mol_type = other RNA
gactttcatcctggaaatata

SEQ ID NO: 596 - RNA, 21 nt, synthetic construct
  source 1..21: mol_type = other RNA
  modified_base 5: mod_base = OTHER; note = 5'-methyluridine-3'-phosphate
gactttcatcctggaaatata

SEQ ID NO: 597 - RNA, 21 nt, synthetic construct
  source 1..21: mol_type = other RNA
  modified_base 6: mod_base = OTHER; note = 5'-methyluridine-3'-phosphate
gactttcatcctggaaatata

SEQ ID NO: 598 - RNA, 21 nt, synthetic construct
  source 1..21: mol_type = other RNA
gactttcatcctggaaatata

SEQ ID NO: 599 - RNA, 21 nt, synthetic construct
  source 1..21: mol_type = other RNA
gactttcatcctggaaatata

SEQ ID NO: 600 - RNA, 21 nt, synthetic construct
  source 1..21: mol_type = other RNA
  modified_base 17: mod_base = OTHER; note = 5'-methyluridine-3'-phosphate
gactttcatcctggaattata

SEQ ID NO: 601 - RNA, 20 nt, synthetic construct
  source 1..20: mol_type = other RNA
gactttcatcctggaatata

SEQ ID NO: 602 - RNA, 21 nt, synthetic construct
  source 1..21: mol_type = other RNA
  modified_base 17: mod_base = OTHER; note = 5'-methyluridine-3'-phosphate
gactttcatcctggaattata

SEQ ID NO: 603 - RNA, 21 nt, synthetic construct
  source 1..21: mol_type = other RNA
  modified_base 17: mod_base = OTHER; note = 5'-methyluridine-3'-phosphate
gactttcatcctggaattata

SEQ ID NO: 604 - RNA, 21 nt, synthetic construct
  source 1..21: mol_type = other RNA
gactttcatcctggaaatata

SEQ ID NO: 605 - RNA, 21 nt, synthetic construct
  source 1..21: mol_type = other RNA
  modified_base 6: mod_base = OTHER; note = 5'-methyluridine-3'-phosphate
gactttcatcctggaaatata

SEQ ID NO: 606 - RNA, 21 nt, synthetic construct
  source 1..21: mol_type = other RNA
gactttcatcctggaaatata

SEQ ID NO: 607 - RNA, 21 nt, synthetic construct
  source 1..21: mol_type = other RNA
gactttcatcctggaaatata

SEQ ID NO: 608 - RNA, 21 nt, synthetic construct
  source 1..21: mol_type = other RNA
gactttcatcctggaaatata

SEQ ID NO: 609 - RNA, 21 nt, synthetic construct
  source 1..21: mol_type = other RNA
gactttcatcctggaaatata

SEQ ID NO: 610 - RNA, 21 nt, synthetic construct
  source 1..21: mol_type = other RNA
gactttcatcctggaaatata

SEQ ID NO: 611 - RNA, 21 nt, synthetic construct
  source 1..21: mol_type = other RNA
gactttcatcctggaaatata

SEQ ID NO: 612 - RNA, 21 nt, synthetic construct
  source 1..21: mol_type = other RNA
gactttcatcctggaaatata

SEQ ID NO: 613 - RNA, 21 nt, synthetic construct
  source 1..21: mol_type = other RNA
gactttcatcctggaaatata

SEQ ID NO: 614 - RNA, 21 nt, synthetic construct
  source 1..21: mol_type = other RNA
agaaaggtgttcaagatgtca

SEQ ID NO: 615 - RNA, 21 nt, synthetic construct
  source 1..21: mol_type = other RNA
catcctggaaatatattaact

SEQ ID NO: 616 - RNA, 21 nt, synthetic construct
  source 1..21: mol_type = other RNA
gaatgtgaaagtcatcgacaa

SEQ ID NO: 617 - RNA, 21 nt, synthetic construct
  source 1..21: mol_type = other RNA
agtgcacaatattttcccata

SEQ ID NO: 618 - RNA, 21 nt, synthetic construct
  source 1..21: mol_type = other RNA
gaaagtcatcgacaagacatt

SEQ ID NO: 619 - RNA, 21 nt, synthetic construct
  source 1..21: mol_type = other RNA
aatgtgaaagtcatcgacaaa

SEQ ID NO: 620 - RNA, 21 nt, synthetic construct
  source 1..21: mol_type = other RNA
ctggaaatatattaactgtta

SEQ ID NO: 621 - RNA, 21 nt, synthetic construct
  source 1..21: mol_type = other RNA
attttcccatctgtattattt

SEQ ID NO: 622 - RNA, 21 nt, synthetic construct
  source 1..21: mol_type = other RNA
tgtcgttcttttccaacaaaa

SEQ ID NO: 623 - RNA, 21 nt, synthetic construct
  source 1..21: mol_type = other RNA
atcctggaaatatattaacta

SEQ ID NO: 624 - RNA, 21 nt, synthetic construct
  source 1..21: mol_type = other RNA
gcattttgagaggtgatgata

SEQ ID NO: 625 - RNA, 21 nt, synthetic construct
  source 1..21: mol_type = other RNA
cagggggagaaaggtgttcaa

SEQ ID NO: 626 - RNA, 21 nt, synthetic construct
  source 1..21: mol_type = other RNA
ggaaatatattaactgttaaa

SEQ ID NO: 627 - RNA, 21 nt, synthetic construct
  source 1..21: mol_type = other RNA
cattggtgaggaaaaatcctt

SEQ ID NO: 628 - RNA, 21 nt, synthetic construct
  source 1..21: mol_type = other RNA
gggagaaaggtgttcaagata

SEQ ID NO: 629 - RNA, 21 nt, synthetic construct
  source 1..21: mol_type = other RNA
ggcattttgagaggtgatgat

SEQ ID NO: 630 - RNA, 21 nt, synthetic construct
  source 1..21: mol_type = other RNA
tacaaagggtgtcgttctttt

SEQ ID NO: 631 - RNA, 21 nt, synthetic construct
  source 1..21: mol_type = other RNA
tgggatcttggtgtcgaatca

SEQ ID NO: 632 - RNA, 21 nt, synthetic construct
  source 1..21: mol_type = other RNA
ctgacagtgcacaatatttta

SEQ ID NO: 633 - RNA, 21 nt, synthetic construct
  source 1..21: mol_type = other RNA
cagtgcacaatattttcccat

SEQ ID NO: 634 - RNA, 21 nt, synthetic construct
  source 1..21: mol_type = other RNA
acttttcaatgggtgtcctaa

SEQ ID NO: 635 - RNA, 21 nt, synthetic construct
  source 1..21: mol_type = other RNA
acattggtgaggaaaaatcct

SEQ ID NO: 636 - RNA, 21 nt, synthetic construct
  source 1..21: mol_type = other RNA
ttgcttttgacttttcaatga

SEQ ID NO: 637 - RNA, 21 nt, synthetic construct
  source 1..21: mol_type = other RNA
cattttgagaggtgatgatga

SEQ ID NO: 638 - RNA, 21 nt, synthetic construct
  source 1..21: mol_type = other RNA
ttgacttttcaatgggtgtca

SEQ ID NO: 639 - RNA, 21 nt, synthetic construct
  source 1..21: mol_type = other RNA
cgacttctgttttaggacaga

SEQ ID NO: 640 - RNA, 21 nt, synthetic construct
  source 1..21: mol_type = other RNA
ctctgagtgggtgccagaata

SEQ ID NO: 641 - RNA, 21 nt, synthetic construct
  source 1..21: mol_type = other RNA
gggtgccagaatgtgaaagta

SEQ ID NO: 642 - RNA, 21 nt, synthetic construct
  source 1..21: mol_type = other RNA
tcaatgggtgtcctaggaaca

SEQ ID NO: 643 - RNA, 21 nt, synthetic construct
  source 1..21: mol_type = other RNA
aaagtcatcgacaagacatta

SEQ ID NO: 644 - RNA, 21 nt, synthetic construct
  source 1..21: mol_type = other RNA
attttgagaggtgatgatgca

SEQ ID NO: 645 - RNA, 21 nt, synthetic construct
  source 1..21: mol_type = other RNA
atcgacaagacattggtgaga

SEQ ID NO: 646 - RNA, 21 nt, synthetic construct
  source 1..21: mol_type = other RNA
ggtgccagaatgtgaaagtca

SEQ ID NO: 647 - RNA, 21 nt, synthetic construct
  source 1..21: mol_type = other RNA
gacagtgcacaatattttcca

SEQ ID NO: 648 - RNA, 21 nt, synthetic construct
  source 1..21: mol_type = other RNA
acaaagagacactgtgcagaa

SEQ ID NO: 649 - RNA, 21 nt, synthetic construct
  source 1..21: mol_type = other RNA
ttttcaatgggtgtcctagga

SEQ ID NO: 650 - RNA, 21 nt, synthetic construct
  source 1..21: mol_type = other RNA
ccgtttccaagatctgacagt

SEQ ID NO: 651 - RNA, 21 nt, synthetic construct
  source 1..21: mol_type = other RNA
agggggagaaaggtgttcaaa

SEQ ID NO: 652 - RNA, 21 nt, synthetic construct
  source 1..21: mol_type = other RNA
agtcatcgacaagacattggt

SEQ ID NO: 653 - RNA, 23 nt, synthetic construct
  source 1..23: mol_type = other RNA
ttgtcgatgactttcacattctg

SEQ ID NO: 654 - RNA, 23 nt, synthetic construct
  source 1..23: mol_type = other RNA
ttgtcgatgactttcacattctg

SEQ ID NO: 655 - RNA, 23 nt, synthetic construct
  source 1..23: mol_type = other RNA
ttgtcgatgactttcacattctg

SEQ ID NO: 656 - RNA, 23 nt, synthetic construct
  source 1..23: mol_type = other RNA
ttgtcgatgactttcacattctg

SEQ ID NO: 657 - RNA, 23 nt, synthetic construct
  source 1..23: mol_type = other RNA
ttgtcgatgactttcacattctg

SEQ ID NO: 658 - RNA, 23 nt, synthetic construct
  source 1..23: mol_type = other RNA
ttgtcgatgactttcacattctg

SEQ ID NO: 659 - RNA, 23 nt, synthetic construct
  source 1..23: mol_type = other RNA
ttgtcgatgactttcacattctg

SEQ ID NO: 660 - RNA, 23 nt, synthetic construct
  source 1..23: mol_type = other RNA
ttgtcgatgactttcacattctg

SEQ ID NO: 661 - RNA, 21 nt, synthetic construct
  source 1..21: mol_type = other RNA
ttgtcgatgactttcacattc

SEQ ID NO: 662 - RNA, 21 nt, synthetic construct
  source 1..21: mol_type = other RNA
ttgtcgatgactttcacattc

SEQ ID NO: 663 - RNA, 23 nt, synthetic construct
  source 1..23: mol_type = other RNA
ttgtcgatgactttcacattctg

SEQ ID NO: 664 - RNA, 23 nt, synthetic construct
  source 1..23: mol_type = other RNA
ttgtcgatgactttcacattctg

SEQ ID NO: 665 - RNA, 23 nt, synthetic construct
  source 1..23: mol_type = other RNA
ttgtcgatgactttcacattctg

SEQ ID NO: 666 - RNA, 23 nt, synthetic construct
  source 1..23: mol_type = other RNA
ttgtcgatgactttcacattctg

SEQ ID NO: 667 - RNA, 23 nt, synthetic construct
  source 1..23: mol_type = other RNA
ttgtcgatgactttcacattctg

SEQ ID NO: 668 - RNA, 23 nt, synthetic construct
  source 1..23: mol_type = other RNA
ttgtcgatgactttcacattctg

SEQ ID NO: 669 - RNA, 23 nt, synthetic construct
  source 1..23: mol_type = other RNA
ttgtcgatgactttcacattctg

SEQ ID NO: 670 - RNA, 23 nt, synthetic construct
  source 1..23: mol_type = other RNA
ttgtcgatgactttcacattctg

SEQ ID NO: 671 - RNA, 23 nt, synthetic construct
  source 1..23: mol_type = other RNA
ttgtcgatgactttcacattctg

SEQ ID NO: 672 - RNA, 23 nt, synthetic construct
  source 1..23: mol_type = other RNA
ttgtcgatgactttcacattctg

SEQ ID NO: 673 - RNA, 23 nt, synthetic construct
  source 1..23: mol_type = other RNA
ttgtcgatgactttcacattctg

SEQ ID NO: 674 - RNA, 23 nt, synthetic construct
  source 1..23: mol_type = other RNA
ttgtcgatgactttcacattctg

SEQ ID NO: 675 - RNA, 23 nt, synthetic construct
  source 1..23: mol_type = other RNA
ttgtcgatgactttcacattctg

SEQ ID NO: 676 - RNA, 23 nt, synthetic construct
  source 1..23: mol_type = other RNA
ttgtcgatgactttcacattctg

SEQ ID NO: 677 - RNA, 23 nt, synthetic construct
  source 1..23: mol_type = other RNA
ttgtcgatgactttcacattctg

SEQ ID NO: 678 - RNA, 23 nt, synthetic construct
  source 1..23: mol_type = other RNA
ttgtcgatgactttcacattctg

SEQ ID NO: 679 - RNA, 23 nt, synthetic construct
  source 1..23: mol_type = other RNA
ttgtcgatgactttcacattctg

SEQ ID NO: 680 - RNA, 23 nt, synthetic construct
  source 1..23: mol_type = other RNA
ttgtcgatgactttcacattctg

SEQ ID NO: 681 - RNA, 23 nt, synthetic construct
  source 1..23: mol_type = other RNA
ttgtcgatgactttcacattctg

SEQ ID NO: 682 - RNA, 23 nt, synthetic construct
  source 1..23: mol_type = other RNA
ttgtcgatgactttcacattctg

SEQ ID NO: 683 - RNA, 23 nt, synthetic construct
  source 1..23: mol_type = other RNA
ttgtcgatgactttcacattctg

SEQ ID NO: 684 - RNA, 23 nt, synthetic construct
  source 1..23: mol_type = other RNA
ttgtcgatgactttcacattctg

SEQ ID NO: 685 - RNA, 23 nt, synthetic construct
  source 1..23: mol_type = other RNA
  modified_base 2: mod_base = OTHER; note = 5'-methyluridine-3'-phosphate
  modified_base 14: mod_base = OTHER; note = 5'-methyluridine-3'-phosphate
ttgtcgatgactttcacattctg

SEQ ID NO: 686 - RNA, 23 nt, synthetic construct
  source 1..23: mol_type = other RNA
  modified_base 14: mod_base = OTHER; note = 5'-methyluridine-3'-phosphate
ttgtcgatgactttcacattctg

SEQ ID NO: 687 - RNA, 23 nt, synthetic construct
  source 1..23: mol_type = other RNA
  modified_base 2: mod_base = OTHER; note = 5'-methyluridine-3'-phosphate
  modified_base 14: mod_base = OTHER; note = 5'-methyluridine-3'-phosphate
ttgtcgatgactttcacattctg

SEQ ID NO: 688 - RNA, 23 nt, synthetic construct
  source 1..23: mol_type = other RNA
  modified_base 14: mod_base = OTHER; note = 5'-methyluridine-3'-phosphate
ttgtcgatgactttcacattctg

SEQ ID NO: 689 - RNA, 23 nt, synthetic construct
  source 1..23: mol_type = other RNA
  modified_base 2: mod_base = OTHER; note = 5'-methyluridine-3'-phosphate
  modified_base 14: mod_base = OTHER; note = 5'-methyluridine-3'-phosphate
ttgtcgatgactttcacattctg

SEQ ID NO: 690 - RNA, 23 nt, synthetic construct
  source 1..23: mol_type = other RNA
  modified_base 2: mod_base = OTHER; note = 5'-methyluridine-3'-phosphate
  modified_base 14: mod_base = OTHER; note = 5'-methyluridine-3'-phosphate
ttgtcgatgactttcacattctg

SEQ ID NO: 691 - RNA, 23 nt, synthetic construct
  source 1..23: mol_type = other RNA
  modified_base 2: mod_base = OTHER; note = 5'-methyluridine-3'-phosphate
  modified_base 14: mod_base = OTHER; note = 5'-methyluridine-3'-phosphate
ttgtcgatgactttcacattctg

SEQ ID NO: 692 - RNA, 23 nt, synthetic construct
  source 1..23: mol_type = other RNA
tatatttccaggatgaaagtcca

SEQ ID NO: 693 - RNA, 23 nt, synthetic construct
  source 1..23: mol_type = other RNA
tatatttccaggatgaaagtcca

SEQ ID NO: 694 - RNA, 23 nt, synthetic construct
  source 1..23: mol_type = other RNA
tatatttccaggatgaaagtcca

SEQ ID NO: 695 - RNA, 23 nt, synthetic construct
  source 1..23: mol_type = other RNA
tatatttccaggatgaaagtcca

SEQ ID NO: 696 - RNA, 23 nt, synthetic construct
  source 1..23: mol_type = other RNA
tatatttccaggatgaaagtcca

SEQ ID NO: 697 - RNA, 23 nt, synthetic construct
  source 1..23: mol_type = other RNA
tatatttccaggatgaaagtcca

SEQ ID NO: 698 - RNA, 21 nt, synthetic construct
  source 1..21: mol_type = other RNA
tatatttccaggatgaaagtc

SEQ ID NO: 699 - RNA, 21 nt, synthetic construct
  source 1..21: mol_type = other RNA
tatatttccaggatgaaagtc

SEQ ID NO: 700 - RNA, 23 nt, synthetic construct
  source 1..23: mol_type = other RNA
tatatttccaggatgaaagtcca

SEQ ID NO: 701 - RNA, 23 nt, synthetic construct
  source 1..23: mol_type = other RNA
tatatttccaggatgaaagtcca

SEQ ID NO: 702 - RNA, 23 nt, synthetic construct
  source 1..23: mol_type = other RNA
tatatttccaggatgaaagtcca

SEQ ID NO: 703 - RNA, 23 nt, synthetic construct
  source 1..23: mol_type = other RNA
tatatttccaggatgaaagtcca

SEQ ID NO: 704 - RNA, 23 nt, synthetic construct
  source 1..23: mol_type = other RNA
tatatttccaggatgaaagtcca

SEQ ID NO: 705 - RNA, 23 nt, synthetic construct
  source 1..23: mol_type = other RNA
tatatttccaggatgaaagtcca

SEQ ID NO: 706 - RNA, 23 nt, synthetic construct
  source 1..23: mol_type = other RNA
tatatttccaggatgaaagtcca

SEQ ID NO: 707 - RNA, 23 nt, synthetic construct
  source 1..23: mol_type = other RNA
tatatttccaggatgaaagtcca

SEQ ID NO: 708 - RNA, 23 nt, synthetic construct
  source 1..23: mol_type = other RNA
tatatttccaggatgaaagtcca

SEQ ID NO: 709 - RNA, 23 nt, synthetic construct
  source 1..23: mol_type = other RNA
tatatttccaggatgaaagtcca

SEQ ID NO: 710 - RNA, 23 nt, synthetic construct
  source 1..23: mol_type = other RNA
tatatttccaggatgaaagtcca

SEQ ID NO: 711 - RNA, 23 nt, synthetic construct
  source 1..23: mol_type = other RNA
tatatttccaggatgaaagtcca

SEQ ID NO: 712 - RNA, 23 nt, synthetic construct
  source 1..23: mol_type = other RNA
tatatttccaggatgaaagtcca

SEQ ID NO: 713 - RNA, 23 nt, synthetic construct
  source 1..23: mol_type = other RNA
tatatttccaggatgaaagtcca

SEQ ID NO: 714 - RNA, 23 nt, synthetic construct
  source 1..23: mol_type = other RNA
tatatttccaggatgaaagtcca

SEQ ID NO: 715 - RNA, 23 nt, synthetic construct
  source 1..23: mol_type = other RNA
tatatttccaggatgaaagtcca

SEQ ID NO: 716 - RNA, 23 nt, synthetic construct
  source 1..23: mol_type = other RNA
tatatttccaggatgaaagtcca

SEQ ID NO: 717 - RNA, 23 nt, synthetic construct
  source 1..23: mol_type = other RNA
tatatttccaggatgaaagtcca

SEQ ID NO: 718 - RNA, 23 nt, synthetic construct
  source 1..23: mol_type = other RNA
tatatttccaggatgaaagtcca

SEQ ID NO: 719 - RNA, 23 nt, synthetic construct
  source 1..23: mol_type = other RNA
tatatttccaggatgaaagtcca

SEQ ID NO: 720 - RNA, 23 nt, synthetic construct
  source 1..23: mol_type = other RNA
tatatttccaggatgaaagtcca

SEQ ID NO: 721 - RNA, 23 nt, synthetic construct
  source 1..23: mol_type = other RNA
tatatttccaggatgaaagtcca

SEQ ID NO: 722 - RNA, 23 nt, synthetic construct
  source 1..23: mol_type = other RNA
tatatttccaggatgaaagtcca

SEQ ID NO: 723 - RNA, 23 nt, synthetic construct
  source 1..23: mol_type = other RNA
  modified_base 14: mod_base = OTHER; note = 5'-methyluridine-3'-phosphate
tatatttccaggatgaaagtcca

SEQ ID NO: 724 - RNA, 23 nt, synthetic construct
  source 1..23: mol_type = other RNA
  modified_base 14: mod_base = OTHER; note = 5'-methyluridine-3'-phosphate
tatatttccaggatgaaagtcca

SEQ ID NO: 725 - RNA, 23 nt, synthetic construct
  source 1..23: mol_type = other RNA
  modified_base 14: mod_base = OTHER; note = 5'-methyluridine-3'-phosphate
tatatttccaggatgaaagtcca

SEQ ID NO: 726 - RNA, 23 nt, synthetic construct
  source 1..23: mol_type = other RNA
  modified_base 6: mod_base = OTHER; note = 5'-methyluridine-3'-phosphate
  modified_base 14: mod_base = OTHER; note = 5'-methyluridine-3'-phosphate
tatatttccaggatgaaagtcca

SEQ ID NO: 727 - RNA, 23 nt, synthetic construct
  source 1..23: mol_type = other RNA
  modified_base 6: mod_base = OTHER; note = 5'-methyluridine-3'-phosphate
  modified_base 14: mod_base = OTHER; note = 5'-methyluridine-3'-phosphate
tatatttccaggatgaaagtcca

SEQ ID NO: 728 - RNA, 23 nt, synthetic construct
  source 1..23: mol_type = other RNA
  modified_base 14: mod_base = OTHER; note = 5'-methyluridine-3'-phosphate
tatatttccaggatgaaagtcca

SEQ ID NO: 729 - RNA, 23 nt, synthetic construct
  source 1..23: mol_type = other RNA
  modified_base 6: mod_base = OTHER; note = 5'-methyluridine-3'-phosphate
  modified_base 14: mod_base = OTHER; note = 5'-methyluridine-3'-phosphate
tatatttccaggatgaaagtcca

SEQ ID NO: 730 - RNA, 23 nt, synthetic construct
  source 1..23: mol_type = other RNA
  modified_base 14: mod_base = OTHER; note = 5'-methyluridine-3'-phosphate
tatatttccaggatgaaagtcca

SEQ ID NO: 731 - RNA, 23 nt, synthetic construct
  source 1..23: mol_type = other RNA
tgacatcttgaacacctttctcc

SEQ ID NO: 732 - RNA, 23 nt, synthetic construct
  source 1..23: mol_type = other RNA
agttaatatatttccaggatgaa

SEQ ID NO: 733 - RNA, 23 nt, synthetic construct
  source 1..23: mol_type = other RNA
ttgtcgatgactttcacattctg

SEQ ID NO: 734 - RNA, 23 nt, synthetic construct
  source 1..23: mol_type = other RNA
tatgggaaaatattgtgcactgt

SEQ ID NO: 735 - RNA, 23 nt, synthetic construct
  source 1..23: mol_type = other RNA
aatgtcttgtcgatgactttcac

SEQ ID NO: 736 - RNA, 23 nt, synthetic construct
  source 1..23: mol_type = other RNA
tttgtcgatgactttcacattct

SEQ ID NO: 737 - RNA, 23 nt, synthetic construct
  source 1..23: mol_type = other RNA
taacagttaatatatttccagga

SEQ ID NO: 738 - RNA, 23 nt, synthetic construct
  source 1..23: mol_type = other RNA
aaataatacagatgggaaaatat

SEQ ID NO: 739 - RNA, 23 nt, synthetic construct
  source 1..23: mol_type = other RNA
ttttgttggaaaagaacgacacc

SEQ ID NO: 740 - RNA, 23 nt, synthetic construct
  source 1..23: mol_type = other RNA
tagttaatatatttccaggatga

SEQ ID NO: 741 - RNA, 23 nt, synthetic construct
  source 1..23: mol_type = other RNA
tatcatcacctctcaaaatgccc

SEQ ID NO: 742 - RNA, 23 nt, synthetic construct
  source 1..23: mol_type = other RNA
ttgaacacctttctccccctgga

SEQ ID NO: 743 - RNA, 23 nt, synthetic construct
  source 1..23: mol_type = other RNA
tttaacagttaatatatttccag

SEQ ID NO: 744 - RNA, 23 nt, synthetic construct
  source 1..23: mol_type = other RNA
aaggatttttcctcaccaatgtc

SEQ ID NO: 745 - RNA, 23 nt, synthetic construct
  source 1..23: mol_type = other RNA
tatcttgaacacctttctccccc

SEQ ID NO: 746 - RNA, 23 nt, synthetic construct
  source 1..23: mol_type = other RNA
atcatcacctctcaaaatgccct

SEQ ID NO: 747 - RNA, 23 nt, synthetic construct
  source 1..23: mol_type = other RNA
aaaagaacgacaccctttgtatt

SEQ ID NO: 748 - RNA, 23 nt, synthetic construct
  source 1..23: mol_type = other RNA
tgattcgacaccaagatcccatt

SEQ ID NO: 749 - RNA, 23 nt, synthetic construct
  source 1..23: mol_type = other RNA
taaaatattgtgcactgtcagat

SEQ ID NO: 750 - RNA, 23 nt, synthetic construct
  source 1..23: mol_type = other RNA
atgggaaaatattgtgcactgtc

SEQ ID NO: 751 - RNA, 23 nt, synthetic construct
  source 1..23: mol_type = other RNA
ttaggacacccattgaaaagtca

SEQ ID NO: 752 - RNA, 23 nt, synthetic construct
  source 1..23: mol_type = other RNA
aggatttttcctcaccaatgtct

SEQ ID NO: 753 - RNA, 23 nt, synthetic construct
  source 1..23: mol_type = other RNA
tcattgaaaagtcaaaagcaatg

SEQ ID NO: 754 - RNA, 23 nt, synthetic construct
  source 1..23: mol_type = other RNA
tcatcatcacctctcaaaatgcc

SEQ ID NO: 755 - RNA, 23 nt, synthetic construct
  source 1..23: mol_type = other RNA
tgacacccattgaaaagtcaaaa

SEQ ID NO: 756 - RNA, 23 nt, synthetic construct
  source 1..23: mol_type = other RNA
tctgtcctaaaacagaagtcgac

SEQ ID NO: 757 - RNA, 23 nt, synthetic construct
  source 1..23: mol_type = other RNA
tattctggcacccactcagagcc

SEQ ID NO: 758 - RNA, 23 nt, synthetic construct
  source 1..23: mol_type = other RNA
tactttcacattctggcacccac

SEQ ID NO: 759 - RNA, 23 nt, synthetic construct
  source 1..23: mol_type = other RNA
tgttcctaggacacccattgaaa

SEQ ID NO: 760 - RNA, 23 nt, synthetic construct
  source 1..23: mol_type = other RNA
taatgtcttgtcgatgactttca

SEQ ID NO: 761 - RNA, 23 nt, synthetic construct
  source 1..23: mol_type = other RNA
tgcatcatcacctctcaaaatgc

SEQ ID NO: 762 - RNA, 23 nt, synthetic construct
  source 1..23: mol_type = other RNA
tctcaccaatgtcttgtcgatga

SEQ ID NO: 763 - RNA, 23 nt, synthetic construct
  source 1..23: mol_type = other RNA
tgactttcacattctggcaccca

SEQ ID NO: 764 - RNA, 23 nt, synthetic construct
  source 1..23: mol_type = other RNA
tggaaaatattgtgcactgtcag

SEQ ID NO: 765 - RNA, 23 nt, synthetic construct
  source 1..23: mol_type = other RNA
ttctgcacagtgtctctttgtca

SEQ ID NO: 766 - RNA, 23 nt, synthetic construct
  source 1..23: mol_type = other RNA
tcctaggacacccattgaaaagt

SEQ ID NO: 767 - RNA, 23 nt, synthetic construct
  source 1..23: mol_type = other RNA
actgtcagatcttggaaacggcc

SEQ ID NO: 768 - RNA, 23 nt, synthetic construct
  source 1..23: mol_type = other RNA
tttgaacacctttctccccctgg

SEQ ID NO: 769 - RNA, 23 nt, synthetic construct
  source 1..23: mol_type = other RNA
accaatgtcttgtcgatgacttt

SEQ ID NO: 770 - DNA, 21 bp, synthetic construct
  source 1..21: mol_type = other DNA
  modified_base 1: mod_base = OTHER; note = 2'-O-methyluridine-3'-phosphate
  modified_base 2: mod_base = OTHER; note = 2'-O-methyluridine-3'-phosphate
  modified_base 3: mod_base = OTHER; note = 2'-O-methylcytidine-3'-phosphate
  modified_base 4: mod_base = OTHER; note = adenosine-3'-phosphate
  modified_base 5: mod_base = OTHER; note = adenosine-3'-phosphate
  modified_base 6: mod_base = OTHER; note = 2'-O-methyluridine-3'-phosphate
  modified_base 7: mod_base = OTHER; note = guanosine-3'-phosphate
  modified_base 8: mod_base = OTHER; note = guanosine-3'-phosphate
  modified_base 9: mod_base = OTHER; note = guanosine-3'-phosphate
  modified_base 10: mod_base = OTHER; note = 2'-O-methyluridine-3'-phosphate
  modified_base 11: mod_base = OTHER; note = guanosine-3'-phosphate
  modified_base 12: mod_base = OTHER; note = 2'-O-methyluridine-3'-phosphate
  modified_base 13: mod_base = OTHER; note = 2'-O-methylcytidine-3'-phosphate
  modified_base 14: mod_base = OTHER; note = 2'-O-methylcytidine-3'-phosphate
  modified_base 15: mod_base = OTHER; note = 2'-O-methyluridine-3'-phosphate
  modified_base 16: mod_base = OTHER; note = adenosine-3'-phosphate
  modified_base 17: mod_base = OTHER; note = guanosine-3'-phosphate
  modified_base 18: mod_base = OTHER; note = guanosine-3'-phosphate
  modified_base 19: mod_base = OTHER; note = adenosine-3'-phosphate
  modified_base 20: mod_base = OTHER; note = 2'-deoxythymidine-3'-phosphorothioate
  misc_feature 1..19: note = RNA
  misc_feature 20..21: note = DNA
ttcaatgggtgtcctaggatt

SEQ ID NO: 771 - RNA, 19 nt, synthetic construct
  source 1..19: mol_type = other RNA
ttcaatgggtgtcctagga

SEQ ID NO: 772 - DNA, 21 bp, synthetic construct
  source 1..21: mol_type = other DNA
  modified_base 1: mod_base = OTHER; note = adenosine-3'-phosphate
  modified_base 2: mod_base = OTHER; note = 2'-O-methylcytidine-3'-phosphate
  modified_base 3: mod_base = OTHER; note = adenosine-3'-phosphate
  modified_base 4: mod_base = OTHER; note = adenosine-3'-phosphate
  modified_base 5: mod_base = OTHER; note = 2'-O-methylcytidine-3'-phosphate
  modified_base 6: mod_base = OTHER; note = 2'-O-methyluridine-3'-phosphate
  modified_base 7: mod_base = OTHER; note = guanosine-3'-phosphate
  modified_base 8: mod_base = OTHER; note = guanosine-3'-phosphate
  modified_base 9: mod_base = OTHER; note = adenosine-3'-phosphate
  modified_base 10: mod_base = OTHER; note = guanosine-3'-phosphate
  modified_base 11: mod_base = OTHER; note = guanosine-3'-phosphate
  modified_base 12: mod_base = OTHER; note = guanosine-3'-phosphate
  modified_base 13: mod_base = OTHER; note = adenosine-3'-phosphate
  modified_base 14: mod_base = OTHER; note = 2'-O-methylcytidine-3'-phosphate
  modified_base 15: mod_base = OTHER; note = adenosine-3'-phosphate
  modified_base 16: mod_base = OTHER; note = 2'-O-methyluridine-3'-phosphate
  modified_base 17: mod_base = OTHER; note = 2'-O-methylcytidine-3'-phosphate
  modified_base 18: mod_base = OTHER; note = guanosine-3'-phosphate
  modified_base 19: mod_base = OTHER; note = 2'-O-methyluridine-3'-phosphate
  modified_base 20: mod_base = OTHER; note = 2'-deoxythymidine-3'-phosphorothioate
  misc_feature 1..19: note = RNA
  misc_feature 20..21: note = DNA
acaactggagggacatcgttt

SEQ ID NO: 773 - RNA, 19 nt, synthetic construct
  source 1..19: mol_type = other RNA
acaactggagggacatcgt

SEQ ID NO: 774 - DNA, 21 bp, synthetic construct
  source 1..21: mol_type = other DNA
  modified_base 1: mod_base = OTHER; note = uridine-3'-phosphate
  modified_base 2: mod_base = OTHER; note = cytidine-3'-phosphate
  modified_base 3: mod_base = OTHER; note = cytidine-3'-phosphate
  modified_base 4: mod_base = OTHER; note = 2'-O-methyluridine-3'-phosphate
  modified_base 5: mod_base = OTHER; note = adenosine-3'-phosphate
  modified_base 6: mod_base = OTHER; note = guanosine-3'-phosphate
  modified_base 7: mod_base = OTHER; note = guanosine-3'-phosphate
  modified_base 8: mod_base = OTHER; note = adenosine-3'-phosphate
  modified_base 9: mod_base = OTHER; note = 2'-O-methylcytidine-3'-phosphate
  modified_base 10: mod_base = OTHER; note = adenosine-3'-phosphate
  modified_base 11: mod_base = OTHER; note = cytidine-3'-phosphate
  modified_base 12: mod_base = OTHER; note = cytidine-3'-phosphate
  modified_base 13: mod_base = OTHER; note = 2'-O-methylcytidine-3'-phosphate
  modified_base 14: mod_base = OTHER; note = adenosine-3'-phosphate
  modified_base 15: mod_base = OTHER; note = uridine-3'-phosphate
  modified_base 16: mod_base = OTHER; note = uridine-3'-phosphate
  modified_base 17: mod_base = OTHER; note = guanosine-3'-phosphate
  modified_base 18: mod_base = OTHER; note = adenosine-3'-phosphate
  modified_base 19: mod_base = OTHER; note = adenosine-3'-phosphate
  modified_base 20: mod_base = OTHER; note = 2'-deoxythymidine-3'-phosphorothioate
  misc_feature 1..19: note = RNA
  misc_feature 20..21: note = DNA
tcctaggacacccattgaatt

SEQ ID NO: 775 - RNA, 19 nt, synthetic construct
  source 1..19: mol_type = other RNA
tcctaggacacccattgaa

SEQ ID NO: 776 - DNA, 21 bp, synthetic construct
  source 1..21: mol_type = other DNA
  modified_base 1: mod_base = OTHER; note = adenosine-3'-phosphate
  modified_base 2: mod_base = OTHER; note = cytidine-3'-phosphate
  modified_base 3: mod_base = OTHER; note = guanosine-3'-phosphate
  modified_base 4: mod_base = OTHER; note = adenosine-3'-phosphate
  modified_base 5: mod_base = OTHER; note = uridine-3'-phosphate
  modified_base 6: mod_base = OTHER; note = guanosine-3'-phosphate
  modified_base 7: mod_base = OTHER; note = uridine-3'-phosphate
  modified_base 8: mod_base = OTHER; note = cytidine-3'-phosphate
  modified_base 9: mod_base = OTHER; note = cytidine-3'-phosphate
  modified_base 10: mod_base = OTHER; note = cytidine-3'-phosphate
  modified_base 11: mod_base = OTHER; note = uridine-3'-phosphate
  modified_base 12: mod_base = OTHER; note = cytidine-3'-phosphate
  modified_base 13: mod_base = OTHER; note = 2'-O-methylcytidine-3'-phosphate
  modified_base 14: mod_base = OTHER; note = adenosine-3'-phosphate
  modified_base 15: mod_base = OTHER; note = guanosine-3'-phosphate
  modified_base 16: mod_base = OTHER; note = uridine-3'-phosphate
  modified_base 17: mod_base = OTHER; note = uridine-3'-phosphate
  modified_base 18: mod_base = OTHER; note = guanosine-3'-phosphate
  modified_base 19: mod_base = OTHER; note = uridine-3'-phosphate
  modified_base 20: mod_base = OTHER; note = 2'-deoxythymidine-3'-phosphorothioate
  misc_feature 1..19: note = RNA
  misc_feature 20..21: note = DNA
acgatgtccctccagttgttt

SEQ ID NO: 777 - RNA, 19 nt, synthetic construct
  source 1..19: mol_type = other RNA
acgatgtccctccagttgt

SEQ ID NO: 778 - RNA, 21 nt, synthetic construct
  source 1..21: mol_type = other RNA
  modified_base 1: mod_base = OTHER; note = 2'-deoxy-2'-fluorouridine-3'-phosphorothioate
  modified_base 2: mod_base = OTHER; note = 2'-O-methylcytidine-3'-phosphorothioate
  modified_base 3: mod_base = OTHER; note = 2'-deoxy-2'-fluorocytidine-3'-phosphate
  modified_base 4: mod_base = OTHER; note = 2'-O-methyluridine-3'-phosphate
  modified_base 5: mod_base = OTHER; note = 2'-deoxy-2'-fluoroadenosine-3'-phosphate
  modified_base 6: mod_base = OTHER; note = 2'-O-methylguanosine-3'-phosphate
  modified_base 7: mod_base = OTHER; note = 2'-deoxy-2'-fluoroguanosine-3'-phosphate
  modified_base 8: mod_base = OTHER; note = 2'-O-methyladenosine-3'-phosphate
  modified_base 9: mod_base = OTHER; note = 2'-deoxy-2'-fluoroadenosine-3'-phosphate
  modified_base 10: mod_base = OTHER; note = 2'-deoxy-2'-fluorocytidine-3'-phosphate
  modified_base 11: mod_base = OTHER; note = 2'-deoxy-2'-fluorocytidine-3'-phosphate
  modified_base 12: mod_base = OTHER; note = 2'-O-methyluridine-3'-phosphate
  modified_base 13: mod_base = OTHER; note = 2'-deoxy-2'-fluorouridine-3'-phosphate
  modified_base 14: mod_base = OTHER; note = 2'-O-methyluridine-3'-phosphate
  modified_base 15: mod_base = OTHER; note = 2'-deoxy-2'-fluorouridine-3'-phosphate
  modified_base 16: mod_base = OTHER; note = 2'-O-methyladenosine-3'-phosphate
  modified_base 17: mod_base = OTHER; note = 2'-deoxy-2'-fluoroguanosine-3'-phosphate
  modified_base 18: mod_base = OTHER; note = 2'-O-methyladenosine-3'-phosphate
  modified_base 19: mod_base = OTHER; note = 2'-deoxy-2'-fluoroadenosine-3'-phosphate
  modified_base 20: mod_base = OTHER; note = 2'-O-methyladenosine-3'-phosphate
  modified_base 21: mod_base = OTHER; note = 2'-deoxy-2'-fluorouridine-3'-phosphate 0
tcctaggaaccttttagaaat

SEQ ID NO: 779 - RNA, 21 nt, synthetic construct
  source 1..21: mol_type = other RNA
  modified_base 1: mod_base = OTHER; note = 2'-deoxy-2'-fluoroguanosine-3'-phosphorothioate
  modified_base 2: mod_base = OTHER; note = 2'-O-methyladenosine-3'-phosphorothioate
  modified_base 3: mod_base = OTHER; note = 2'-deoxy-2'-fluorocytidine-3'-phosphate
  modified_base 4: mod_base = OTHER; note = 2'-O-methyluridine-3'-phosphate
  modified_base 5: mod_base = OTHER; note = 2'-deoxy-2'-fluorouridine-3'-phosphate
  modified_base 6: mod_base = OTHER; note = 2'-O-methyluridine-3'-phosphate
  modified_base 7: mod_base = OTHER; note = 2'-deoxy-2'-fluorocytidine-3'-phosphate
  modified_base 8: mod_base = OTHER; note = 2'-O-methyladenosine-3'-phosphate
  modified_base 9: mod_base = OTHER; note = 2'-deoxy-2'-fluorouridine-3'-phosphate
  modified_base 10: mod_base = OTHER; note = 2'-deoxy-2'-fluorocytidine-3'-phosphate
  modified_base 11: mod_base = OTHER; note = 2'-deoxy-2'-fluorocytidine-3'-phosphate
  modified_base 12: mod_base = OTHER; note = 2'-O-methyluridine-3'-phosphate
  modified_base 13: mod_base = OTHER; note = 2'-deoxy-2'-fluoroguanosine-3'-phosphate
  modified_base 14: mod_base = OTHER; note = 2'-O-methylguanosine-3'-phosphate
  modified_base 15: mod_base = OTHER; note = 2'-deoxy-2'-fluoroadenosine-3'-phosphate
  modified_base 16: mod_base = OTHER; note = 2'-O-methyladenosine-3'-phosphate
  modified_base 17: mod_base = OTHER; note = 2'-deoxy-2'-fluoroadenosine-3'-phosphate
  modified_base 18: mod_base = OTHER; note = 2'-O-methyluridine-3'-phosphate
  modified_base 19: mod_base = OTHER; note = 2'-deoxy-2'-fluoroadenosine-3'-phosphate
  modified_base 20: mod_base = OTHER; note = 2'-O-methyluridine-3'-phosphate
  modified_base 21: mod_base = OTHER; note = 2'-deoxy-2'-fluoroadenosine-3'-phosphate 0
gactttcatcctggaaatata

SEQ ID NO: 780 - RNA, 21 nt, synthetic construct
  source 1..21: mol_type = other RNA
  modified_base 1: mod_base = OTHER; note = 2'-deoxy-2'-fluoroguanosine-3'-phosphorothioate
  modified_base 2: mod_base = OTHER; note = 2'-O-methyladenosine-3'-phosphorothioate
  modified_base 3: mod_base = OTHER; note = 2'-deoxy-2'-fluoroadenosine-3'-phosphate
  modified_base 4: mod_base = OTHER; note = 2'-O-methyluridine-3'-phosphate
  modified_base 5: mod_base = OTHER; note = 2'-deoxy-2'-fluoroguanosine-3'-phosphate
  modified_base 6: mod_base = OTHER; note = 2'-O-methyluridine-3'-phosphate
  modified_base 7: mod_base = OTHER; note = 2'-deoxy-2'-fluoroguanosine-3'-phosphate
  modified_base 8: mod_base = OTHER; note = 2'-O-methyladenosine-3'-phosphate
  modified_base 9: mod_base = OTHER; note = 2'-deoxy-2'-fluoroadenosine-3'-phosphate
  modified_base 10: mod_base = OTHER; note = 2'-deoxy-2'-fluoroadenosine-3'-phosphate
  modified_base 11: mod_base = OTHER; note = 2'-deoxy-2'-fluoroguanosine-3'-phosphate
  modified_base 12: mod_base = OTHER; note = 2'-O-methyluridine-3'-phosphate
  modified_base 13: mod_base = OTHER; note = 2'-deoxy-2'-fluorocytidine-3'-phosphate
  modified_base 14: mod_base = OTHER; note = 2'-O-methyladenosine-3'-phosphate
  modified_base 15: mod_base = OTHER; note = 2'-deoxy-2'-fluorouridine-3'-phosphate
  modified_base 16: mod_base = OTHER; note = 2'-O-methylcytidine-3'-phosphate
  modified_base 17: mod_base = OTHER; note = 2'-deoxy-2'-fluoroguanosine-3'-phosphate
  modified_base 18: mod_base = OTHER; note = 2'-O-methyladenosine-3'-phosphate
  modified_base 19: mod_base = OTHER; note = 2'-deoxy-2'-fluorocytidine-3'-phosphate
  modified_base 20: mod_base = OTHER; note = 2'-O-methyladenosine-3'-phosphate
  modified_base 21: mod_base = OTHER; note = 2'-deoxy-2'-fluoroadenosine-3'-phosphate 0
gaatgtgaaagtcatcgacaa

SEQ ID NO: 781 - RNA, 21 nt, synthetic construct
  source 1..21: mol_type = other RNA
  modified_base 1: mod_base = OTHER; note = 2'-deoxy-2'-fluorocytidine-3'-phosphorothioate
  modified_base 2: mod_base = OTHER; note = 2'-O-methyladenosine-3'-phosphorothioate
  modified_base 3: mod_base = OTHER; note = 2'-deoxy-2'-fluorouridine-3'-phosphate
  modified_base 4: mod_base = OTHER; note = 2'-O-methyluridine-3'-phosphate
  modified_base 5: mod_base = OTHER; note = 2'-deoxy-2'-fluoroguanosine-3'-phosphate
  modified_base 6: mod_base = OTHER; note = 2'-O-methylguanosine-3'-phosphate
  modified_base 7: mod_base = OTHER; note = 2'-deoxy-2'-fluorouridine-3'-phosphate
  modified_base 8: mod_base = OTHER; note = 2'-O-methylguanosine-3'-phosphate
  modified_base 9: mod_base = OTHER; note = 2'-deoxy-2'-fluoroadenosine-3'-phosphate
  modified_base 10: mod_base = OTHER; note = 2'-deoxy-2'-fluoroguanosine-3'-phosphate
  modified_base 11: mod_base = OTHER; note = 2'-deoxy-2'-fluoroguanosine-3'-phosphate
  modified_base 12: mod_base = OTHER; note = 2'-O-methyladenosine-3'-phosphate
  modified_base 13: mod_base = OTHER; note = 2'-deoxy-2'-fluoroadenosine-3'-phosphate
  modified_base 14: mod_base = OTHER; note = 2'-O-methyladenosine-3'-phosphate
  modified_base 15: mod_base = OTHER; note = 2'-deoxy-2'-fluoroadenosine-3'-phosphate
  modified_base 16: mod_base = OTHER; note = 2'-O-methyladenosine-3'-phosphate
  modified_base 17: mod_base = OTHER; note = 2'-deoxy-2'-fluorouridine-3'-phosphate
  modified_base 18: mod_base = OTHER; note = 2'-O-methylcytidine-3'-phosphate
  modified_base 19: mod_base = OTHER; note = 2'-deoxy-2'-fluorocytidine-3'-phosphate
  modified_base 20: mod_base = OTHER; note = 2'-O-methyluridine-3'-phosphate
  modified_base 21: mod_base = OTHER; note = 2'-deoxy-2'-fluorouridine-3'-phosphate 0
cattggtgaggaaaaatcctt

SEQ ID NO: 782 - RNA, 21 nt, synthetic construct
  source 1..21: mol_type = other RNA
  modified_base 1: mod_base = OTHER; note = 2'-deoxy-2'-fluoroadenosine-3'-phosphorothioate
  modified_base 2: mod_base = OTHER; note = 2'-O-methyluridine-3'-phosphorothioate
  modified_base 3: mod_base = OTHER; note = 2'-deoxy-2'-fluorocytidine-3'-phosphate
  modified_base 4: mod_base = OTHER; note = 2'-O-methylguanosine-3'-phosphate
  modified_base 5: mod_base = OTHER; note = 2'-deoxy-2'-fluoroadenosine-3'-phosphate
  modified_base 6: mod_base = OTHER; note = 2'-O-methylcytidine-3'-phosphate
  modified_base 7: mod_base = OTHER; note = 2'-deoxy-2'-fluoroadenosine-3'-phosphate
  modified_base 8: mod_base = OTHER; note = 2'-O-methyladenosine-3'-phosphate
  modified_base 9: mod_base = OTHER; note = 2'-deoxy-2'-fluoroguanosine-3'-phosphate
  modified_base 10: mod_base = OTHER; note = 2'-deoxy-2'-fluoroadenosine-3'-phosphate
  modified_base 11: mod_base = OTHER; note = 2'-deoxy-2'-fluorocytidine-3'-phosphate
  modified_base 12: mod_base = OTHER; note = 2'-O-methyladenosine-3'-phosphate
  modified_base 13: mod_base = OTHER; note = 2'-deoxy-2'-fluorouridine-3'-phosphate
  modified_base 14: mod_base = OTHER; note = 2'-O-methyluridine-3'-phosphate
  modified_base 15: mod_base = OTHER; note = 2'-deoxy-2'-fluoroguanosine-3'-phosphate
  modified_base 16: mod_base = OTHER; note = 2'-O-methylguanosine-3'-phosphate
  modified_base 17: mod_base = OTHER; note = 2'-deoxy-2'-fluorouridine-3'-phosphate
  modified_base 18: mod_base = OTHER; note = 2'-O-methylguanosine-3'-phosphate
  modified_base 19: mod_base = OTHER; note = 2'-deoxy-2'-fluoroadenosine-3'-phosphate
  modified_base 20: mod_base = OTHER; note = 2'-O-methylguanosine-3'-phosphate
  modified_base 21: mod_base = OTHER; note = 2'-deoxy-2'-fluoroadenosine-3'-phosphate 0
atcgacaagacattggtgaga

SEQ ID NO: 783 - RNA, 21 nt, synthetic construct
  source 1..21: mol_type = other RNA
  modified_base 1: mod_base = OTHER; note = 2'-deoxy-2'-fluoroadenosine-3'-phosphorothioate
  modified_base 2: mod_base = OTHER; note = 2'-O-methylcytidine-3'-phosphorothioate
  modified_base 3: mod_base = OTHER; note = 2'-deoxy-2'-fluoroadenosine-3'-phosphate
  modified_base 4: mod_base = OTHER; note = 2'-O-methyluridine-3'-phosphate
  modified_base 5: mod_base = OTHER; note = 2'-deoxy-2'-fluorouridine-3'-phosphate
  modified_base 6: mod_base = OTHER; note = 2'-O-methylguanosine-3'-phosphate
  modified_base 7: mod_base = OTHER; note = 2'-deoxy-2'-fluoroguanosine-3'-phosphate
  modified_base 8: mod_base = OTHER; note = 2'-O-methyluridine-3'-phosphate
  modified_base 9: mod_base = OTHER; note = 2'-deoxy-2'-fluoroguanosine-3'-phosphate
  modified_base 10: mod_base = OTHER; note = 2'-deoxy-2'-fluoroadenosine-3'-phosphate
  modified_base 11: mod_base = OTHER; note = 2'-deoxy-2'-fluoroguanosine-3'-phosphate
  modified_base 12: mod_base = OTHER; note = 2'-O-methylguanosine-3'-phosphate
  modified_base 13: mod_base = OTHER; note = 2'-deoxy-2'-fluoroadenosine-3'-phosphate
  modified_base 14: mod_base = OTHER; note = 2'-O-methyladenosine-3'-phosphate
  modified_base 15: mod_base = OTHER; note = 2'-deoxy-2'-fluoroadenosine-3'-phosphate
  modified_base 16: mod_base = OTHER; note = 2'-O-methyladenosine-3'-phosphate
  modified_base 17: mod_base = OTHER; note = 2'-deoxy-2'-fluoroadenosine-3'-phosphate
  modified_base 18: mod_base = OTHER; note = 2'-O-methyluridine-3'-phosphate
  modified_base 19: mod_base = OTHER; note = 2'-deoxy-2'-fluorocytidine-3'-phosphate
  modified_base 20: mod_base = OTHER; note = 2'-O-methylcytidine-3'-phosphate
  modified_base 21: mod_base = OTHER; note = 2'-deoxy-2'-fluorouridine-3'-phosphate 0
acattggtgaggaaaaatcct

SEQ ID NO: 784 - RNA, 21 nt, synthetic construct
  source 1..21: mol_type = other RNA
  modified_base 1: mod_base = OTHER; note = 2'-deoxy-2'-fluoroguanosine-3'-phosphorothioate
  modified_base 2: mod_base = OTHER; note = 2'-O-methyladenosine-3'-phosphorothioate
  modified_base 3: mod_base = OTHER; note = 2'-deoxy-2'-fluoroadenosine-3'-phosphate
  modified_base 4: mod_base = OTHER; note = 2'-O-methyladenosine-3'-phosphate
  modified_base 5: mod_base = OTHER; note = 2'-deoxy-2'-fluoroguanosine-3'-phosphate
  modified_base 6: mod_base = OTHER; note = 2'-O-methyluridine-3'-phosphate
  modified_base 7: mod_base = OTHER; note = 2'-deoxy-2'-fluorocytidine-3'-phosphate
  modified_base 8: mod_base = OTHER; note = 2'-O-methyladenosine-3'-phosphate
  modified_base 9: mod_base = OTHER; note = 2'-deoxy-2'-fluorouridine-3'-phosphate
  modified_base 10: mod_base = OTHER; note = 2'-deoxy-2'-fluorocytidine-3'-phosphate
  modified_base 11: mod_base = OTHER; note = 2'-deoxy-2'-fluoroguanosine-3'-phosphate
  modified_base 12: mod_base = OTHER; note = 2'-O-methyladenosine-3'-phosphate
  modified_base 13: mod_base = OTHER; note = 2'-deoxy-2'-fluorocytidine-3'-phosphate
  modified_base 14: mod_base = OTHER; note = 2'-O-methyladenosine-3'-phosphate
  modified_base 15: mod_base = OTHER; note = 2'-deoxy-2'-fluoroadenosine-3'-phosphate
  modified_base 16: mod_base = OTHER; note = 2'-O-methylguanosine-3'-phosphate
  modified_base 17: mod_base = OTHER; note = 2'-deoxy-2'-fluoroadenosine-3'-phosphate
  modified_base 18: mod_base = OTHER; note = 2'-O-methylcytidine-3'-phosphate
  modified_base 19: mod_base = OTHER; note = 2'-deoxy-2'-fluoroadenosine-3'-phosphate
  modified_base 20: mod_base = OTHER; note = 2'-O-methyluridine-3'-phosphate
  modified_base 21: mod_base = OTHER; note = 2'-deoxy-2'-fluorouridine-3'-phosphate 0
gaaagtcatcgacaagacatt

SEQ ID NO: 785 - RNA, 21 nt, synthetic construct
  source 1..21: mol_type = other RNA
  modified_base 1: mod_base = OTHER; note = 2'-deoxy-2'-fluoroadenosine-3'-phosphorothioate
  modified_base 2: mod_base = OTHER; note = 2'-O-methyladenosine-3'-phosphorothioate
  modified_base 3: mod_base = OTHER; note = 2'-deoxy-2'-fluoroadenosine-3'-phosphate
  modified_base 4: mod_base = OTHER; note = 2'-O-methylguanosine-3'-phosphate
  modified_base 5: mod_base = OTHER; note = 2'-deoxy-2'-fluorouridine-3'-phosphate
  modified_base 6: mod_base = OTHER; note = 2'-O-methylcytidine-3'-phosphate
  modified_base 7: mod_base = OTHER; note = 2'-deoxy-2'-fluoroadenosine-3'-phosphate
  modified_base 8: mod_base = OTHER; note = 2'-O-methyluridine-3'-phosphate
  modified_base 9: mod_base = OTHER; note = 2'-deoxy-2'-fluorocytidine-3'-phosphate
  modified_base 10: mod_base = OTHER; note = 2'-deoxy-2'-fluoroguanosine-3'-phosphate
  modified_base 11: mod_base = OTHER; note = 2'-deoxy-2'-fluoroadenosine-3'-phosphate
  modified_base 12: mod_base = OTHER; note = 2'-O-methylcytidine-3'-phosphate
  modified_base 13: mod_base = OTHER; note = 2'-deoxy-2'-fluoroadenosine-3'-phosphate
  modified_base 14: mod_base = OTHER; note = 2'-O-methyladenosine-3'-phosphate
  modified_base 15: mod_base = OTHER; note = 2'-deoxy-2'-fluoroguanosine-3'-phosphate
  modified_base 16: mod_base = OTHER; note = 2'-O-methyladenosine-3'-phosphate
  modified_base 17: mod_base = OTHER; note = 2'-deoxy-2'-fluorocytidine-3'-phosphate
  modified_base 18: mod_base = OTHER; note = 2'-O-methyladenosine-3'-phosphate
  modified_base 19: mod_base = OTHER; note = 2'-deoxy-2'-fluorouridine-3'-phosphate
  modified_base 20: mod_base = OTHER; note = 2'-O-methyluridine-3'-phosphate
  modified_base 21: mod_base = OTHER; note = 2'-deoxy-2'-fluoroadenosine-3'-phosphate 0
aaagtcatcgacaagacatta

SEQ ID NO: 786 - RNA, 23 nt, synthetic construct
  source 1..23: mol_type = other RNA
  modified_base 1: mod_base = OTHER; note = 2'-O-methyladenosine-3'-phosphorothioate
  modified_base 2: mod_base = OTHER; note = 2'-deoxy-2'-fluorouridine-3'-phosphorothioate
  modified_base 3: mod_base = OTHER; note = 2'-O-methyluridine-3'-phosphate
  modified_base 4: mod_base = OTHER; note = 2'-deoxy-2'-fluorouridine-3'-phosphate
  modified_base 5: mod_base = OTHER; note = 2'-O-methylcytidine-3'-phosphate
  modified_base 6: mod_base = OTHER; note = 2'-deoxy-2'-fluorouridine-3'-phosphate
  modified_base 7: mod_base = OTHER; note = 2'-O-methyladenosine-3'-phosphate
  modified_base 8: mod_base = OTHER; note = 2'-deoxy-2'-fluoroadenosine-3'-phosphate
  modified_base 9: mod_base = OTHER; note = 2'-O-methyladenosine-3'-phosphate
  modified_base 10: mod_base = OTHER; note = 2'-deoxy-2'-fluoroadenosine-3'-phosphate
  modified_base 11: mod_base = OTHER; note = 2'-O-methylguanosine-3'-phosphate
  modified_base 12: mod_base = OTHER; note = 2'-O-methylguanosine-3'-phosphate
  modified_base 13: mod_base = OTHER; note = 2'-O-methyluridine-3'-phosphate
  modified_base 14: mod_base = OTHER; note = 2'-deoxy-2'-fluorouridine-3'-phosphate
  modified_base 15: mod_base = OTHER; note = 2'-O-methylcytidine-3'-phosphate
  modified_base 16: mod_base = OTHER; note = 2'-deoxy-2'-fluorocytidine-3'-phosphate
  modified_base 17: mod_base = OTHER; note = 2'-O-methyluridine-3'-phosphate
  modified_base 18: mod_base = OTHER; note = 2'-deoxy-2'-fluoroadenosine-3'-phosphate
  modified_base 19: mod_base = OTHER; note = 2'-O-methylguanosine-3'-phosphate
  modified_base 20: mod_base = OTHER; note = 2'-deoxy-2'-fluoroguanosine-3'-phosphate
  modified_base 21: mod_base = OTHER; note = 2'-O-methyladenosine-3'-phosphorothioate
  modified_base 22: mod_base = OTHER; note = 2'-O-methylcytidine-3'-phosphorothioate
  modified_base 23: mod_base = OTHER; note = 2'-O-methyladenosine-3'-phosphate
atttctaaaaggttcctaggaca

SEQ ID NO: 787 - RNA, 23 nt, synthetic construct
  source 1..23: mol_type = other RNA
  modified_base 1: mod_base = OTHER; note = 2'-O-methyluridine-3'-phosphorothioate
  modified_base 2: mod_base = OTHER; note = 2'-deoxy-2'-fluoroadenosine-3'-phosphorothioate
  modified_base 3: mod_base = OTHER; note = 2'-O-methyluridine-3'-phosphate
  modified_base 4: mod_base = OTHER; note = 2'-deoxy-2'-fluoroadenosine-3'-phosphate
  modified_base 5: mod_base = OTHER; note = 2'-O-methyluridine-3'-phosphate
  modified_base 6: mod_base = OTHER; note = 2'-deoxy-2'-fluorouridine-3'-phosphate
  modified_base 7: mod_base = OTHER; note = 2'-O-methyluridine-3'-phosphate
  modified_base 8: mod_base = OTHER; note = 2'-deoxy-2'-fluorocytidine-3'-phosphate
  modified_base 9: mod_base = OTHER; note = 2'-O-methylcytidine-3'-phosphate
  modified_base 10: mod_base = OTHER; note = 2'-deoxy-2'-fluoroadenosine-3'-phosphate
  modified_base 11: mod_base = OTHER; note = 2'-O-methylguanosine-3'-phosphate
  modified_base 12: mod_base = OTHER; note = 2'-O-methylguanosine-3'-phosphate
  modified_base 13: mod_base = OTHER; note = 2'-O-methyladenosine-3'-phosphate
  modified_base 14: mod_base = OTHER; note = 2'-deoxy-2'-fluorouridine-3'-phosphate
  modified_base 15: mod_base = OTHER; note = 2'-O-methylguanosine-3'-phosphate
  modified_base 16: mod_base = OTHER; note = 2'-deoxy-2'-fluoroadenosine-3'-phosphate
  modified_base 17: mod_base = OTHER; note = 2'-O-methyladenosine-3'-phosphate
  modified_base 18: mod_base = OTHER; note = 2'-deoxy-2'-fluoroadenosine-3'-phosphate
  modified_base 19: mod_base = OTHER; note = 2'-O-methylguanosine-3'-phosphate
  modified_base 20: mod_base = OTHER; note = 2'-deoxy-2'-fluorouridine-3'-phosphate
  modified_base 21: mod_base = OTHER; note = 2'-O-methylcytidine-3'-phosphorothioate
  modified_base 22: mod_base = OTHER; note = 2'-O-methylcytidine-3'-phosphorothioate
  modified_base 23: mod_base = OTHER; note = 2'-O-methyladenosine-3'-phosphate
tatatttccaggatgaaagtcca

SEQ ID NO: 788 - RNA, 23 nt, synthetic construct
  source 1..23: mol_type = other RNA
  modified_base 1: mod_base = OTHER; note = 2'-O-methyluridine-3'-phosphorothioate
  modified_base 2: mod_base = OTHER; note = 2'-deoxy-2'-fluorouridine-3'-phosphorothioate
  modified_base 3: mod_base = OTHER; note = 2'-O-methylguanosine-3'-phosphate
  modified_base 4: mod_base = OTHER; note = 2'-deoxy-2'-fluorouridine-3'-phosphate
  modified_base 5: mod_base = OTHER; note = 2'-O-methylcytidine-3'-phosphate
  modified_base 6: mod_base = OTHER; note = 2'-deoxy-2'-fluoroguanosine-3'-phosphate
  modified_base 7: mod_base = OTHER; note = 2'-O-methyladenosine-3'-phosphate
  modified_base 8: mod_base = OTHER; note = 2'-deoxy-2'-fluorouridine-3'-phosphate
  modified_base 9: mod_base = OTHER; note = 2'-O-methylguanosine-3'-phosphate
  modified_base 10: mod_base = OTHER; note = 2'-deoxy-2'-fluoroadenosine-3'-phosphate
  modified_base 11: mod_base = OTHER; note = 2'-O-methylcytidine-3'-phosphate
  modified_base 12: mod_base = OTHER; note = 2'-O-methyluridine-3'-phosphate
  modified_base 13: mod_base = OTHER; note = 2'-O-methyluridine-3'-phosphate
  modified_base 14: mod_base = OTHER; note = 2'-deoxy-2'-fluorouridine-3'-phosphate
  modified_base 15: mod_base = OTHER; note = 2'-O-methylcytidine-3'-phosphate
  modified_base 16: mod_base = OTHER; note = 2'-deoxy-2'-fluoroadenosine-3'-phosphate
  modified_base 17: mod_base = OTHER; note = 2'-O-methylcytidine-3'-phosphate
  modified_base 18: mod_base = OTHER; note = 2'-deoxy-2'-fluoroadenosine-3'-phosphate
  modified_base 19: mod_base = OTHER; note = 2'-O-methyluridine-3'-phosphate
  modified_base 20: mod_base = OTHER; note = 2'-deoxy-2'-fluorouridine-3'-phosphate
  modified_base 21: mod_base = OTHER; note = 2'-O-methylcytidine-3'-phosphorothioate
  modified_base 22: mod_base = OTHER; note = 2'-O-methyluridine-3'-phosphorothioate
  modified_base 23: mod_base = OTHER; note = 2'-O-methylguanosine-3'-phosphate
ttgtcgatgactttcacattctg

SEQ ID NO: 789 - RNA, 23 nt, synthetic construct
  source 1..23: mol_type = other RNA
  modified_base 1: mod_base = OTHER; note = 2'-O-methyladenosine-3'-phosphorothioate
  modified_base 2: mod_base = OTHER; note = 2'-deoxy-2'-fluoroadenosine-3'-phosphorothioate
  modified_base 3: mod_base = OTHER; note = 2'-O-methylguanosine-3'-phosphate
  modified_base 4: mod_base = OTHER; note = 2'-deoxy-2'-fluoroguanosine-3'-phosphate
  modified_base 5: mod_base = OTHER; note = 2'-O-methyladenosine-3'-phosphate
  modified_base 6: mod_base = OTHER; note = 2'-deoxy-2'-fluorouridine-3'-phosphate
  modified_base 7: mod_base = OTHER; note = 2'-O-methyluridine-3'-phosphate
  modified_base 8: mod_base = OTHER; note = 2'-deoxy-2'-fluorouridine-3'-phosphate
  modified_base 9: mod_base = OTHER; note = 2'-O-methyluridine-3'-phosphate
  modified_base 10: mod_base = OTHER; note = 2'-deoxy-2'-fluorouridine-3'-phosphate
  modified_base 11: mod_base = OTHER; note = 2'-O-methylcytidine-3'-phosphate
  modified_base 12: mod_base = OTHER; note = 2'-O-methylcytidine-3'-phosphate
  modified_base 13: mod_base = OTHER; note = 2'-O-methyluridine-3'-phosphate
  modified_base 14: mod_base = OTHER; note = 2'-deoxy-2'-fluorocytidine-3'-phosphate
  modified_base 15: mod_base = OTHER; note = 2'-O-methyladenosine-3'-phosphate
  modified_base 16: mod_base = OTHER; note = 2'-deoxy-2'-fluorocytidine-3'-phosphate
  modified_base 17: mod_base = OTHER; note = 2'-O-methylcytidine-3'-phosphate
  modified_base 18: mod_base = OTHER; note = 2'-deoxy-2'-fluoroadenosine-3'-phosphate
  modified_base 19: mod_base = OTHER; note = 2'-O-methyladenosine-3'-phosphate
  modified_base 20: mod_base = OTHER; note = 2'-deoxy-2'-fluorouridine-3'-phosphate
  modified_base 21: mod_base = OTHER; note = 2'-O-methylguanosine-3'-phosphorothioate
  modified_base 22: mod_base = OTHER; note = 2'-O-methyluridine-3'-phosphorothioate
  modified_base 23: mod_base = OTHER; note = 2'-O-methylcytidine-3'-phosphate
aaggatttttcctcaccaatgtc

SEQ ID NO: 790 - RNA, 23 nt, synthetic construct
  source 1..23: mol_type = other RNA
  modified_base 1: mod_base = OTHER; note = 2'-O-methyluridine-3'-phosphorothioate
  modified_base 2: mod_base = OTHER; note = 2'-deoxy-2'-fluorocytidine-3'-phosphorothioate
  modified_base 3: mod_base = OTHER; note = 2'-O-methyluridine-3'-phosphate
  modified_base 4: mod_base = OTHER; note = 2'-deoxy-2'-fluorocytidine-3'-phosphate
  modified_base 5: mod_base = OTHER; note = 2'-O-methyladenosine-3'-phosphate
  modified_base 6: mod_base = OTHER; note = 2'-deoxy-2'-fluorocytidine-3'-phosphate
  modified_base 7: mod_base = OTHER; note = 2'-O-methylcytidine-3'-phosphate
  modified_base 8: mod_base = OTHER; note = 2'-deoxy-2'-fluoroadenosine-3'-phosphate
  modified_base 9: mod_base = OTHER; note = 2'-O-methyladenosine-3'-phosphate
  modified_base 10: mod_base = OTHER; note = 2'-deoxy-2'-fluorouridine-3'-phosphate
  modified_base 11: mod_base = OTHER; note = 2'-O-methylguanosine-3'-phosphate
  modified_base 12: mod_base = OTHER; note = 2'-O-methyluridine-3'-phosphate
  modified_base 13: mod_base = OTHER; note = 2'-O-methylcytidine-3'-phosphate
  modified_base 14: mod_base = OTHER; note = 2'-deoxy-2'-fluorouridine-3'-phosphate
  modified_base 15: mod_base = OTHER; note = 2'-O-methyluridine-3'-phosphate
  modified_base 16: mod_base = OTHER; note = 2'-deoxy-2'-fluoroguanosine-3'-phosphate
  modified_base 17: mod_base = OTHER; note = 2'-O-methyluridine-3'-phosphate
  modified_base 18: mod_base = OTHER; note = 2'-deoxy-2'-fluorocytidine-3'-phosphate
  modified_base 19: mod_base = OTHER; note = 2'-O-methylguanosine-3'-phosphate
  modified_base 20: mod_base = OTHER; note = 2'-deoxy-2'-fluoroadenosine-3'-phosphate
  modified_base 21: mod_base = OTHER; note = 2'-O-methyluridine-3'-phosphorothioate
  modified_base 22: mod_base = OTHER; note = 2'-O-methylguanosine-3'-phosphorothioate
  modified_base 23: mod_base = OTHER; note = 2'-O-methyladenosine-3'-phosphate
tctcaccaatgtcttgtcgatga

SEQ ID NO: 791 - RNA, 23 nt, synthetic construct
  source 1..23: mol_type = other RNA
  modified_base 1: mod_base = OTHER; note = 2'-O-methyladenosine-3'-phosphorothioate
  modified_base 2: mod_base = OTHER; note = 2'-deoxy-2'-fluoroguanosine-3'-phosphorothioate
  modified_base 3: mod_base = OTHER; note = 2'-O-methylguanosine-3'-phosphate
  modified_base 4: mod_base = OTHER; note = 2'-deoxy-2'-fluoroadenosine-3'-phosphate
  modified_base 5: mod_base = OTHER; note = 2'-O-methyluridine-3'-phosphate
  modified_base 6: mod_base = OTHER; note = 2'-deoxy-2'-fluorouridine-3'-phosphate
  modified_base 7: mod_base = OTHER; note = 2'-O-methyluridine-3'-phosphate
  modified_base 8: mod_base = OTHER; note = 2'-deoxy-2'-fluorouridine-3'-phosphate
  modified_base 9: mod_base = OTHER; note = 2'-O-methyluridine-3'-phosphate
  modified_base 10: mod_base = OTHER; note = 2'-deoxy-2'-fluorocytidine-3'-phosphate
  modified_base 11: mod_base = OTHER; note = 2'-O-methylcytidine-3'-phosphate
  modified_base 12: mod_base = OTHER; note = 2'-O-methyluridine-3'-phosphate
  modified_base 13: mod_base = OTHER; note = 2'-O-methylcytidine-3'-phosphate
  modified_base 14: mod_base = OTHER; note = 2'-deoxy-2'-fluoroadenosine-3'-phosphate
  modified_base 15: mod_base = OTHER; note = 2'-O-methylcytidine-3'-phosphate
  modified_base 16: mod_base = OTHER; note = 2'-deoxy-2'-fluorocytidine-3'-phosphate
  modified_base 17: mod_base = OTHER; note = 2'-O-methyladenosine-3'-phosphate
  modified_base 18: mod_base = OTHER; note = 2'-deoxy-2'-fluoroadenosine-3'-phosphate
  modified_base 19: mod_base = OTHER; note = 2'-O-methyluridine-3'-phosphate
  modified_base 20: mod_base = OTHER; note = 2'-deoxy-2'-fluoroguanosine-3'-phosphate
  modified_base 21: mod_base = OTHER; note = 2'-O-methyluridine-3'-phosphorothioate
  modified_base 22: mod_base = OTHER; note = 2'-O-methylcytidine-3'-phosphorothioate
  modified_base 23: mod_base = OTHER; note = 2'-O-methyluridine-3'-phosphate
aggatttttcctcaccaatgtct

SEQ ID NO: 792 - RNA, 23 nt, synthetic construct
  source 1..23: mol_type = other RNA
  modified_base 1: mod_base = OTHER; note = 2'-O-methyladenosine-3'-phosphorothioate
  modified_base 2: mod_base = OTHER; note = 2'-deoxy-2'-fluoroadenosine-3'-phosphorothioate
  modified_base 3: mod_base = OTHER; note = 2'-O-methyluridine-3'-phosphate
  modified_base 4: mod_base = OTHER; note = 2'-deoxy-2'-fluoroguanosine-3'-phosphate
  modified_base 5: mod_base = OTHER; note = 2'-O-methyluridine-3'-phosphate
  modified_base 6: mod_base = OTHER; note = 2'-deoxy-2'-fluorocytidine-3'-phosphate
  modified_base 7: mod_base = OTHER; note = 2'-O-methyluridine-3'-phosphate
  modified_base 8: mod_base = OTHER; note = 2'-deoxy-2'-fluorouridine-3'-phosphate
  modified_base 9: mod_base = OTHER; note = 2'-O-methylguanosine-3'-phosphate
  modified_base 10: mod_base = OTHER; note = 2'-deoxy-2'-fluorouridine-3'-phosphate
  modified_base 11: mod_base = OTHER; note = 2'-O-methylcytidine-3'-phosphate
  modified_base 12: mod_base = OTHER; note = 2'-O-methylguanosine-3'-phosphate
  modified_base 13: mod_base = OTHER; note = 2'-O-methyladenosine-3'-phosphate
  modified_base 14: mod_base = OTHER; note = 2'-deoxy-2'-fluorouridine-3'-phosphate
  modified_base 15: mod_base = OTHER; note = 2'-O-methylguanosine-3'-phosphate
  modified_base 16: mod_base = OTHER; note = 2'-deoxy-2'-fluoroadenosine-3'-phosphate
  modified_base 17: mod_base = OTHER; note = 2'-O-methylcytidine-3'-phosphate
  modified_base 18: mod_base = OTHER; note = 2'-deoxy-2'-fluorouridine-3'-phosphate
  modified_base 19: mod_base = OTHER; note = 2'-O-methyluridine-3'-phosphate
  modified_base 20: mod_base = OTHER; note = 2'-deoxy-2'-fluorouridine-3'-phosphate
  modified_base 21: mod_base = OTHER; note = 2'-O-methylcytidine-3'-phosphorothioate
  modified_base 22: mod_base = OTHER; note = 2'-O-methyladenosine-3'-phosphorothioate
  modified_base 23: mod_base = OTHER; note = 2'-O-methylcytidine-3'-phosphate
aatgtcttgtcgatgactttcac

SEQ ID NO: 793 - RNA, 23 nt, synthetic construct
  source 1..23: mol_type = other RNA
  modified_base 1: mod_base = OTHER; note = 2'-O-methyluridine-3'-phosphorothioate
  modified_base 2: mod_base = OTHER; note = 2'-deoxy-2'-fluoroadenosine-3'-phosphorothioate
  modified_base 3: mod_base = OTHER; note = 2'-O-methyladenosine-3'-phosphate
  modified_base 4: mod_base = OTHER; note = 2'-deoxy-2'-fluorouridine-3'-phosphate
  modified_base 5: mod_base = OTHER; note = 2'-O-methylguanosine-3'-phosphate
  modified_base 6: mod_base = OTHER; note = 2'-deoxy-2'-fluorouridine-3'-phosphate
  modified_base 7: mod_base = OTHER; note = 2'-O-methylcytidine-3'-phosphate
  modified_base 8: mod_base = OTHER; note = 2'-deoxy-2'-fluorouridine-3'-phosphate
  modified_base 9: mod_base = OTHER; note = 2'-O-methyluridine-3'-phosphate
  modified_base 10: mod_base = OTHER; note = 2'-deoxy-2'-fluoroguanosine-3'-phosphate
  modified_base 11: mod_base = OTHER; note = 2'-O-methyluridine-3'-phosphate
  modified_base 12: mod_base = OTHER; note = 2'-O-methylcytidine-3'-phosphate
  modified_base 13: mod_base = OTHER; note = 2'-O-methylguanosine-3'-phosphate
  modified_base 14: mod_base = OTHER; note = 2'-deoxy-2'-fluoroadenosine-3'-phosphate
  modified_base 15: mod_base = OTHER; note = 2'-O-methyluridine-3'-phosphate
  modified_base 16: mod_base = OTHER; note = 2'-deoxy-2'-fluoroguanosine-3'-phosphate
  modified_base 17: mod_base = OTHER; note = 2'-O-methyladenosine-3'-phosphate
  modified_base 18: mod_base = OTHER; note = 2'-deoxy-2'-fluorocytidine-3'-phosphate
  modified_base 19: mod_base = OTHER; note = 2'-O-methyluridine-3'-phosphate
  modified_base 20: mod_base = OTHER; note = 2'-deoxy-2'-fluorouridine-3'-phosphate
  modified_base 21: mod_base = OTHER; note = 2'-O-methyluridine-3'-phosphorothioate
  modified_base 22: mod_base = OTHER; note = 2'-O-methylcytidine-3'-phosphorothioate
  modified_base 23: mod_base = OTHER; note = 2'-O-methyladenosine-3'-phosphate
taatgtcttgtcgatgactttca

SEQ ID NO: 794 - RNA, 21 nt, synthetic construct
  source 1..21: mol_type = other RNA
atgtatgttacttcttagaga

SEQ ID NO: 795 - RNA, 23 nt, synthetic construct
  source 1..23: mol_type = other RNA
tctctaagaagtaacatacatcc

SEQ ID NO: 796 - RNA, 21 nt, synthetic construct
  source 1..21: mol_type = other RNA
tgtatgttacttcttagagag

SEQ ID NO: 797 - RNA, 23 nt, synthetic construct
  source 1..23: mol_type = other RNA
ctctctaagaagtaacatacatc

SEQ ID NO: 798 - RNA, 21 nt, synthetic construct
  source 1..21: mol_type = other RNA
taggatgtatgttacttctta

SEQ ID NO: 799 - RNA, 23 nt, synthetic construct
  source 1..23: mol_type = other RNA
taagaagtaacatacatcctaaa

SEQ ID NO: 800 - RNA, 21 nt, synthetic construct
  source 1..21: mol_type = other RNA
ttaggatgtatgttacttctt

SEQ ID NO: 801 - RNA, 23 nt, synthetic construct
  source 1..23: mol_type = other RNA
aagaagtaacatacatcctaaaa

SEQ ID NO: 802 - RNA, 21 nt, synthetic construct
  source 1..21: mol_type = other RNA
agaaaggtgttcaagatgtcc

SEQ ID NO: 803 - RNA, 23 nt, synthetic construct
  source 1..23: mol_type = other RNA
ggacatcttgaacacctttctcc

SEQ ID NO: 804 - RNA, 21 nt, synthetic construct
  source 1..21: mol_type = other RNA
gaaaggtgttcaagatgtcct

SEQ ID NO: 805 - RNA, 23 nt, synthetic construct
  source 1..23: mol_type = other RNA
aggacatcttgaacacctttctc

SEQ ID NO: 806 - RNA, 21 nt, synthetic construct
  source 1..21: mol_type = other RNA
ggggagaaaggtgttcaagat

SEQ ID NO: 807 - RNA, 23 nt, synthetic construct
  source 1..23: mol_type = other RNA
atcttgaacacctttctccccct

SEQ ID NO: 808 - RNA, 21 nt, synthetic construct
  source 1..21: mol_type = other RNA
gggggagaaaggtgttcaaga

SEQ ID NO: 809 - RNA, 23 nt, synthetic construct
  source 1..23: mol_type = other RNA
tcttgaacacctttctccccctg

SEQ ID NO: 810 - RNA, 21 nt, synthetic construct
  source 1..21: mol_type = other RNA
agaaactttggctgataatat

SEQ ID NO: 811 - RNA, 23 nt, synthetic construct
  source 1..23: mol_type = other RNA
atattatcagccaaagtttcttc

SEQ ID NO: 812 - RNA, 21 nt, synthetic construct
  source 1..21: mol_type = other RNA
gaaactttggctgataatatt

SEQ ID NO: 813 - RNA, 23 nt, synthetic construct
  source 1..23: mol_type = other RNA
aatattatcagccaaagtttctt

SEQ ID NO: 814 - RNA, 21 nt, synthetic construct
  source 1..21: mol_type = other RNA
atgaagaaactttggctgata

SEQ ID NO: 815 - RNA, 23 nt, synthetic construct
  source 1..23: mol_type = other RNA
tatcagccaaagtttcttcatca

SEQ ID NO: 816 - RNA, 21 nt, synthetic construct
  source 1..21: mol_type = other RNA
gatgaagaaactttggctgat

SEQ ID NO: 817 - RNA, 23 nt, synthetic construct
  source 1..23: mol_type = other RNA
atcagccaaagtttcttcatcat

SEQ ID NO: 818 - RNA, 21 nt, synthetic construct
  source 1..21: mol_type = other RNA
aaggcactgatgttctgaaag

SEQ ID NO: 819 - RNA, 23 nt, synthetic construct
  source 1..23: mol_type = other RNA
ctttcagaacatcagtgcctttc

SEQ ID NO: 820 - RNA, 21 nt, synthetic construct
  source 1..21: mol_type = other RNA
aggcactgatgttctgaaagc

SEQ ID NO: 821 - RNA, 23 nt, synthetic construct
  source 1..23: mol_type = other RNA
gctttcagaacatcagtgccttt

SEQ ID NO: 822 - RNA, 21 nt, synthetic construct
  source 1..21: mol_type = other RNA
cggaaaggcactgatgttctg

SEQ ID NO: 823 - RNA, 23 nt, synthetic construct
  source 1..23: mol_type = other RNA
cagaacatcagtgcctttccgca

SEQ ID NO: 824 - RNA, 21 nt, synthetic construct
  source 1..21: mol_type = other RNA
gcggaaaggcactgatgttct

SEQ ID NO: 825 - RNA, 23 nt, synthetic construct
  source 1..23: mol_type = other RNA
agaacatcagtgcctttccgcac

SEQ ID NO: 826 - RNA, 21 nt, synthetic construct
  source 1..21: mol_type = other RNA
agaagactgacatcattgcca

SEQ ID NO: 827 - RNA, 23 nt, synthetic construct
  source 1..23: mol_type = other RNA
tggcaatgatgtcagtcttctca

SEQ ID NO: 828 - RNA, 21 nt, synthetic construct
  source 1..21: mol_type = other RNA
gaagactgacatcattgccaa

SEQ ID NO: 829 - RNA, 23 nt, synthetic construct
  source 1..23: mol_type = other RNA
ttggcaatgatgtcagtcttctc

SEQ ID NO: 830 - RNA, 21 nt, synthetic construct
  source 1..21: mol_type = other RNA
gctgagaagactgacatcatt

SEQ ID NO: 831 - RNA, 23 nt, synthetic construct
  source 1..23: mol_type = other RNA
aatgatgtcagtcttctcagcca

SEQ ID NO: 832 - RNA, 21 nt, synthetic construct
  source 1..21: mol_type = other RNA
ggctgagaagactgacatcat

SEQ ID NO: 833 - RNA, 23 nt, synthetic construct
  source 1..23: mol_type = other RNA
atgatgtcagtcttctcagccat

SEQ ID NO: 834 - RNA, 21 nt, synthetic construct
  source 1..21: mol_type = other RNA
taatgcctgattcacaacttt

SEQ ID NO: 835 - RNA, 23 nt, synthetic construct
  source 1..23: mol_type = other RNA
aaagttgtgaatcaggcattacc

SEQ ID NO: 836 - RNA, 21 nt, synthetic construct
  source 1..21: mol_type = other RNA
aatgcctgattcacaactttg

SEQ ID NO: 837 - RNA, 23 nt, synthetic construct
  source 1..23: mol_type = other RNA
caaagttgtgaatcaggcattac

SEQ ID NO: 838 - RNA, 21 nt, synthetic construct
  source 1..21: mol_type = other RNA
ttggtaatgcctgattcacaa

SEQ ID NO: 839 - RNA, 23 nt, synthetic construct
  source 1..23: mol_type = other RNA
ttgtgaatcaggcattaccaaca

SEQ ID NO: 840 - RNA, 21 nt, synthetic construct
  source 1..21: mol_type = other RNA
gttggtaatgcctgattcaca

SEQ ID NO: 841 - RNA, 23 nt, synthetic construct
  source 1..23: mol_type = other RNA
tgtgaatcaggcattaccaacac

SEQ ID NO: 842 - RNA, 21 nt, synthetic construct
  source 1..21: mol_type = other RNA
tatcaaatggctgagaagact

SEQ ID NO: 843 - RNA, 23 nt, synthetic construct
  source 1..23: mol_type = other RNA
agtcttctcagccatttgatatc

SEQ ID NO: 844 - RNA, 21 nt, synthetic construct
  source 1..21: mol_type = other RNA
atcaaatggctgagaagactg

SEQ ID NO: 845 - RNA, 23 nt, synthetic construct
  source 1..23: mol_type = other RNA
cagtcttctcagccatttgatat

SEQ ID NO: 846 - RNA, 21 nt, synthetic construct
  source 1..21: mol_type = other RNA
aagatatcaaatggctgagaa

SEQ ID NO: 847 - RNA, 23 nt, synthetic construct
  source 1..23: mol_type = other RNA
ttctcagccatttgatatcttcc

SEQ ID NO: 848 - RNA, 21 nt, synthetic construct
  source 1..21: mol_type = other RNA
gaagatatcaaatggctgaga

SEQ ID NO: 849 - RNA, 23 nt, synthetic construct
  source 1..23: mol_type = other RNA
tctcagccatttgatatcttccc

SEQ ID NO: 850 - RNA, 21 nt, synthetic construct
  source 1..21: mol_type = other RNA
tctgacagtgcacaatatttt

SEQ ID NO: 851 - RNA, 23 nt, synthetic construct
  source 1..23: mol_type = other RNA
aaaatattgtgcactgtcagatc

SEQ ID NO: 852 - RNA, 21 nt, synthetic construct
  source 1..21: mol_type = other RNA
ctgacagtgcacaatattttc

SEQ ID NO: 853 - RNA, 23 nt, synthetic construct
  source 1..23: mol_type = other RNA
gaaaatattgtgcactgtcagat

SEQ ID NO: 854 - RNA, 21 nt, synthetic construct
  source 1..21: mol_type = other RNA
aagatctgacagtgcacaata

SEQ ID NO: 855 - RNA, 23 nt, synthetic construct
  source 1..23: mol_type = other RNA
tattgtgcactgtcagatcttgg

SEQ ID NO: 856 - RNA, 21 nt, synthetic construct
  source 1..21: mol_type = other RNA
caagatctgacagtgcacaat

SEQ ID NO: 857 - RNA, 23 nt, synthetic construct
  source 1..23: mol_type = other RNA
attgtgcactgtcagatcttgga

SEQ ID NO: 858 - RNA, 21 nt, synthetic construct
  source 1..21: mol_type = other RNA
actgatgttctgaaagctctg

SEQ ID NO: 859 - RNA, 23 nt, synthetic construct
  source 1..23: mol_type = other RNA
cagagctttcagaacatcagtgc

SEQ ID NO: 860 - RNA, 21 nt, synthetic construct
  source 1..21: mol_type = other RNA
ctgatgttctgaaagctctgg

SEQ ID NO: 861 - RNA, 23 nt, synthetic construct
  source 1..23: mol_type = other RNA
ccagagctttcagaacatcagtg

SEQ ID NO: 862 - RNA, 21 nt, synthetic construct
  source 1..21: mol_type = other RNA
aggcactgatgttctgaaagc

SEQ ID NO: 863 - RNA, 23 nt, synthetic construct
  source 1..23: mol_type = other RNA
gctttcagaacatcagtgccttt

SEQ ID NO: 864 - RNA, 21 nt, synthetic construct
  source 1..21: mol_type = other RNA
aaggcactgatgttctgaaag

SEQ ID NO: 865 - RNA, 23 nt, synthetic construct
  source 1..23: mol_type = other RNA
ctttcagaacatcagtgcctttc

SEQ ID NO: 866 - RNA, 21 nt, synthetic construct
  source 1..21: mol_type = other RNA
aacaacatgctaaatcagtac

SEQ ID NO: 867 - RNA, 23 nt, synthetic construct
  source 1..23: mol_type = other RNA
gtactgatttagcatgttgttca

SEQ ID NO: 868 - RNA, 21 nt, synthetic construct
  source 1..21: mol_type = other RNA
acaacatgctaaatcagtact

SEQ ID NO: 869 - RNA, 23 nt, synthetic construct
  source 1..23: mol_type = other RNA
agtactgatttagcatgttgttc

SEQ ID NO: 870 - RNA, 21 nt, synthetic construct
  source 1..21: mol_type = other RNA
tatgaacaacatgctaaatca

SEQ ID NO: 871 - RNA, 23 nt, synthetic construct
  source 1..23: mol_type = other RNA
tgatttagcatgttgttcataat

SEQ ID NO: 872 - RNA, 21 nt, synthetic construct
  source 1..21: mol_type = other RNA
ttatgaacaacatgctaaatc

SEQ ID NO: 873 - RNA, 23 nt, synthetic construct
  source 1..23: mol_type = other RNA
gatttagcatgttgttcataatc

SEQ ID NO: 874 - RNA, 21 nt, synthetic construct
  source 1..21: mol_type = other RNA
tctttagtgtctgaatatatc

SEQ ID NO: 875 - RNA, 23 nt, synthetic construct
  source 1..23: mol_type = other RNA
gatatattcagacactaaagatg

SEQ ID NO: 876 - RNA, 21 nt, synthetic construct
  source 1..21: mol_type = other RNA
ctttagtgtctgaatatatcc

SEQ ID NO: 877 - RNA, 23 nt, synthetic construct
  source 1..23: mol_type = other RNA
ggatatattcagacactaaagat

SEQ ID NO: 878 - RNA, 21 nt, synthetic construct
  source 1..21: mol_type = other RNA
cacatctttagtgtctgaata

SEQ ID NO: 879 - RNA, 23 nt, synthetic construct
  source 1..23: mol_type = other RNA
tattcagacactaaagatgtgat

SEQ ID NO: 880 - RNA, 21 nt, synthetic construct
  source 1..21: mol_type = other RNA
tcacatctttagtgtctgaat

SEQ ID NO: 881 - RNA, 23 nt, synthetic construct
  source 1..23: mol_type = other RNA
attcagacactaaagatgtgatt

SEQ ID NO: 882 - RNA, 21 nt, synthetic construct
  source 1..21: mol_type = other RNA
tgatacttctttgaatgtaga

SEQ ID NO: 883 - RNA, 23 nt, synthetic construct
  source 1..23: mol_type = other RNA
tctacattcaaagaagtatcacc

SEQ ID NO: 884 - RNA, 21 nt, synthetic construct
  source 1..21: mol_type = other RNA
gatacttctttgaatgtagat

SEQ ID NO: 885 - RNA, 23 nt, synthetic construct
  source 1..23: mol_type = other RNA
atctacattcaaagaagtatcac

SEQ ID NO: 886 - RNA, 21 nt, synthetic construct
  source 1..21: mol_type = other RNA
ttggtgatacttctttgaatg

SEQ ID NO: 887 - RNA, 23 nt, synthetic construct
  source 1..23: mol_type = other RNA
cattcaaagaagtatcaccaatt

SEQ ID NO: 888 - RNA, 21 nt, synthetic construct
  source 1..21: mol_type = other RNA
attggtgatacttctttgaat

SEQ ID NO: 889 - RNA, 23 nt, synthetic construct
  source 1..23: mol_type = other RNA
attcaaagaagtatcaccaatta

SEQ ID NO: 890 - RNA, 21 nt, synthetic construct
  source 1..21: mol_type = other RNA
aataacctgtgaaaatgctcc

SEQ ID NO: 891 - RNA, 23 nt, synthetic construct
  source 1..23: mol_type = other RNA
ggagcattttcacaggttattgc

SEQ ID NO: 892 - RNA, 21 nt, synthetic construct
  source 1..21: mol_type = other RNA
ataacctgtgaaaatgctccc

SEQ ID NO: 893 - RNA, 23 nt, synthetic construct
  source 1..23: mol_type = other RNA
gggagcattttcacaggttattg

SEQ ID NO: 894 - RNA, 21 nt, synthetic construct
  source 1..21: mol_type = other RNA
tagcaataacctgtgaaaatg

SEQ ID NO: 895 - RNA, 23 nt, synthetic construct
  source 1..23: mol_type = other RNA
cattttcacaggttattgctatc

SEQ ID NO: 896 - RNA, 21 nt, synthetic construct
  source 1..21: mol_type = other RNA
atagcaataacctgtgaaaat

SEQ ID NO: 897 - RNA, 23 nt, synthetic construct
  source 1..23: mol_type = other RNA
attttcacaggttattgctatcc

SEQ ID NO: 898 - RNA, 21 nt, synthetic construct
  source 1..21: mol_type = other RNA
aatcacatctttagtgtctga

SEQ ID NO: 899 - RNA, 23 nt, synthetic construct
  source 1..23: mol_type = other RNA
tcagacactaaagatgtgattgg

SEQ ID NO: 900 - RNA, 21 nt, synthetic construct
  source 1..21: mol_type = other RNA
atcacatctttagtgtctgaa

SEQ ID NO: 901 - RNA, 23 nt, synthetic construct
  source 1..23: mol_type = other RNA
ttcagacactaaagatgtgattg

SEQ ID NO: 902 - RNA, 21 nt, synthetic construct
  source 1..21: mol_type = other RNA
ttccaatcacatctttagtgt

SEQ ID NO: 903 - RNA, 23 nt, synthetic construct
  source 1..23: mol_type = other RNA
acactaaagatgtgattggaaat

SEQ ID NO: 904 - RNA, 21 nt, synthetic construct
  source 1..21: mol_type = other RNA
tttccaatcacatctttagtg

SEQ ID NO: 905 - RNA, 23 nt, synthetic construct
  source 1..23: mol_type = other RNA
cactaaagatgtgattggaaatc

SEQ ID NO: 906 - RNA, 21 nt, synthetic construct
  source 1..21: mol_type = other RNA
acgggcatgatgttgagttcc

SEQ ID NO: 907 - RNA, 23 nt, synthetic construct
  source 1..23: mol_type = other RNA
ggaactcaacatcatgcccgttc

SEQ ID NO: 908 - RNA, 21 nt, synthetic construct
  source 1..21: mol_type = other RNA
cgggcatgatgttgagttcct

SEQ ID NO: 909 - RNA, 23 nt, synthetic construct
  source 1..23: mol_type = other RNA
aggaactcaacatcatgcccgtt

SEQ ID NO: 910 - RNA, 21 nt, synthetic construct
  source 1..21: mol_type = other RNA
gggaacgggcatgatgttgag

SEQ ID NO: 911 - RNA, 23 nt, synthetic construct
  source 1..23: mol_type = other RNA
ctcaacatcatgcccgttcccag

SEQ ID NO: 912 - RNA, 21 nt, synthetic construct
  source 1..21: mol_type = other RNA
tgggaacgggcatgatgttga

SEQ ID NO: 913 - RNA, 23 nt, synthetic construct
  source 1..23: mol_type = other RNA
tcaacatcatgcccgttcccagg

SEQ ID NO: 914 - RNA, 21 nt, synthetic construct
  source 1..21: mol_type = other RNA
actaaggtgaaaagataatga

SEQ ID NO: 915 - RNA, 23 nt, synthetic construct
  source 1..23: mol_type = other RNA
tcattatcttttcaccttagtgt

SEQ ID NO: 916 - RNA, 21 nt, synthetic construct
  source 1..21: mol_type = other RNA
ctaaggtgaaaagataatgat

SEQ ID NO: 917 - RNA, 23 nt, synthetic construct
  source 1..23: mol_type = other RNA
atcattatcttttcaccttagtg

SEQ ID NO: 918 - RNA, 21 nt, synthetic construct
  source 1..21: mol_type = other RNA
aaacactaaggtgaaaagata

SEQ ID NO: 919 - RNA, 23 nt, synthetic construct
  source 1..23: mol_type = other RNA
tatcttttcaccttagtgtttgc

SEQ ID NO: 920 - RNA, 21 nt, synthetic construct
  source 1..21: mol_type = other RNA
caaacactaaggtgaaaagat

SEQ ID NO: 921 - RNA, 23 nt, synthetic construct
  source 1..23: mol_type = other RNA
atcttttcaccttagtgtttgct

SEQ ID NO: 922 - RNA, 21 nt, synthetic construct
  source 1..21: mol_type = other RNA
aggtagcactggagagaattg

SEQ ID NO: 923 - RNA, 23 nt, synthetic construct
  source 1..23: mol_type = other RNA
caattctctccagtgctaccttc

SEQ ID NO: 924 - RNA, 21 nt, synthetic construct
  source 1..21: mol_type = other RNA
ggtagcactggagagaattgg

SEQ ID NO: 925 - RNA, 23 nt, synthetic construct
  source 1..23: mol_type = other RNA
ccaattctctccagtgctacctt

SEQ ID NO: 926 - RNA, 21 nt, synthetic construct
  source 1..21: mol_type = other RNA
gagaaggtagcactggagaga

SEQ ID NO: 927 - RNA, 23 nt, synthetic construct
  source 1..23: mol_type = other RNA
tctctccagtgctaccttctcaa

SEQ ID NO: 928 - RNA, 21 nt, synthetic construct
  source 1..21: mol_type = other RNA
tgagaaggtagcactggagag

SEQ ID NO: 929 - RNA, 23 nt, synthetic construct
  source 1..23: mol_type = other RNA
ctctccagtgctaccttctcaaa

SEQ ID NO: 930 - RNA, 21 nt, synthetic construct
  source 1..21: mol_type = other RNA
agtggacttgctgcatatgtg

SEQ ID NO: 931 - RNA, 23 nt, synthetic construct
  source 1..23: mol_type = other RNA
cacatatgcagcaagtccactgt

SEQ ID NO: 932 - RNA, 21 nt, synthetic construct
  source 1..21: mol_type = other RNA
gtggacttgctgcatatgtgg

SEQ ID NO: 933 - RNA, 23 nt, synthetic construct
  source 1..23: mol_type = other RNA
ccacatatgcagcaagtccactg

SEQ ID NO: 934 - RNA, 21 nt, synthetic construct
  source 1..21: mol_type = other RNA
cgacagtggacttgctgcata

SEQ ID NO: 935 - RNA, 23 nt, synthetic construct
  source 1..23: mol_type = other RNA
tatgcagcaagtccactgtcgtc

SEQ ID NO: 936 - RNA, 21 nt, synthetic construct
  source 1..21: mol_type = other RNA
acgacagtggacttgctgcat

SEQ ID NO: 937 - RNA, 23 nt, synthetic construct
  source 1..23: mol_type = other RNA
atgcagcaagtccactgtcgtct

SEQ ID NO: 938 - RNA, 21 nt, synthetic construct
  source 1..21: mol_type = other RNA
aaggtgttcaagatgtcctcg

SEQ ID NO: 939 - RNA, 23 nt, synthetic construct
  source 1..23: mol_type = other RNA
cgaggacatcttgaacacctttc

SEQ ID NO: 940 - RNA, 21 nt, synthetic construct
  source 1..21: mol_type = other RNA
aggtgttcaagatgtcctcga

SEQ ID NO: 941 - RNA, 23 nt, synthetic construct
  source 1..23: mol_type = other RNA
tcgaggacatcttgaacaccttt

SEQ ID NO: 942 - RNA, 21 nt, synthetic construct
  source 1..21: mol_type = other RNA
gagaaaggtgttcaagatgtc

SEQ ID NO: 943 - RNA, 23 nt, synthetic construct
  source 1..23: mol_type = other RNA
gacatcttgaacacctttctccc

SEQ ID NO: 944 - RNA, 21 nt, synthetic construct
  source 1..21: mol_type = other RNA
ggagaaaggtgttcaagatgt

SEQ ID NO: 945 - RNA, 23 nt, synthetic construct
  source 1..23: mol_type = other RNA
acatcttgaacacctttctcccc

SEQ ID NO: 946 - RNA, 21 nt, synthetic construct
  source 1..21: mol_type = other RNA
aaccgtctggatgatgtgcgt

SEQ ID NO: 947 - RNA, 23 nt, synthetic construct
  source 1..23: mol_type = other RNA
acgcacatcatccagacggttgc

SEQ ID NO: 948 - RNA, 21 nt, synthetic construct
  source 1..21: mol_type = other RNA
accgtctggatgatgtgcgta

SEQ ID NO: 949 - RNA, 23 nt, synthetic construct
  source 1..23: mol_type = other RNA
tacgcacatcatccagacggttg

SEQ ID NO: 950 - RNA, 21 nt, synthetic construct
  source 1..21: mol_type = other RNA
gggcaaccgtctggatgatgt

SEQ ID NO: 951 - RNA, 23 nt, synthetic construct
  source 1..23: mol_type = other RNA
acatcatccagacggttgcccag

SEQ ID NO: 952 - RNA, 21 nt, synthetic construct
  source 1..21: mol_type = other RNA
tgggcaaccgtctggatgatg

SEQ ID NO: 953 - RNA, 23 nt, synthetic construct
  source 1..23: mol_type = other RNA
catcatccagacggttgcccagg

SEQ ID NO: 954 - RNA, 21 nt, synthetic construct
  source 1..21: mol_type = other RNA
gaaactttggctgataatatt

SEQ ID NO: 955 - RNA, 23 nt, synthetic construct
  source 1..23: mol_type = other RNA
aatattatcagccaaagtttctt

SEQ ID NO: 956 - RNA, 21 nt, synthetic construct
  source 1..21: mol_type = other RNA
aaactttggctgataatattg

SEQ ID NO: 957 - RNA, 23 nt, synthetic construct
  source 1..23: mol_type = other RNA
caatattatcagccaaagtttct

SEQ ID NO: 958 - RNA, 21 nt, synthetic construct
  source 1..21: mol_type = other RNA
tgaagaaactttggctgataa

SEQ ID NO: 959 - RNA, 23 nt, synthetic construct
  source 1..23: mol_type = other RNA
ttatcagccaaagtttcttcatc

SEQ ID NO: 960 - RNA, 21 nt, synthetic construct
  source 1..21: mol_type = other RNA
atgaagaaactttggctgata

SEQ ID NO: 961 - RNA, 23 nt, synthetic construct
  source 1..23: mol_type = other RNA
tatcagccaaagtttcttcatca

SEQ ID NO: 962 - RNA, 21 nt, synthetic construct
  source 1..21: mol_type = other RNA
aaaggtgttcaagatgtcctc

SEQ ID NO: 963 - RNA, 23 nt, synthetic construct
  source 1..23: mol_type = other RNA
gaggacatcttgaacacctttct

SEQ ID NO: 964 - RNA, 21 nt, synthetic construct
  source 1..21: mol_type = other RNA
aaggtgttcaagatgtcctcg

SEQ ID NO: 965 - RNA, 23 nt, synthetic construct
  source 1..23: mol_type = other RNA
cgaggacatcttgaacacctttc

SEQ ID NO: 966 - RNA, 21 nt, synthetic construct
  source 1..21: mol_type = other RNA
ggagaaaggtgttcaagatgt

SEQ ID NO: 967 - RNA, 23 nt, synthetic construct
  source 1..23: mol_type = other RNA
acatcttgaacacctttctcccc

SEQ ID NO: 968 - RNA, 21 nt, synthetic construct
  source 1..21: mol_type = other RNA
gggagaaaggtgttcaagatg

SEQ ID NO: 969 - RNA, 23 nt, synthetic construct
  source 1..23: mol_type = other RNA
catcttgaacacctttctccccc

SEQ ID NO: 970 - RNA, 21 nt, synthetic construct
  source 1..21: mol_type = other RNA
aaatcagtacttccaaagtct

SEQ ID NO: 971 - RNA, 23 nt, synthetic construct
  source 1..23: mol_type = other RNA
agactttggaagtactgatttag

SEQ ID NO: 972 - RNA, 21 nt, synthetic construct
  source 1..21: mol_type = other RNA
aatcagtacttccaaagtcta

SEQ ID NO: 973 - RNA, 23 nt, synthetic construct
  source 1..23: mol_type = other RNA
tagactttggaagtactgattta

SEQ ID NO: 974 - RNA, 21 nt, synthetic construct
  source 1..21: mol_type = other RNA
tgctaaatcagtacttccaaa

SEQ ID NO: 975 - RNA, 23 nt, synthetic construct
  source 1..23: mol_type = other RNA
tttggaagtactgatttagcatg

SEQ ID NO: 976 - RNA, 21 nt, synthetic construct
  source 1..21: mol_type = other RNA
atgctaaatcagtacttccaa

SEQ ID NO: 977 - RNA, 23 nt, synthetic construct
  source 1..23: mol_type = other RNA
ttggaagtactgatttagcatgt

SEQ ID NO: 978 - RNA, 21 nt, synthetic construct
  source 1..21: mol_type = other RNA
acatctttagtgtctgaatat

SEQ ID NO: 979 - RNA, 23 nt, synthetic construct
  source 1..23: mol_type = other RNA
atattcagacactaaagatgtga

SEQ ID NO: 980 - RNA, 21 nt, synthetic construct
  source 1..21: mol_type = other RNA
catctttagtgtctgaatata

SEQ ID NO: 981 - RNA, 23 nt, synthetic construct
  source 1..23: mol_type = other RNA
tatattcagacactaaagatgtg

SEQ ID NO: 982 - RNA, 21 nt, synthetic construct
  source 1..21: mol_type = other RNA
aatcacatctttagtgtctga

SEQ ID NO: 983 - RNA, 23 nt, synthetic construct
  source 1..23: mol_type = other RNA
tcagacactaaagatgtgattgg

SEQ ID NO: 984 - RNA, 21 nt, synthetic construct
  source 1..21: mol_type = other RNA
caatcacatctttagtgtctg

SEQ ID NO: 985 - RNA, 23 nt, synthetic construct
  source 1..23: mol_type = other RNA
cagacactaaagatgtgattgga

SEQ ID NO: 986 - RNA, 21 nt, synthetic construct
  source 1..21: mol_type = other RNA
gcatgtattacttgacaaaga

SEQ ID NO: 987 - RNA, 23 nt, synthetic construct
  source 1..23: mol_type = other RNA
tctttgtcaagtaatacatgctg

SEQ ID NO: 988 - RNA, 21 nt, synthetic construct
  source 1..21: mol_type = other RNA
catgtattacttgacaaagag

SEQ ID NO: 989 - RNA, 23 nt, synthetic construct
  source 1..23: mol_type = other RNA
ctctttgtcaagtaatacatgct

SEQ ID NO: 990 - RNA, 21 nt, synthetic construct
  source 1..21: mol_type = other RNA
ttcagcatgtattacttgaca

SEQ ID NO: 991 - RNA, 23 nt, synthetic construct
  source 1..23: mol_type = other RNA
tgtcaagtaatacatgctgaaaa

SEQ ID NO: 992 - RNA, 21 nt, synthetic construct
  source 1..21: mol_type = other RNA
tttcagcatgtattacttgac

SEQ ID NO: 993 - RNA, 23 nt, synthetic construct
  source 1..23: mol_type = other RNA
gtcaagtaatacatgctgaaaaa

SEQ ID NO: 994 - RNA, 21 nt, synthetic construct
  source 1..21: mol_type = other RNA
atgttacttcttagagagaaa

SEQ ID NO: 995 - RNA, 23 nt, synthetic construct
  source 1..23: mol_type = other RNA
tttctctctaagaagtaacatac

SEQ ID NO: 996 - RNA, 21 nt, synthetic construct
  source 1..21: mol_type = other RNA
tgttacttcttagagagaaat

SEQ ID NO: 997 - RNA, 23 nt, synthetic construct
  source 1..23: mol_type = other RNA
atttctctctaagaagtaacata

SEQ ID NO: 998 - RNA, 21 nt, synthetic construct
  source 1..21: mol_type = other RNA
atgtatgttacttcttagaga

SEQ ID NO: 999 - RNA, 23 nt, synthetic construct
  source 1..23: mol_type = other RNA
tctctaagaagtaacatacatcc

SEQ ID NO: 1000 - RNA, 21 nt, synthetic construct
  source 1..21: mol_type = other RNA
gatgtatgttacttcttagag

SEQ ID NO: 1001 - RNA, 23 nt, synthetic construct
  source 1..23: mol_type = other RNA
ctctaagaagtaacatacatcct

SEQ ID NO: 1002 - RNA, 21 nt, synthetic construct
  source 1..21: mol_type = other RNA
acaactttgagaaggtagcac

SEQ ID NO: 1003 - RNA, 23 nt, synthetic construct
  source 1..23: mol_type = other RNA
gtgctaccttctcaaagttgtga

SEQ ID NO: 1004 - RNA, 21 nt, synthetic construct
  source 1..21: mol_type = other RNA
caactttgagaaggtagcact

SEQ ID NO: 1005 - RNA, 23 nt, synthetic construct
  source 1..23: mol_type = other RNA
agtgctaccttctcaaagttgtg

SEQ ID NO: 1006 - RNA, 21 nt, synthetic construct
  source 1..21: mol_type = other RNA
attcacaactttgagaaggta

SEQ ID NO: 1007 - RNA, 23 nt, synthetic construct
  source 1..23: mol_type = other RNA
taccttctcaaagttgtgaatca

SEQ ID NO: 1008 - RNA, 21 nt, synthetic construct
  source 1..21: mol_type = other RNA
gattcacaactttgagaaggt

SEQ ID NO: 1009 - RNA, 23 nt, synthetic construct
  source 1..23: mol_type = other RNA
accttctcaaagttgtgaatcag

SEQ ID NO: 1010 - RNA, 21 nt, synthetic construct
  source 1..21: mol_type = other RNA
aacatgctaaatcagtacttc

SEQ ID NO: 1011 - RNA, 23 nt, synthetic construct
  source 1..23: mol_type = other RNA
gaagtactgatttagcatgttgt

SEQ ID NO: 1012 - RNA, 21 nt, synthetic construct
  source 1..21: mol_type = other RNA
acatgctaaatcagtacttcc

SEQ ID NO: 1013 - RNA, 23 nt, synthetic construct
  source 1..23: mol_type = other RNA
ggaagtactgatttagcatgttg

SEQ ID NO: 1014 - RNA, 21 nt, synthetic construct
  source 1..21: mol_type = other RNA
gaacaacatgctaaatcagta

SEQ ID NO: 1015 - RNA, 23 nt, synthetic construct
  source 1..23: mol_type = other RNA
tactgatttagcatgttgttcat

SEQ ID NO: 1016 - RNA, 21 nt, synthetic construct
  source 1..21: mol_type = other RNA
tgaacaacatgctaaatcagt

SEQ ID NO: 1017 - RNA, 23 nt, synthetic construct
  source 1..23: mol_type = other RNA
actgatttagcatgttgttcata

SEQ ID NO: 1018 - RNA, 21 nt, synthetic construct
  source 1..21: mol_type = other RNA
aaaccagtactttatcatttt

SEQ ID NO: 1019 - RNA, 23 nt, synthetic construct
  source 1..23: mol_type = other RNA
aaaatgataaagtactggtttca

SEQ ID NO: 1020 - RNA, 21 nt, synthetic construct
  source 1..21: mol_type = other RNA
aaccagtactttatcattttc

SEQ ID NO: 1021 - RNA, 23 nt, synthetic construct
  source 1..23: mol_type = other RNA
gaaaatgataaagtactggtttc

SEQ ID NO: 1022 - RNA, 21 nt, synthetic construct
  source 1..21: mol_type = other RNA
tttgaaaccagtactttatca

SEQ ID NO: 1023 - RNA, 23 nt, synthetic construct
  source 1..23: mol_type = other RNA
tgataaagtactggtttcaaaat

SEQ ID NO: 1024 - RNA, 21 nt, synthetic construct
  source 1..21: mol_type = other RNA
ttttgaaaccagtactttatc

SEQ ID NO: 1025 - RNA, 23 nt, synthetic construct
  source 1..23: mol_type = other RNA
gataaagtactggtttcaaaatt

SEQ ID NO: 1026 - RNA, 21 nt, synthetic construct
  source 1..21: mol_type = other RNA
gagaagatgggctacaaggcc

SEQ ID NO: 1027 - RNA, 23 nt, synthetic construct
  source 1..23: mol_type = other RNA
ggccttgtagcccatcttctctg

SEQ ID NO: 1028 - RNA, 21 nt, synthetic construct
  source 1..21: mol_type = other RNA
agaagatgggctacaaggcca

SEQ ID NO: 1029 - RNA, 23 nt, synthetic construct
  source 1..23: mol_type = other RNA
tggccttgtagcccatcttctct

SEQ ID NO: 1030 - RNA, 21 nt, synthetic construct
  source 1..21: mol_type = other RNA
ggcagagaagatgggctacaa

SEQ ID NO: 1031 - RNA, 23 nt, synthetic construct
  source 1..23: mol_type = other RNA
ttgtagcccatcttctctgcctg

SEQ ID NO: 1032 - RNA, 21 nt, synthetic construct
  source 1..21: mol_type = other RNA
aggcagagaagatgggctaca

SEQ ID NO: 1033 - RNA, 23 nt, synthetic construct
  source 1..23: mol_type = other RNA
tgtagcccatcttctctgcctgc

SEQ ID NO: 1034 - RNA, 21 nt, synthetic construct
  source 1..21: mol_type = other RNA
aacgggcatgatgttgagttc

SEQ ID NO: 1035 - RNA, 23 nt, synthetic construct
  source 1..23: mol_type = other RNA
gaactcaacatcatgcccgttcc

SEQ ID NO: 1036 - RNA, 21 nt, synthetic construct
  source 1..21: mol_type = other RNA
acgggcatgatgttgagttcc

SEQ ID NO: 1037 - RNA, 23 nt, synthetic construct
  source 1..23: mol_type = other RNA
ggaactcaacatcatgcccgttc

SEQ ID NO: 1038 - RNA, 21 nt, synthetic construct
  source 1..21: mol_type = other RNA
tgggaacgggcatgatgttga

SEQ ID NO: 1039 - RNA, 23 nt, synthetic construct
  source 1..23: mol_type = other RNA
tcaacatcatgcccgttcccagg

SEQ ID NO: 1040 - RNA, 21 nt, synthetic construct
  source 1..21: mol_type = other RNA
ctgggaacgggcatgatgttg

SEQ ID NO: 1041 - RNA, 23 nt, synthetic construct
  source 1..23: mol_type = other RNA
caacatcatgcccgttcccaggg

SEQ ID NO: 1042 - RNA, 21 nt, synthetic construct
  source 1..21: mol_type = other RNA
atgtggctaaagcaatagacc

SEQ ID NO: 1043 - RNA, 23 nt, synthetic construct
  source 1..23: mol_type = other RNA
ggtctattgctttagccacatat

SEQ ID NO: 1044 - RNA, 21 nt, synthetic construct
  source 1..21: mol_type = other RNA
tgtggctaaagcaatagaccc

SEQ ID NO: 1045 - RNA, 23 nt, synthetic construct
  source 1..23: mol_type = other RNA
gggtctattgctttagccacata

SEQ ID NO: 1046 - RNA, 21 nt, synthetic construct
  source 1..21: mol_type = other RNA
gcatatgtggctaaagcaata

SEQ ID NO: 1047 - RNA, 23 nt, synthetic construct
  source 1..23: mol_type = other RNA
tattgctttagccacatatgcag

SEQ ID NO: 1048 - RNA, 21 nt, synthetic construct
  source 1..21: mol_type = other RNA
tgcatatgtggctaaagcaat

SEQ ID NO: 1049 - RNA, 23 nt, synthetic construct
  source 1..23: mol_type = other RNA
attgctttagccacatatgcagc

SEQ ID NO: 1050 - RNA, 21 nt, synthetic construct
  source 1..21: mol_type = other RNA
aggatgctccggaatgttgct

SEQ ID NO: 1051 - RNA, 23 nt, synthetic construct
  source 1..23: mol_type = other RNA
agcaacattccggagcatccttg

SEQ ID NO: 1052 - RNA, 21 nt, synthetic construct
  source 1..21: mol_type = other RNA
ggatgctccggaatgttgctg

SEQ ID NO: 1053 - RNA, 23 nt, synthetic construct
  source 1..23: mol_type = other RNA
cagcaacattccggagcatcctt

SEQ ID NO: 1054 - RNA, 21 nt, synthetic construct
  source 1..21: mol_type = other RNA
tccaaggatgctccggaatgt

SEQ ID NO: 1055 - RNA, 23 nt, synthetic construct
  source 1..23: mol_type = other RNA
acattccggagcatccttggata

SEQ ID NO: 1056 - RNA, 21 nt, synthetic construct
  source 1..21: mol_type = other RNA
atccaaggatgctccggaatg

SEQ ID NO: 1057 - RNA, 23 nt, synthetic construct
  source 1..23: mol_type = other RNA
cattccggagcatccttggatac

SEQ ID NO: 1058 - RNA, 21 nt, synthetic construct
  source 1..21: mol_type = other RNA
tcacatctttagtgtctgaat

SEQ ID NO: 1059 - RNA, 23 nt, synthetic construct
  source 1..23: mol_type = other RNA
attcagacactaaagatgtgatt

SEQ ID NO: 1060 - RNA, 21 nt, synthetic construct
  source 1..21: mol_type = other RNA
cacatctttagtgtctgaata

SEQ ID NO: 1061 - RNA, 23 nt, synthetic construct
  source 1..23: mol_type = other RNA
tattcagacactaaagatgtgat

SEQ ID NO: 1062 - RNA, 21 nt, synthetic construct
  source 1..21: mol_type = other RNA
ccaatcacatctttagtgtct

SEQ ID NO: 1063 - RNA, 23 nt, synthetic construct
  source 1..23: mol_type = other RNA
agacactaaagatgtgattggaa

SEQ ID NO: 1064 - RNA, 21 nt, synthetic construct
  source 1..21: mol_type = other RNA
tccaatcacatctttagtgtc

SEQ ID NO: 1065 - RNA, 23 nt, synthetic construct
  source 1..23: mol_type = other RNA
gacactaaagatgtgattggaaa

SEQ ID NO: 1066 - RNA, 21 nt, synthetic construct
  source 1..21: mol_type = other RNA
aaatgtgtttagacaacgtca

SEQ ID NO: 1067 - RNA, 23 nt, synthetic construct
  source 1..23: mol_type = other RNA
tgacgttgtctaaacacattttc

SEQ ID NO: 1068 - RNA, 21 nt, synthetic construct
  source 1..21: mol_type = other RNA
aatgtgtttagacaacgtcat

SEQ ID NO: 1069 - RNA, 23 nt, synthetic construct
  source 1..23: mol_type = other RNA
atgacgttgtctaaacacatttt

SEQ ID NO: 1070 - RNA, 21 nt, synthetic construct
  source 1..21: mol_type = other RNA
ttgaaaatgtgtttagacaac

SEQ ID NO: 1071 - RNA, 23 nt, synthetic construct
  source 1..23: mol_type = other RNA
gttgtctaaacacattttcaatg

SEQ ID NO: 1072 - RNA, 21 nt, synthetic construct
  source 1..21: mol_type = other RNA
attgaaaatgtgtttagacaa

SEQ ID NO: 1073 - RNA, 23 nt, synthetic construct
  source 1..23: mol_type = other RNA
ttgtctaaacacattttcaatgt

SEQ ID NO: 1074 - RNA, 21 nt, synthetic construct
  source 1..21: mol_type = other RNA
tactaaaggaagaattccggt

SEQ ID NO: 1075 - RNA, 23 nt, synthetic construct
  source 1..23: mol_type = other RNA
accggaattcttcctttagtatc

SEQ ID NO: 1076 - RNA, 21 nt, synthetic construct
  source 1..21: mol_type = other RNA
actaaaggaagaattccggtt

SEQ ID NO: 1077 - RNA, 23 nt, synthetic construct
  source 1..23: mol_type = other RNA
aaccggaattcttcctttagtat

SEQ ID NO: 1078 - RNA, 21 nt, synthetic construct
  source 1..21: mol_type = other RNA
gagatactaaaggaagaattc

SEQ ID NO: 1079 - RNA, 23 nt, synthetic construct
  source 1..23: mol_type = other RNA
gaattcttcctttagtatctcga

SEQ ID NO: 1080 - RNA, 21 nt, synthetic construct
  source 1..21: mol_type = other RNA
cgagatactaaaggaagaatt

SEQ ID NO: 1081 - RNA, 23 nt, synthetic construct
  source 1..23: mol_type = other RNA
aattcttcctttagtatctcgag

SEQ ID NO: 1082 - RNA, 21 nt, synthetic construct
  source 1..21: mol_type = other RNA
aactttggctgataatattgc

SEQ ID NO: 1083 - RNA, 23 nt, synthetic construct
  source 1..23: mol_type = other RNA
gcaatattatcagccaaagtttc

SEQ ID NO: 1084 - RNA, 21 nt, synthetic construct
  source 1..21: mol_type = other RNA
actttggctgataatattgca

SEQ ID NO: 1085 - RNA, 23 nt, synthetic construct
  source 1..23: mol_type = other RNA
tgcaatattatcagccaaagttt

SEQ ID NO: 1086 - RNA, 21 nt, synthetic construct
  source 1..21: mol_type = other RNA
aagaaactttggctgataata

SEQ ID NO: 1087 - RNA, 23 nt, synthetic construct
  source 1..23: mol_type = other RNA
tattatcagccaaagtttcttca

SEQ ID NO: 1088 - RNA, 21 nt, synthetic construct
  source 1..21: mol_type = other RNA
gaagaaactttggctgataat

SEQ ID NO: 1089 - RNA, 23 nt, synthetic construct
  source 1..23: mol_type = other RNA
attatcagccaaagtttcttcat

SEQ ID NO: 1090 - RNA, 21 nt, synthetic construct
  source 1..21: mol_type = other RNA
aaatggctgagaagactgaca

SEQ ID NO: 1091 - RNA, 23 nt, synthetic construct
  source 1..23: mol_type = other RNA
tgtcagtcttctcagccatttga

SEQ ID NO: 1092 - RNA, 21 nt, synthetic construct
  source 1..21: mol_type = other RNA
aatggctgagaagactgacat

SEQ ID NO: 1093 - RNA, 23 nt, synthetic construct
  source 1..23: mol_type = other RNA
atgtcagtcttctcagccatttg

SEQ ID NO: 1094 - RNA, 21 nt, synthetic construct
  source 1..21: mol_type = other RNA
tatcaaatggctgagaagact

SEQ ID NO: 1095 - RNA, 23 nt, synthetic construct
  source 1..23: mol_type = other RNA
agtcttctcagccatttgatatc

SEQ ID NO: 1096 - RNA, 21 nt, synthetic construct
  source 1..21: mol_type = other RNA
atatcaaatggctgagaagac

SEQ ID NO: 1097 - RNA, 23 nt, synthetic construct
  source 1..23: mol_type = other RNA
gtcttctcagccatttgatatct

SEQ ID NO: 1098 - RNA, 21 nt, synthetic construct
  source 1..21: mol_type = other RNA
gtggttcttaaattgtaagct

SEQ ID NO: 1099 - RNA, 23 nt, synthetic construct
  source 1..23: mol_type = other RNA
agcttacaatttaagaaccactg

SEQ ID NO: 1100 - RNA, 21 nt, synthetic construct
  source 1..21: mol_type = other RNA
tggttcttaaattgtaagctc

SEQ ID NO: 1101 - RNA, 23 nt, synthetic construct
  source 1..23: mol_type = other RNA
gagcttacaatttaagaaccact

SEQ ID NO: 1102 - RNA, 21 nt, synthetic construct
  source 1..21: mol_type = other RNA
aacagtggttcttaaattgta

SEQ ID NO: 1103 - RNA, 23 nt, synthetic construct
  source 1..23: mol_type = other RNA
tacaatttaagaaccactgtttt

SEQ ID NO: 1104 - RNA, 21 nt, synthetic construct
  source 1..21: mol_type = other RNA
aaacagtggttcttaaattgt

SEQ ID NO: 1105 - RNA, 23 nt, synthetic construct
  source 1..23: mol_type = other RNA
acaatttaagaaccactgtttta

SEQ ID NO: 1106 - RNA, 21 nt, synthetic construct
  source 1..21: mol_type = other RNA
aagtcatcgacaagacattgg

SEQ ID NO: 1107 - RNA, 23 nt, synthetic construct
  source 1..23: mol_type = other RNA
ccaatgtcttgtcgatgactttc

SEQ ID NO: 1108 - RNA, 21 nt, synthetic construct
  source 1..21: mol_type = other RNA
agtcatcgacaagacattggt

SEQ ID NO: 1109 - RNA, 23 nt, synthetic construct
  source 1..23: mol_type = other RNA
accaatgtcttgtcgatgacttt

SEQ ID NO: 1110 - RNA, 21 nt, synthetic construct
  source 1..21: mol_type = other RNA
gtgaaagtcatcgacaagaca

SEQ ID NO: 1111 - RNA, 23 nt, synthetic construct
  source 1..23: mol_type = other RNA
tgtcttgtcgatgactttcacat

SEQ ID NO: 1112 - RNA, 21 nt, synthetic construct
  source 1..21: mol_type = other RNA
tgtgaaagtcatcgacaagac

SEQ ID NO: 1113 - RNA, 23 nt, synthetic construct
  source 1..23: mol_type = other RNA
gtcttgtcgatgactttcacatt

SEQ ID NO: 1114 - RNA, 21 nt, synthetic construct
  source 1..21: mol_type = other RNA
gataatattgcagcattttcc

SEQ ID NO: 1115 - RNA, 23 nt, synthetic construct
  source 1..23: mol_type = other RNA
ggaaaatgctgcaatattatcag

SEQ ID NO: 1116 - RNA, 21 nt, synthetic construct
  source 1..21: mol_type = other RNA
ataatattgcagcattttcca

SEQ ID NO: 1117 - RNA, 23 nt, synthetic construct
  source 1..23: mol_type = other RNA
tggaaaatgctgcaatattatca

SEQ ID NO: 1118 - RNA, 21 nt, synthetic construct
  source 1..21: mol_type = other RNA
ggctgataatattgcagcatt

SEQ ID NO: 1119 - RNA, 23 nt, synthetic construct
  source 1..23: mol_type = other RNA
aatgctgcaatattatcagccaa

SEQ ID NO: 1120 - RNA, 21 nt, synthetic construct
  source 1..21: mol_type = other RNA
tggctgataatattgcagcat

SEQ ID NO: 1121 - RNA, 23 nt, synthetic construct
  source 1..23: mol_type = other RNA
atgctgcaatattatcagccaaa

SEQ ID NO: 1122 - RNA, 21 nt, synthetic construct
  source 1..21: mol_type = other RNA
gctaatttgtatcaatgatta

SEQ ID NO: 1123 - RNA, 23 nt, synthetic construct
  source 1..23: mol_type = other RNA
taatcattgatacaaattagccg

SEQ ID NO: 1124 - RNA, 21 nt, synthetic construct
  source 1..21: mol_type = other RNA
ctaatttgtatcaatgattat

SEQ ID NO: 1125 - RNA, 23 nt, synthetic construct
  source 1..23: mol_type = other RNA
ataatcattgatacaaattagcc

SEQ ID NO: 1126 - RNA, 21 nt, synthetic construct
  source 1..21: mol_type = other RNA
cccggctaatttgtatcaatg

SEQ ID NO: 1127 - RNA, 23 nt, synthetic construct
  source 1..23: mol_type = other RNA
cattgatacaaattagccggggg

SEQ ID NO: 1128 - RNA, 21 nt, synthetic construct
  source 1..21: mol_type = other RNA
ccccggctaatttgtatcaat

SEQ ID NO: 1129 - RNA, 23 nt, synthetic construct
  source 1..23: mol_type = other RNA
attgatacaaattagccggggga

SEQ ID NO: 1130 - RNA, 21 nt, synthetic construct
  source 1..21: mol_type = other RNA
taattggtgatacttctttga

SEQ ID NO: 1131 - RNA, 23 nt, synthetic construct
  source 1..23: mol_type = other RNA
tcaaagaagtatcaccaattacc

SEQ ID NO: 1132 - RNA, 21 nt, synthetic construct
  source 1..21: mol_type = other RNA
aattggtgatacttctttgaa

SEQ ID NO: 1133 - RNA, 23 nt, synthetic construct
  source 1..23: mol_type = other RNA
ttcaaagaagtatcaccaattac

SEQ ID NO: 1134 - RNA, 21 nt, synthetic construct
  source 1..21: mol_type = other RNA
gcggtaattggtgatacttct

SEQ ID NO: 1135 - RNA, 23 nt, synthetic construct
  source 1..23: mol_type = other RNA
agaagtatcaccaattaccgcca

SEQ ID NO: 1136 - RNA, 21 nt, synthetic construct
  source 1..21: mol_type = other RNA
ggcggtaattggtgatacttc

SEQ ID NO: 1137 - RNA, 23 nt, synthetic construct
  source 1..23: mol_type = other RNA
gaagtatcaccaattaccgccac

SEQ ID NO: 1138 - RNA, 21 nt, synthetic construct
  source 1..21: mol_type = other RNA
cagtggttcttaaattgtaag

SEQ ID NO: 1139 - RNA, 23 nt, synthetic construct
  source 1..23: mol_type = other RNA
cttacaatttaagaaccactgtt

SEQ ID NO: 1140 - RNA, 21 nt, synthetic construct
  source 1..21: mol_type = other RNA
agtggttcttaaattgtaagc

SEQ ID NO: 1141 - RNA, 23 nt, synthetic construct
  source 1..23: mol_type = other RNA
gcttacaatttaagaaccactgt

SEQ ID NO: 1142 - RNA, 21 nt, synthetic construct
  source 1..21: mol_type = other RNA
aaaacagtggttcttaaattg

SEQ ID NO: 1143 - RNA, 23 nt, synthetic construct
  source 1..23: mol_type = other RNA
caatttaagaaccactgttttaa

SEQ ID NO: 1144 - RNA, 21 nt, synthetic construct
  source 1..21: mol_type = other RNA
taaaacagtggttcttaaatt

SEQ ID NO: 1145 - RNA, 23 nt, synthetic construct
  source 1..23: mol_type = other RNA
aatttaagaaccactgttttaaa

SEQ ID NO: 1146 - RNA, 21 nt, synthetic construct
  source 1..21: mol_type = other RNA
acctgtattctgtttacatgt

SEQ ID NO: 1147 - RNA, 23 nt, synthetic construct
  source 1..23: mol_type = other RNA
acatgtaaacagaatacaggtta

SEQ ID NO: 1148 - RNA, 21 nt, synthetic construct
  source 1..21: mol_type = other RNA
cctgtattctgtttacatgtc

SEQ ID NO: 1149 - RNA, 23 nt, synthetic construct
  source 1..23: mol_type = other RNA
gacatgtaaacagaatacaggtt

SEQ ID NO: 1150 - RNA, 21 nt, synthetic construct
  source 1..21: mol_type = other RNA
attaacctgtattctgtttac

SEQ ID NO: 1151 - RNA, 23 nt, synthetic construct
  source 1..23: mol_type = other RNA
gtaaacagaatacaggttaataa

SEQ ID NO: 1152 - RNA, 21 nt, synthetic construct
  source 1..21: mol_type = other RNA
tattaacctgtattctgttta

SEQ ID NO: 1153 - RNA, 23 nt, synthetic construct
  source 1..23: mol_type = other RNA
taaacagaatacaggttaataaa

SEQ ID NO: 1154 - RNA, 21 nt, synthetic construct
  source 1..21: mol_type = other RNA
aagaaactttggctgataata

SEQ ID NO: 1155 - RNA, 23 nt, synthetic construct
  source 1..23: mol_type = other RNA
tattatcagccaaagtttcttca

SEQ ID NO: 1156 - RNA, 21 nt, synthetic construct
  source 1..21: mol_type = other RNA
agaaactttggctgataatat

SEQ ID NO: 1157 - RNA, 23 nt, synthetic construct
  source 1..23: mol_type = other RNA
atattatcagccaaagtttcttc

SEQ ID NO: 1158 - RNA, 21 nt, synthetic construct
  source 1..21: mol_type = other RNA
gatgaagaaactttggctgat

SEQ ID NO: 1159 - RNA, 23 nt, synthetic construct
  source 1..23: mol_type = other RNA
atcagccaaagtttcttcatcat

SEQ ID NO: 1160 - RNA, 21 nt, synthetic construct
  source 1..21: mol_type = other RNA
tgatgaagaaactttggctga

SEQ ID NO: 1161 - RNA, 23 nt, synthetic construct
  source 1..23: mol_type = other RNA
tcagccaaagtttcttcatcatt

SEQ ID NO: 1162 - RNA, 21 nt, synthetic construct
  source 1..21: mol_type = other RNA
gaaaggtgttcaagatgtcct

SEQ ID NO: 1163 - RNA, 23 nt, synthetic construct
  source 1..23: mol_type = other RNA
aggacatcttgaacacctttctc

SEQ ID NO: 1164 - RNA, 21 nt, synthetic construct
  source 1..21: mol_type = other RNA
aaaggtgttcaagatgtcctc

SEQ ID NO: 1165 - RNA, 23 nt, synthetic construct
  source 1..23: mol_type = other RNA
gaggacatcttgaacacctttct

SEQ ID NO: 1166 - RNA, 21 nt, synthetic construct
  source 1..21: mol_type = other RNA
gggagaaaggtgttcaagatg

SEQ ID NO: 1167 - RNA, 23 nt, synthetic construct
  source 1..23: mol_type = other RNA
catcttgaacacctttctccccc

SEQ ID NO: 1168 - RNA, 21 nt, synthetic construct
  source 1..21: mol_type = other RNA
ggggagaaaggtgttcaagat

SEQ ID NO: 1169 - RNA, 23 nt, synthetic construct
  source 1..23: mol_type = other RNA
atcttgaacacctttctccccct

SEQ ID NO: 1170 - RNA, 21 nt, synthetic construct
  source 1..21: mol_type = other RNA
atcttggtgtcgaatcatggg

SEQ ID NO: 1171 - RNA, 23 nt, synthetic construct
  source 1..23: mol_type = other RNA
cccatgattcgacaccaagatcc

SEQ ID NO: 1172 - RNA, 21 nt, synthetic construct
  source 1..21: mol_type = other RNA
tcttggtgtcgaatcatgggg

SEQ ID NO: 1173 - RNA, 23 nt, synthetic construct
  source 1..23: mol_type = other RNA
ccccatgattcgacaccaagatc

SEQ ID NO: 1174 - RNA, 21 nt, synthetic construct
  source 1..21: mol_type = other RNA
tgggatcttggtgtcgaatca

SEQ ID NO: 1175 - RNA, 23 nt, synthetic construct
  source 1..23: mol_type = other RNA
tgattcgacaccaagatcccatt

SEQ ID NO: 1176 - RNA, 21 nt, synthetic construct
  source 1..21: mol_type = other RNA
atgggatcttggtgtcgaatc

SEQ ID NO: 1177 - RNA, 23 nt, synthetic construct
  source 1..23: mol_type = other RNA
gattcgacaccaagatcccattc

SEQ ID NO: 1178 - RNA, 21 nt, synthetic construct
  source 1..21: mol_type = other RNA
gctacaaggccatatttgtga

SEQ ID NO: 1179 - RNA, 23 nt, synthetic construct
  source 1..23: mol_type = other RNA
tcacaaatatggccttgtagccc

SEQ ID NO: 1180 - RNA, 21 nt, synthetic construct
  source 1..21: mol_type = other RNA
ctacaaggccatatttgtgac

SEQ ID NO: 1181 - RNA, 23 nt, synthetic construct
  source 1..23: mol_type = other RNA
gtcacaaatatggccttgtagcc

SEQ ID NO: 1182 - RNA, 21 nt, synthetic construct
  source 1..21: mol_type = other RNA
atgggctacaaggccatattt

SEQ ID NO: 1183 - RNA, 23 nt, synthetic construct
  source 1..23: mol_type = other RNA
aaatatggccttgtagcccatct

SEQ ID NO: 1184 - RNA, 21 nt, synthetic construct
  source 1..21: mol_type = other RNA
gatgggctacaaggccatatt

SEQ ID NO: 1185 - RNA, 23 nt, synthetic construct
  source 1..23: mol_type = other RNA
aatatggccttgtagcccatctt

SEQ ID NO: 1186 - RNA, 21 nt, synthetic construct
  source 1..21: mol_type = other RNA
actggagagaattggaatggg

SEQ ID NO: 1187 - RNA, 23 nt, synthetic construct
  source 1..23: mol_type = other RNA
cccattccaattctctccagtgc

SEQ ID NO: 1188 - RNA, 21 nt, synthetic construct
  source 1..21: mol_type = other RNA
ctggagagaattggaatgggt

SEQ ID NO: 1189 - RNA, 23 nt, synthetic construct
  source 1..23: mol_type = other RNA
acccattccaattctctccagtg

SEQ ID NO: 1190 - RNA, 21 nt, synthetic construct
  source 1..21: mol_type = other RNA
tagcactggagagaattggaa

SEQ ID NO: 1191 - RNA, 23 nt, synthetic construct
  source 1..23: mol_type = other RNA
ttccaattctctccagtgctacc

SEQ ID NO: 1192 - RNA, 21 nt, synthetic construct
  source 1..21: mol_type = other RNA
gtagcactggagagaattgga

SEQ ID NO: 1193 - RNA, 23 nt, synthetic construct
  source 1..23: mol_type = other RNA
tccaattctctccagtgctacct

SEQ ID NO: 1194 - RNA, 21 nt, synthetic construct
  source 1..21: mol_type = other RNA
acagtggacacaccttacctg

SEQ ID NO: 1195 - RNA, 23 nt, synthetic construct
  source 1..23: mol_type = other RNA
caggtaaggtgtgtccactgtca

SEQ ID NO: 1196 - RNA, 21 nt, synthetic construct
  source 1..21: mol_type = other RNA
cagtggacacaccttacctgg

SEQ ID NO: 1197 - RNA, 23 nt, synthetic construct
  source 1..23: mol_type = other RNA
ccaggtaaggtgtgtccactgtc

SEQ ID NO: 1198 - RNA, 21 nt, synthetic construct
  source 1..21: mol_type = other RNA
tgtgacagtggacacacctta

SEQ ID NO: 1199 - RNA, 23 nt, synthetic construct
  source 1..23: mol_type = other RNA
taaggtgtgtccactgtcacaaa

SEQ ID NO: 1200 - RNA, 21 nt, synthetic construct
  source 1..21: mol_type = other RNA
ttgtgacagtggacacacctt

SEQ ID NO: 1201 - RNA, 23 nt, synthetic construct
  source 1..23: mol_type = other RNA
aaggtgtgtccactgtcacaaat

SEQ ID NO: 1202 - RNA, 21 nt, synthetic construct
  source 1..21: mol_type = other RNA
gaagactgacatcattgccaa

SEQ ID NO: 1203 - RNA, 23 nt, synthetic construct
  source 1..23: mol_type = other RNA
ttggcaatgatgtcagtcttctc

SEQ ID NO: 1204 - RNA, 21 nt, synthetic construct
  source 1..21: mol_type = other RNA
aagactgacatcattgccaat

SEQ ID NO: 1205 - RNA, 23 nt, synthetic construct
  source 1..23: mol_type = other RNA
attggcaatgatgtcagtcttct

SEQ ID NO: 1206 - RNA, 21 nt, synthetic construct
  source 1..21: mol_type = other RNA
ctgagaagactgacatcattg

SEQ ID NO: 1207 - RNA, 23 nt, synthetic construct
  source 1..23: mol_type = other RNA
caatgatgtcagtcttctcagcc

SEQ ID NO: 1208 - RNA, 21 nt, synthetic construct
  source 1..21: mol_type = other RNA
gctgagaagactgacatcatt

SEQ ID NO: 1209 - RNA, 23 nt, synthetic construct
  source 1..23: mol_type = other RNA
aatgatgtcagtcttctcagcca

SEQ ID NO: 1210 - RNA, 21 nt, synthetic construct
  source 1..21: mol_type = other RNA
gctcaggttcaaagtgttggt

SEQ ID NO: 1211 - RNA, 23 nt, synthetic construct
  source 1..23: mol_type = other RNA
accaacactttgaacctgagctt

SEQ ID NO: 1212 - RNA, 21 nt, synthetic construct
  source 1..21: mol_type = other RNA
ctcaggttcaaagtgttggta

SEQ ID NO: 1213 - RNA, 23 nt, synthetic construct
  source 1..23: mol_type = other RNA
taccaacactttgaacctgagct

SEQ ID NO: 1214 - RNA, 21 nt, synthetic construct
  source 1..21: mol_type = other RNA
gtaagctcaggttcaaagtgt

SEQ ID NO: 1215 - RNA, 23 nt, synthetic construct
  source 1..23: mol_type = other RNA
acactttgaacctgagcttacaa

SEQ ID NO: 1216 - RNA, 21 nt, synthetic construct
  source 1..21: mol_type = other RNA
tgtaagctcaggttcaaagtg

SEQ ID NO: 1217 - RNA, 23 nt, synthetic construct
  source 1..23: mol_type = other RNA
cactttgaacctgagcttacaat

SEQ ID NO: 1218 - RNA, 21 nt, synthetic construct
  source 1..21: mol_type = other RNA
atgtattacttgacaaagaga

SEQ ID NO: 1219 - RNA, 23 nt, synthetic construct
  source 1..23: mol_type = other RNA
tctctttgtcaagtaatacatgc

SEQ ID NO: 1220 - RNA, 21 nt, synthetic construct
  source 1..21: mol_type = other RNA
tgtattacttgacaaagagac

SEQ ID NO: 1221 - RNA, 23 nt, synthetic construct
  source 1..23: mol_type = other RNA
gtctctttgtcaagtaatacatg

SEQ ID NO: 1222 - RNA, 21 nt, synthetic construct
  source 1..21: mol_type = other RNA
cagcatgtattacttgacaaa

SEQ ID NO: 1223 - RNA, 23 nt, synthetic construct
  source 1..23: mol_type = other RNA
tttgtcaagtaatacatgctgaa

SEQ ID NO: 1224 - RNA, 21 nt, synthetic construct
  source 1..21: mol_type = other RNA
tcagcatgtattacttgacaa

SEQ ID NO: 1225 - RNA, 23 nt, synthetic construct
  source 1..23: mol_type = other RNA
ttgtcaagtaatacatgctgaaa

SEQ ID NO: 1226 - RNA, 21 nt, synthetic construct
  source 1..21: mol_type = other RNA
ctgcaactgtatatctacaag

SEQ ID NO: 1227 - RNA, 23 nt, synthetic construct
  source 1..23: mol_type = other RNA
cttgtagatatacagttgcagcc

SEQ ID NO: 1228 - RNA, 21 nt, synthetic construct
  source 1..21: mol_type = other RNA
tgcaactgtatatctacaagg

SEQ ID NO: 1229 - RNA, 23 nt, synthetic construct
  source 1..23: mol_type = other RNA
ccttgtagatatacagttgcagc

SEQ ID NO: 1230 - RNA, 21 nt, synthetic construct
  source 1..21: mol_type = other RNA
ttggctgcaactgtatatcta

SEQ ID NO: 1231 - RNA, 23 nt, synthetic construct
  source 1..23: mol_type = other RNA
tagatatacagttgcagccaacg

SEQ ID NO: 1232 - RNA, 21 nt, synthetic construct
  source 1..21: mol_type = other RNA
gttggctgcaactgtatatct

SEQ ID NO: 1233 - RNA, 23 nt, synthetic construct
  source 1..23: mol_type = other RNA
agatatacagttgcagccaacga

SEQ ID NO: 1234 - RNA, 21 nt, synthetic construct
  source 1..21: mol_type = other RNA
caaatgatgaagaaactttgg

SEQ ID NO: 1235 - RNA, 23 nt, synthetic construct
  source 1..23: mol_type = other RNA
ccaaagtttcttcatcatttgcc

SEQ ID NO: 1236 - RNA, 21 nt, synthetic construct
  source 1..21: mol_type = other RNA
aaatgatgaagaaactttggc

SEQ ID NO: 1237 - RNA, 23 nt, synthetic construct
  source 1..23: mol_type = other RNA
gccaaagtttcttcatcatttgc

SEQ ID NO: 1238 - RNA, 21 nt, synthetic construct
  source 1..21: mol_type = other RNA
ggggcaaatgatgaagaaact

SEQ ID NO: 1239 - RNA, 23 nt, synthetic construct
  source 1..23: mol_type = other RNA
agtttcttcatcatttgccccag

SEQ ID NO: 1240 - RNA, 21 nt, synthetic construct
  source 1..21: mol_type = other RNA
tggggcaaatgatgaagaaac

SEQ ID NO: 1241 - RNA, 23 nt, synthetic construct
  source 1..23: mol_type = other RNA
gtttcttcatcatttgccccaga

SEQ ID NO: 1242 - RNA, 21 nt, synthetic construct
  source 1..21: mol_type = other RNA
caaagggtgtcgttcttttcc

SEQ ID NO: 1243 - RNA, 23 nt, synthetic construct
  source 1..23: mol_type = other RNA
ggaaaagaacgacaccctttgta

SEQ ID NO: 1244 - RNA, 21 nt, synthetic construct
  source 1..21: mol_type = other RNA
aaagggtgtcgttcttttcca

SEQ ID NO: 1245 - RNA, 23 nt, synthetic construct
  source 1..23: mol_type = other RNA
tggaaaagaacgacaccctttgt

SEQ ID NO: 1246 - RNA, 21 nt, synthetic construct
  source 1..21: mol_type = other RNA
aatacaaagggtgtcgttctt

SEQ ID NO: 1247 - RNA, 23 nt, synthetic construct
  source 1..23: mol_type = other RNA
aagaacgacaccctttgtattga

SEQ ID NO: 1248 - RNA, 21 nt, synthetic construct
  source 1..21: mol_type = other RNA
caatacaaagggtgtcgttct

SEQ ID NO: 1249 - RNA, 23 nt, synthetic construct
  source 1..23: mol_type = other RNA
agaacgacaccctttgtattgaa

SEQ ID NO: 1250 - RNA, 21 nt, synthetic construct
  source 1..21: mol_type = other RNA
aaaggcactgatgttctgaaa

SEQ ID NO: 1251 - RNA, 23 nt, synthetic construct
  source 1..23: mol_type = other RNA
tttcagaacatcagtgcctttcc

SEQ ID NO: 1252 - RNA, 21 nt, synthetic construct
  source 1..21: mol_type = other RNA
aaggcactgatgttctgaaag

SEQ ID NO: 1253 - RNA, 23 nt, synthetic construct
  source 1..23: mol_type = other RNA
ctttcagaacatcagtgcctttc

SEQ ID NO: 1254 - RNA, 21 nt, synthetic construct
  source 1..21: mol_type = other RNA
gcggaaaggcactgatgttct

SEQ ID NO: 1255 - RNA, 23 nt, synthetic construct
  source 1..23: mol_type = other RNA
agaacatcagtgcctttccgcac

SEQ ID NO: 1256 - RNA, 21 nt, synthetic construct
  source 1..21: mol_type = other RNA
tgcggaaaggcactgatgttc

SEQ ID NO: 1257 - RNA, 23 nt, synthetic construct
  source 1..23: mol_type = other RNA
gaacatcagtgcctttccgcaca

SEQ ID NO: 1258 - RNA, 21 nt, synthetic construct
  source 1..21: mol_type = other RNA
aaggatgctccggaatgttgc

SEQ ID NO: 1259 - RNA, 23 nt, synthetic construct
  source 1..23: mol_type = other RNA
gcaacattccggagcatccttgg

SEQ ID NO: 1260 - RNA, 21 nt, synthetic construct
  source 1..21: mol_type = other RNA
aggatgctccggaatgttgct

SEQ ID NO: 1261 - RNA, 23 nt, synthetic construct
  source 1..23: mol_type = other RNA
agcaacattccggagcatccttg

SEQ ID NO: 1262 - RNA, 21 nt, synthetic construct
  source 1..21: mol_type = other RNA
atccaaggatgctccggaatg

SEQ ID NO: 1263 - RNA, 23 nt, synthetic construct
  source 1..23: mol_type = other RNA
cattccggagcatccttggatac

SEQ ID NO: 1264 - RNA, 21 nt, synthetic construct
  source 1..21: mol_type = other RNA
tatccaaggatgctccggaat

SEQ ID NO: 1265 - RNA, 23 nt, synthetic construct
  source 1..23: mol_type = other RNA
attccggagcatccttggataca

SEQ ID NO: 1266 - RNA, 21 nt, synthetic construct
  source 1..21: mol_type = other RNA
aatgggtggcggtaattggtg

SEQ ID NO: 1267 - RNA, 23 nt, synthetic construct
  source 1..23: mol_type = other RNA
caccaattaccgccacccattcc

SEQ ID NO: 1268 - RNA, 21 nt, synthetic construct
  source 1..21: mol_type = other RNA
atgggtggcggtaattggtga

SEQ ID NO: 1269 - RNA, 23 nt, synthetic construct
  source 1..23: mol_type = other RNA
tcaccaattaccgccacccattc

SEQ ID NO: 1270 - RNA, 21 nt, synthetic construct
  source 1..21: mol_type = other RNA
ttggaatgggtggcggtaatt

SEQ ID NO: 1271 - RNA, 23 nt, synthetic construct
  source 1..23: mol_type = other RNA
aattaccgccacccattccaatt

SEQ ID NO: 1272 - RNA, 21 nt, synthetic construct
  source 1..21: mol_type = other RNA
attggaatgggtggcggtaat

SEQ ID NO: 1273 - RNA, 23 nt, synthetic construct
  source 1..23: mol_type = other RNA
attaccgccacccattccaattc

SEQ ID NO: 1274 - RNA, 21 nt, synthetic construct
  source 1..21: mol_type = other RNA
ggaaaggcactgatgttctga

SEQ ID NO: 1275 - RNA, 23 nt, synthetic construct
  source 1..23: mol_type = other RNA
tcagaacatcagtgcctttccgc

SEQ ID NO: 1276 - RNA, 21 nt, synthetic construct
  source 1..21: mol_type = other RNA
gaaaggcactgatgttctgaa

SEQ ID NO: 1277 - RNA, 23 nt, synthetic construct
  source 1..23: mol_type = other RNA
ttcagaacatcagtgcctttccg

SEQ ID NO: 1278 - RNA, 21 nt, synthetic construct
  source 1..21: mol_type = other RNA
gtgcggaaaggcactgatgtt

SEQ ID NO: 1279 - RNA, 23 nt, synthetic construct
  source 1..23: mol_type = other RNA
aacatcagtgcctttccgcacac

SEQ ID NO: 1280 - RNA, 21 nt, synthetic construct
  source 1..21: mol_type = other RNA
tgtgcggaaaggcactgatgt

SEQ ID NO: 1281 - RNA, 23 nt, synthetic construct
  source 1..23: mol_type = other RNA
acatcagtgcctttccgcacacc

SEQ ID NO: 1282 - RNA, 21 nt, synthetic construct
  source 1..21: mol_type = other RNA
aattgtaagctcaggttcaaa

SEQ ID NO: 1283 - RNA, 23 nt, synthetic construct
  source 1..23: mol_type = other RNA
tttgaacctgagcttacaattta

SEQ ID NO: 1284 - RNA, 21 nt, synthetic construct
  source 1..21: mol_type = other RNA
attgtaagctcaggttcaaag

SEQ ID NO: 1285 - RNA, 23 nt, synthetic construct
  source 1..23: mol_type = other RNA
ctttgaacctgagcttacaattt

SEQ ID NO: 1286 - RNA, 21 nt, synthetic construct
  source 1..21: mol_type = other RNA
cttaaattgtaagctcaggtt

SEQ ID NO: 1287 - RNA, 23 nt, synthetic construct
  source 1..23: mol_type = other RNA
aacctgagcttacaatttaagaa

SEQ ID NO: 1288 - RNA, 21 nt, synthetic construct
  source 1..21: mol_type = other RNA
tcttaaattgtaagctcaggt

SEQ ID NO: 1289 - RNA, 23 nt, synthetic construct
  source 1..23: mol_type = other RNA
acctgagcttacaatttaagaac

SEQ ID NO: 1290 - RNA, 21 nt, synthetic construct
  source 1..21: mol_type = other RNA
gcaaacactaaggtgaaaaga

SEQ ID NO: 1291 - RNA, 23 nt, synthetic construct
  source 1..23: mol_type = other RNA
tcttttcaccttagtgtttgcta

SEQ ID NO: 1292 - RNA, 21 nt, synthetic construct
  source 1..21: mol_type = other RNA
caaacactaaggtgaaaagat

SEQ ID NO: 1293 - RNA, 23 nt, synthetic construct
  source 1..23: mol_type = other RNA
atcttttcaccttagtgtttgct

SEQ ID NO: 1294 - RNA, 21 nt, synthetic construct
  source 1..21: mol_type = other RNA
ggtagcaaacactaaggtgaa

SEQ ID NO: 1295 - RNA, 23 nt, synthetic construct
  source 1..23: mol_type = other RNA
ttcaccttagtgtttgctacctc

SEQ ID NO: 1296 - RNA, 21 nt, synthetic construct
  source 1..21: mol_type = other RNA
aggtagcaaacactaaggtga

SEQ ID NO: 1297 - RNA, 23 nt, synthetic construct
  source 1..23: mol_type = other RNA
tcaccttagtgtttgctacctcc

SEQ ID NO: 1298 - RNA, 21 nt, synthetic construct
  source 1..21: mol_type = other RNA
aggtagcaaacactaaggtga

SEQ ID NO: 1299 - RNA, 23 nt, synthetic construct
  source 1..23: mol_type = other RNA
tcaccttagtgtttgctacctcc

SEQ ID NO: 1300 - RNA, 21 nt, synthetic construct
  source 1..21: mol_type = other RNA
ggtagcaaacactaaggtgaa

SEQ ID NO: 1301 - RNA, 23 nt, synthetic construct
  source 1..23: mol_type = other RNA
ttcaccttagtgtttgctacctc

SEQ ID NO: 1302 - RNA, 21 nt, synthetic construct
  source 1..21: mol_type = other RNA
ttggaggtagcaaacactaag

SEQ ID NO: 1303 - RNA, 23 nt, synthetic construct
  source 1..23: mol_type = other RNA
cttagtgtttgctacctccaatt

SEQ ID NO: 1304 - RNA, 21 nt, synthetic construct
  source 1..21: mol_type = other RNA
attggaggtagcaaacactaa

SEQ ID NO: 1305 - RNA, 23 nt, synthetic construct
  source 1..23: mol_type = other RNA
ttagtgtttgctacctccaattt

SEQ ID NO: 1306 - RNA, 21 nt, synthetic construct
  source 1..21: mol_type = other RNA
taaagtgctgtatcctttagt

SEQ ID NO: 1307 - RNA, 23 nt, synthetic construct
  source 1..23: mol_type = other RNA
actaaaggatacagcactttagc

SEQ ID NO: 1308 - RNA, 21 nt, synthetic construct
  source 1..21: mol_type = other RNA
aaagtgctgtatcctttagta

SEQ ID NO: 1309 - RNA, 23 nt, synthetic construct
  source 1..23: mol_type = other RNA
tactaaaggatacagcactttag

SEQ ID NO: 1310 - RNA, 21 nt, synthetic construct
  source 1..21: mol_type = other RNA
aggctaaagtgctgtatcctt

SEQ ID NO: 1311 - RNA, 23 nt, synthetic construct
  source 1..23: mol_type = other RNA
aaggatacagcactttagcctgc

SEQ ID NO: 1312 - RNA, 21 nt, synthetic construct
  source 1..21: mol_type = other RNA
caggctaaagtgctgtatcct

SEQ ID NO: 1313 - RNA, 23 nt, synthetic construct
  source 1..23: mol_type = other RNA
aggatacagcactttagcctgcc

SEQ ID NO: 1314 - RNA, 21 nt, synthetic construct
  source 1..21: mol_type = other RNA
aagacattggtgaggaaaaat

SEQ ID NO: 1315 - RNA, 23 nt, synthetic construct
  source 1..23: mol_type = other RNA
atttttcctcaccaatgtcttgt

SEQ ID NO: 1316 - RNA, 21 nt, synthetic construct
  source 1..21: mol_type = other RNA
agacattggtgaggaaaaatc

SEQ ID NO: 1317 - RNA, 23 nt, synthetic construct
  source 1..23: mol_type = other RNA
gatttttcctcaccaatgtcttg

SEQ ID NO: 1318 - RNA, 21 nt, synthetic construct
  source 1..21: mol_type = other RNA
cgacaagacattggtgaggaa

SEQ ID NO: 1319 - RNA, 23 nt, synthetic construct
  source 1..23: mol_type = other RNA
ttcctcaccaatgtcttgtcgat

SEQ ID NO: 1320 - RNA, 21 nt, synthetic construct
  source 1..21: mol_type = other RNA
tcgacaagacattggtgagga

SEQ ID NO: 1321 - RNA, 23 nt, synthetic construct
  source 1..23: mol_type = other RNA
tcctcaccaatgtcttgtcgatg

SEQ ID NO: 1322 - RNA, 21 nt, synthetic construct
  source 1..21: mol_type = other RNA
aagatgtcctcgagatactaa

SEQ ID NO: 1323 - RNA, 23 nt, synthetic construct
  source 1..23: mol_type = other RNA
ttagtatctcgaggacatcttga

SEQ ID NO: 1324 - RNA, 21 nt, synthetic construct
  source 1..21: mol_type = other RNA
agatgtcctcgagatactaaa

SEQ ID NO: 1325 - RNA, 23 nt, synthetic construct
  source 1..23: mol_type = other RNA
tttagtatctcgaggacatcttg

SEQ ID NO: 1326 - RNA, 21 nt, synthetic construct
  source 1..21: mol_type = other RNA
gttcaagatgtcctcgagata

SEQ ID NO: 1327 - RNA, 23 nt, synthetic construct
  source 1..23: mol_type = other RNA
tatctcgaggacatcttgaacac

SEQ ID NO: 1328 - RNA, 21 nt, synthetic construct
  source 1..21: mol_type = other RNA
tgttcaagatgtcctcgagat

SEQ ID NO: 1329 - RNA, 23 nt, synthetic construct
  source 1..23: mol_type = other RNA
atctcgaggacatcttgaacacc

SEQ ID NO: 1330 - RNA, 21 nt, synthetic construct
  source 1..21: mol_type = other RNA
gagaaaggtgttcaagatgtc

SEQ ID NO: 1331 - RNA, 23 nt, synthetic construct
  source 1..23: mol_type = other RNA
gacatcttgaacacctttctccc

SEQ ID NO: 1332 - RNA, 21 nt, synthetic construct
  source 1..21: mol_type = other RNA
agaaaggtgttcaagatgtcc

SEQ ID NO: 1333 - RNA, 23 nt, synthetic construct
  source 1..23: mol_type = other RNA
ggacatcttgaacacctttctcc

SEQ ID NO: 1334 - RNA, 21 nt, synthetic construct
  source 1..21: mol_type = other RNA
gggggagaaaggtgttcaaga

SEQ ID NO: 1335 - RNA, 23 nt, synthetic construct
  source 1..23: mol_type = other RNA
tcttgaacacctttctccccctg

SEQ ID NO: 1336 - RNA, 21 nt, synthetic construct
  source 1..21: mol_type = other RNA
agggggagaaaggtgttcaag

SEQ ID NO: 1337 - RNA, 23 nt, synthetic construct
  source 1..23: mol_type = other RNA
cttgaacacctttctccccctgg

SEQ ID NO: 1338 - RNA, 21 nt, synthetic construct
  source 1..21: mol_type = other RNA
gctgggaagatatcaaatggc

SEQ ID NO: 1339 - RNA, 23 nt, synthetic construct
  source 1..23: mol_type = other RNA
gccatttgatatcttcccagctg

SEQ ID NO: 1340 - RNA, 21 nt, synthetic construct
  source 1..21: mol_type = other RNA
ctgggaagatatcaaatggct

SEQ ID NO: 1341 - RNA, 23 nt, synthetic construct
  source 1..23: mol_type = other RNA
agccatttgatatcttcccagct

SEQ ID NO: 1342 - RNA, 21 nt, synthetic construct
  source 1..21: mol_type = other RNA
atcagctgggaagatatcaaa

SEQ ID NO: 1343 - RNA, 23 nt, synthetic construct
  source 1..23: mol_type = other RNA
tttgatatcttcccagctgatag

SEQ ID NO: 1344 - RNA, 21 nt, synthetic construct
  source 1..21: mol_type = other RNA
tatcagctgggaagatatcaa

SEQ ID NO: 1345 - RNA, 23 nt, synthetic construct
  source 1..23: mol_type = other RNA
ttgatatcttcccagctgataga

SEQ ID NO: 1346 - RNA, 21 nt, synthetic construct
  source 1..21: mol_type = other RNA
tctgtcgacttctgttttagg

SEQ ID NO: 1347 - RNA, 23 nt, synthetic construct
  source 1..23: mol_type = other RNA
cctaaaacagaagtcgacagatc

SEQ ID NO: 1348 - RNA, 21 nt, synthetic construct
  source 1..21: mol_type = other RNA
ctgtcgacttctgttttagga

SEQ ID NO: 1349 - RNA, 23 nt, synthetic construct
  source 1..23: mol_type = other RNA
tcctaaaacagaagtcgacagat

SEQ ID NO: 1350 - RNA, 21 nt, synthetic construct
  source 1..21: mol_type = other RNA
cagatctgtcgacttctgttt

SEQ ID NO: 1351 - RNA, 23 nt, synthetic construct
  source 1..23: mol_type = other RNA
aaacagaagtcgacagatctgtt

SEQ ID NO: 1352 - RNA, 21 nt, synthetic construct
  source 1..21: mol_type = other RNA
acagatctgtcgacttctgtt

SEQ ID NO: 1353 - RNA, 23 nt, synthetic construct
  source 1..23: mol_type = other RNA
aacagaagtcgacagatctgttt

SEQ ID NO: 1354 - RNA, 21 nt, synthetic construct
  source 1..21: mol_type = other RNA
tacttctttgaatgtagattt

SEQ ID NO: 1355 - RNA, 23 nt, synthetic construct
  source 1..23: mol_type = other RNA
aaatctacattcaaagaagtatc

SEQ ID NO: 1356 - RNA, 21 nt, synthetic construct
  source 1..21: mol_type = other RNA
acttctttgaatgtagatttc

SEQ ID NO: 1357 - RNA, 23 nt, synthetic construct
  source 1..23: mol_type = other RNA
gaaatctacattcaaagaagtat

SEQ ID NO: 1358 - RNA, 21 nt, synthetic construct
  source 1..21: mol_type = other RNA
gtgatacttctttgaatgtag

SEQ ID NO: 1359 - RNA, 23 nt, synthetic construct
  source 1..23: mol_type = other RNA
ctacattcaaagaagtatcacca

SEQ ID NO: 1360 - RNA, 21 nt, synthetic construct
  source 1..21: mol_type = other RNA
ggtgatacttctttgaatgta

SEQ ID NO: 1361 - RNA, 23 nt, synthetic construct
  source 1..23: mol_type = other RNA
tacattcaaagaagtatcaccaa

SEQ ID NO: 1362 - RNA, 21 nt, synthetic construct
  source 1..21: mol_type = other RNA
tgggaagatatcaaatggctg

SEQ ID NO: 1363 - RNA, 23 nt, synthetic construct
  source 1..23: mol_type = other RNA
cagccatttgatatcttcccagc

SEQ ID NO: 1364 - RNA, 21 nt, synthetic construct
  source 1..21: mol_type = other RNA
gggaagatatcaaatggctga

SEQ ID NO: 1365 - RNA, 23 nt, synthetic construct
  source 1..23: mol_type = other RNA
tcagccatttgatatcttcccag

SEQ ID NO: 1366 - RNA, 21 nt, synthetic construct
  source 1..21: mol_type = other RNA
cagctgggaagatatcaaatg

SEQ ID NO: 1367 - RNA, 23 nt, synthetic construct
  source 1..23: mol_type = other RNA
catttgatatcttcccagctgat

SEQ ID NO: 1368 - RNA, 21 nt, synthetic construct
  source 1..21: mol_type = other RNA
tcagctgggaagatatcaaat

SEQ ID NO: 1369 - RNA, 23 nt, synthetic construct
  source 1..23: mol_type = other RNA
atttgatatcttcccagctgata

SEQ ID NO: 1370 - RNA, 21 nt, synthetic construct
  source 1..21: mol_type = other RNA
tccaaagtctatatatgacta

SEQ ID NO: 1371 - RNA, 23 nt, synthetic construct
  source 1..23: mol_type = other RNA
tagtcatatatagactttggaag

SEQ ID NO: 1372 - RNA, 21 nt, synthetic construct
  source 1..21: mol_type = other RNA
ccaaagtctatatatgactat

SEQ ID NO: 1373 - RNA, 23 nt, synthetic construct
  source 1..23: mol_type = other RNA
atagtcatatatagactttggaa

SEQ ID NO: 1374 - RNA, 21 nt, synthetic construct
  source 1..21: mol_type = other RNA
tacttccaaagtctatatatg

SEQ ID NO: 1375 - RNA, 23 nt, synthetic construct
  source 1..23: mol_type = other RNA
catatatagactttggaagtact

SEQ ID NO: 1376 - RNA, 21 nt, synthetic construct
  source 1..21: mol_type = other RNA
gtacttccaaagtctatatat

SEQ ID NO: 1377 - RNA, 23 nt, synthetic construct
  source 1..23: mol_type = other RNA
atatatagactttggaagtactg

SEQ ID NO: 1378 - RNA, 21 nt, synthetic construct
  source 1..21: mol_type = other RNA
ttatgaacaacatgctaaatc

SEQ ID NO: 1379 - RNA, 23 nt, synthetic construct
  source 1..23: mol_type = other RNA
gatttagcatgttgttcataatc

SEQ ID NO: 1380 - RNA, 21 nt, synthetic construct
  source 1..21: mol_type = other RNA
tatgaacaacatgctaaatca

SEQ ID NO: 1381 - RNA, 23 nt, synthetic construct
  source 1..23: mol_type = other RNA
tgatttagcatgttgttcataat

SEQ ID NO: 1382 - RNA, 21 nt, synthetic construct
  source 1..21: mol_type = other RNA
atgattatgaacaacatgcta

SEQ ID NO: 1383 - RNA, 23 nt, synthetic construct
  source 1..23: mol_type = other RNA
tagcatgttgttcataatcattg

SEQ ID NO: 1384 - RNA, 21 nt, synthetic construct
  source 1..21: mol_type = other RNA
aatgattatgaacaacatgct

SEQ ID NO: 1385 - RNA, 23 nt, synthetic construct
  source 1..23: mol_type = other RNA
agcatgttgttcataatcattga

SEQ ID NO: 1386 - RNA, 21 nt, synthetic construct
  source 1..21: mol_type = other RNA
aattccccacttcaatacaaa

SEQ ID NO: 1387 - RNA, 23 nt, synthetic construct
  source 1..23: mol_type = other RNA
tttgtattgaagtggggaattac

SEQ ID NO: 1388 - RNA, 21 nt, synthetic construct
  source 1..21: mol_type = other RNA
attccccacttcaatacaaag

SEQ ID NO: 1389 - RNA, 23 nt, synthetic construct
  source 1..23: mol_type = other RNA
ctttgtattgaagtggggaatta

SEQ ID NO: 1390 - RNA, 21 nt, synthetic construct
  source 1..21: mol_type = other RNA
ctgtaattccccacttcaata

SEQ ID NO: 1391 - RNA, 23 nt, synthetic construct
  source 1..23: mol_type = other RNA
tattgaagtggggaattacagac

SEQ ID NO: 1392 - RNA, 21 nt, synthetic construct
  source 1..21: mol_type = other RNA
tctgtaattccccacttcaat

SEQ ID NO: 1393 - RNA, 23 nt, synthetic construct
  source 1..23: mol_type = other RNA
attgaagtggggaattacagact

SEQ ID NO: 1394 - RNA, 21 nt, synthetic construct
  source 1..21: mol_type = other RNA
tgatgtgcgtaacagattcaa

SEQ ID NO: 1395 - RNA, 23 nt, synthetic construct
  source 1..23: mol_type = other RNA
ttgaatctgttacgcacatcatc

SEQ ID NO: 1396 - RNA, 21 nt, synthetic construct
  source 1..21: mol_type = other RNA
gatgtgcgtaacagattcaaa

SEQ ID NO: 1397 - RNA, 23 nt, synthetic construct
  source 1..23: mol_type = other RNA
tttgaatctgttacgcacatcat

SEQ ID NO: 1398 - RNA, 21 nt, synthetic construct
  source 1..21: mol_type = other RNA
tggatgatgtgcgtaacagat

SEQ ID NO: 1399 - RNA, 23 nt, synthetic construct
  source 1..23: mol_type = other RNA
atctgttacgcacatcatccaga

SEQ ID NO: 1400 - RNA, 21 nt, synthetic construct
  source 1..21: mol_type = other RNA
ctggatgatgtgcgtaacaga

SEQ ID NO: 1401 - RNA, 23 nt, synthetic construct
  source 1..23: mol_type = other RNA
tctgttacgcacatcatccagac

SEQ ID NO: 1402 - RNA, 21 nt, synthetic construct
  source 1..21: mol_type = other RNA
gaatgggtggcggtaattggt

SEQ ID NO: 1403 - RNA, 23 nt, synthetic construct
  source 1..23: mol_type = other RNA
accaattaccgccacccattcca

SEQ ID NO: 1404 - RNA, 21 nt, synthetic construct
  source 1..21: mol_type = other RNA
aatgggtggcggtaattggtg

SEQ ID NO: 1405 - RNA, 23 nt, synthetic construct
  source 1..23: mol_type = other RNA
caccaattaccgccacccattcc

SEQ ID NO: 1406 - RNA, 21 nt, synthetic construct
  source 1..21: mol_type = other RNA
attggaatgggtggcggtaat

SEQ ID NO: 1407 - RNA, 23 nt, synthetic construct
  source 1..23: mol_type = other RNA
attaccgccacccattccaattc

SEQ ID NO: 1408 - RNA, 21 nt, synthetic construct
  source 1..21: mol_type = other RNA
aattggaatgggtggcggtaa

SEQ ID NO: 1409 - RNA, 23 nt, synthetic construct
  source 1..23: mol_type = other RNA
ttaccgccacccattccaattct

SEQ ID NO: 1410 - RNA, 21 nt, synthetic construct
  source 1..21: mol_type = other RNA
tccggaatgttgctgaaacag

SEQ ID NO: 1411 - RNA, 23 nt, synthetic construct
  source 1..23: mol_type = other RNA
ctgtttcagcaacattccggagc

SEQ ID NO: 1412 - RNA, 21 nt, synthetic construct
  source 1..21: mol_type = other RNA
ccggaatgttgctgaaacaga

SEQ ID NO: 1413 - RNA, 23 nt, synthetic construct
  source 1..23: mol_type = other RNA
tctgtttcagcaacattccggag

SEQ ID NO: 1414 - RNA, 21 nt, synthetic construct
  source 1..21: mol_type = other RNA
atgctccggaatgttgctgaa

SEQ ID NO: 1415 - RNA, 23 nt, synthetic construct
  source 1..23: mol_type = other RNA
ttcagcaacattccggagcatcc

SEQ ID NO: 1416 - RNA, 21 nt, synthetic construct
  source 1..21: mol_type = other RNA
gatgctccggaatgttgctga

SEQ ID NO: 1417 - RNA, 23 nt, synthetic construct
  source 1..23: mol_type = other RNA
tcagcaacattccggagcatcct

SEQ ID NO: 1418 - RNA, 21 nt, synthetic construct
  source 1..21: mol_type = other RNA
tgtcctcgagatactaaagga

SEQ ID NO: 1419 - RNA, 23 nt, synthetic construct
  source 1..23: mol_type = other RNA
tcctttagtatctcgaggacatc

SEQ ID NO: 1420 - RNA, 21 nt, synthetic construct
  source 1..21: mol_type = other RNA
gtcctcgagatactaaaggaa

SEQ ID NO: 1421 - RNA, 23 nt, synthetic construct
  source 1..23: mol_type = other RNA
ttcctttagtatctcgaggacat

SEQ ID NO: 1422 - RNA, 21 nt, synthetic construct
  source 1..21: mol_type = other RNA
aagatgtcctcgagatactaa

SEQ ID NO: 1423 - RNA, 23 nt, synthetic construct
  source 1..23: mol_type = other RNA
ttagtatctcgaggacatcttga

SEQ ID NO: 1424 - RNA, 21 nt, synthetic construct
  source 1..21: mol_type = other RNA
caagatgtcctcgagatacta

SEQ ID NO: 1425 - RNA, 23 nt, synthetic construct
  source 1..23: mol_type = other RNA
tagtatctcgaggacatcttgaa

SEQ ID NO: 1426 - RNA, 21 nt, synthetic construct
  source 1..21: mol_type = other RNA
acaacatgctaaatcagtact

SEQ ID NO: 1427 - RNA, 23 nt, synthetic construct
  source 1..23: mol_type = other RNA
agtactgatttagcatgttgttc

SEQ ID NO: 1428 - RNA, 21 nt, synthetic construct
  source 1..21: mol_type = other RNA
caacatgctaaatcagtactt

SEQ ID NO: 1429 - RNA, 23 nt, synthetic construct
  source 1..23: mol_type = other RNA
aagtactgatttagcatgttgtt

SEQ ID NO: 1430 - RNA, 21 nt, synthetic construct
  source 1..21: mol_type = other RNA
atgaacaacatgctaaatcag

SEQ ID NO: 1431 - RNA, 23 nt, synthetic construct
  source 1..23: mol_type = other RNA
ctgatttagcatgttgttcataa

SEQ ID NO: 1432 - RNA, 21 nt, synthetic construct
  source 1..21: mol_type = other RNA
tatgaacaacatgctaaatca

SEQ ID NO: 1433 - RNA, 23 nt, synthetic construct
  source 1..23: mol_type = other RNA
tgatttagcatgttgttcataat

SEQ ID NO: 1434 - RNA, 21 nt, synthetic construct
  source 1..21: mol_type = other RNA
gccaaggctgtgtttgtgggg

SEQ ID NO: 1435 - RNA, 23 nt, synthetic construct
  source 1..23: mol_type = other RNA
ccccacaaacacagccttggcgc

SEQ ID NO: 1436 - RNA, 21 nt, synthetic construct
  source 1..21: mol_type = other RNA
ccaaggctgtgtttgtgggga

SEQ ID NO: 1437 - RNA, 23 nt, synthetic construct
  source 1..23: mol_type = other RNA
tccccacaaacacagccttggcg

SEQ ID NO: 1438 - RNA, 21 nt, synthetic construct
  source 1..21: mol_type = other RNA
tggcgccaaggctgtgtttgt

SEQ ID NO: 1439 - RNA, 23 nt, synthetic construct
  source 1..23: mol_type = other RNA
acaaacacagccttggcgccaag

SEQ ID NO: 1440 - RNA, 21 nt, synthetic construct
  source 1..21: mol_type = other RNA
ttggcgccaaggctgtgtttg

SEQ ID NO: 1441 - RNA, 23 nt, synthetic construct
  source 1..23: mol_type = other RNA
caaacacagccttggcgccaaga

SEQ ID NO: 1442 - RNA, 21 nt, synthetic construct
  source 1..21: mol_type = other RNA
tgaaagctctggctcttggcg

SEQ ID NO: 1443 - RNA, 23 nt, synthetic construct
  source 1..23: mol_type = other RNA
cgccaagagccagagctttcaga

SEQ ID NO: 1444 - RNA, 21 nt, synthetic construct
  source 1..21: mol_type = other RNA
gaaagctctggctcttggcgc

SEQ ID NO: 1445 - RNA, 23 nt, synthetic construct
  source 1..23: mol_type = other RNA
gcgccaagagccagagctttcag

SEQ ID NO: 1446 - RNA, 21 nt, synthetic construct
  source 1..21: mol_type = other RNA
gttctgaaagctctggctctt

SEQ ID NO: 1447 - RNA, 23 nt, synthetic construct
  source 1..23: mol_type = other RNA
aagagccagagctttcagaacat

SEQ ID NO: 1448 - RNA, 21 nt, synthetic construct
  source 1..21: mol_type = other RNA
tgttctgaaagctctggctct

SEQ ID NO: 1449 - RNA, 23 nt, synthetic construct
  source 1..23: mol_type = other RNA
agagccagagctttcagaacatc

SEQ ID NO: 1450 - RNA, 21 nt, synthetic construct
  source 1..21: mol_type = other RNA
cagccactattgatgttctgc

SEQ ID NO: 1451 - RNA, 23 nt, synthetic construct
  source 1..23: mol_type = other RNA
gcagaacatcaatagtggctggc

SEQ ID NO: 1452 - RNA, 21 nt, synthetic construct
  source 1..21: mol_type = other RNA
agccactattgatgttctgcc

SEQ ID NO: 1453 - RNA, 23 nt, synthetic construct
  source 1..23: mol_type = other RNA
ggcagaacatcaatagtggctgg

SEQ ID NO: 1454 - RNA, 21 nt, synthetic construct
  source 1..21: mol_type = other RNA
gtgccagccactattgatgtt

SEQ ID NO: 1455 - RNA, 23 nt, synthetic construct
  source 1..23: mol_type = other RNA
aacatcaatagtggctggcaccc

SEQ ID NO: 1456 - RNA, 21 nt, synthetic construct
  source 1..21: mol_type = other RNA
ggtgccagccactattgatgt

SEQ ID NO: 1457 - RNA, 23 nt, synthetic construct
  source 1..23: mol_type = other RNA
acatcaatagtggctggcacccc

SEQ ID NO: 1458 - RNA, 21 nt, synthetic construct
  source 1..21: mol_type = other RNA
acaaggaccgagaagtcacca

SEQ ID NO: 1459 - RNA, 23 nt, synthetic construct
  source 1..23: mol_type = other RNA
tggtgacttctcggtccttgtag

SEQ ID NO: 1460 - RNA, 21 nt, synthetic construct
  source 1..21: mol_type = other RNA
caaggaccgagaagtcaccaa

SEQ ID NO: 1461 - RNA, 23 nt, synthetic construct
  source 1..23: mol_type = other RNA
ttggtgacttctcggtccttgta

SEQ ID NO: 1462 - RNA, 21 nt, synthetic construct
  source 1..21: mol_type = other RNA
atctacaaggaccgagaagtc

SEQ ID NO: 1463 - RNA, 23 nt, synthetic construct
  source 1..23: mol_type = other RNA
gacttctcggtccttgtagatat

SEQ ID NO: 1464 - RNA, 21 nt, synthetic construct
  source 1..21: mol_type = other RNA
tatctacaaggaccgagaagt

SEQ ID NO: 1465 - RNA, 23 nt, synthetic construct
  source 1..23: mol_type = other RNA
acttctcggtccttgtagatata

SEQ ID NO: 1466 - RNA, 21 nt, synthetic construct
  source 1..21: mol_type = other RNA
cagaatgtgaaagtcatcgac

SEQ ID NO: 1467 - RNA, 23 nt, synthetic construct
  source 1..23: mol_type = other RNA
gtcgatgactttcacattctggc

SEQ ID NO: 1468 - RNA, 21 nt, synthetic construct
  source 1..21: mol_type = other RNA
agaatgtgaaagtcatcgaca

SEQ ID NO: 1469 - RNA, 23 nt, synthetic construct
  source 1..23: mol_type = other RNA
tgtcgatgactttcacattctgg

SEQ ID NO: 1470 - RNA, 21 nt, synthetic construct
  source 1..21: mol_type = other RNA
gtgccagaatgtgaaagtcat

SEQ ID NO: 1471 - RNA, 23 nt, synthetic construct
  source 1..23: mol_type = other RNA
atgactttcacattctggcaccc

SEQ ID NO: 1472 - RNA, 21 nt, synthetic construct
  source 1..21: mol_type = other RNA
ggtgccagaatgtgaaagtca

SEQ ID NO: 1473 - RNA, 23 nt, synthetic construct
  source 1..23: mol_type = other RNA
tgactttcacattctggcaccca

SEQ ID NO: 1474 - RNA, 21 nt, synthetic construct
  source 1..21: mol_type = other RNA
agatgtcctcgagatactaaa

SEQ ID NO: 1475 - RNA, 23 nt, synthetic construct
  source 1..23: mol_type = other RNA
tttagtatctcgaggacatcttg

SEQ ID NO: 1476 - RNA, 21 nt, synthetic construct
  source 1..21: mol_type = other RNA
gatgtcctcgagatactaaag

SEQ ID NO: 1477 - RNA, 23 nt, synthetic construct
  source 1..23: mol_type = other RNA
ctttagtatctcgaggacatctt

SEQ ID NO: 1478 - RNA, 21 nt, synthetic construct
  source 1..21: mol_type = other RNA
ttcaagatgtcctcgagatac

SEQ ID NO: 1479 - RNA, 23 nt, synthetic construct
  source 1..23: mol_type = other RNA
gtatctcgaggacatcttgaaca

SEQ ID NO: 1480 - RNA, 21 nt, synthetic construct
  source 1..21: mol_type = other RNA
gttcaagatgtcctcgagata

SEQ ID NO: 1481 - RNA, 23 nt, synthetic construct
  source 1..23: mol_type = other RNA
tatctcgaggacatcttgaacac

SEQ ID NO: 1482 - RNA, 21 nt, synthetic construct
  source 1..21: mol_type = other RNA
gtggacttgctgcatatgtgg

SEQ ID NO: 1483 - RNA, 23 nt, synthetic construct
  source 1..23: mol_type = other RNA
ccacatatgcagcaagtccactg

SEQ ID NO: 1484 - RNA, 21 nt, synthetic construct
  source 1..21: mol_type = other RNA
tggacttgctgcatatgtggc

SEQ ID NO: 1485 - RNA, 23 nt, synthetic construct
  source 1..23: mol_type = other RNA
gccacatatgcagcaagtccact

SEQ ID NO: 1486 - RNA, 21 nt, synthetic construct
  source 1..21: mol_type = other RNA
gacagtggacttgctgcatat

SEQ ID NO: 1487 - RNA, 23 nt, synthetic construct
  source 1..23: mol_type = other RNA
atatgcagcaagtccactgtcgt

SEQ ID NO: 1488 - RNA, 21 nt, synthetic construct
  source 1..21: mol_type = other RNA
cgacagtggacttgctgcata

SEQ ID NO: 1489 - RNA, 23 nt, synthetic construct
  source 1..23: mol_type = other RNA
tatgcagcaagtccactgtcgtc

SEQ ID NO: 1490 - RNA, 21 nt, synthetic construct
  source 1..21: mol_type = other RNA
aaccagtactttatcattttc

SEQ ID NO: 1491 - RNA, 23 nt, synthetic construct
  source 1..23: mol_type = other RNA
gaaaatgataaagtactggtttc

SEQ ID NO: 1492 - RNA, 21 nt, synthetic construct
  source 1..21: mol_type = other RNA
accagtactttatcattttct

SEQ ID NO: 1493 - RNA, 23 nt, synthetic construct
  source 1..23: mol_type = other RNA
agaaaatgataaagtactggttt

SEQ ID NO: 1494 - RNA, 21 nt, synthetic construct
  source 1..21: mol_type = other RNA
ttgaaaccagtactttatcat

SEQ ID NO: 1495 - RNA, 23 nt, synthetic construct
  source 1..23: mol_type = other RNA
atgataaagtactggtttcaaaa

SEQ ID NO: 1496 - RNA, 21 nt, synthetic construct
  source 1..21: mol_type = other RNA
tttgaaaccagtactttatca

SEQ ID NO: 1497 - RNA, 23 nt, synthetic construct
  source 1..23: mol_type = other RNA
tgataaagtactggtttcaaaat

SEQ ID NO: 1498 - RNA, 21 nt, synthetic construct
  source 1..21: mol_type = other RNA
cgagaagtcaccaagaagcta

SEQ ID NO: 1499 - RNA, 23 nt, synthetic construct
  source 1..23: mol_type = other RNA
tagcttcttggtgacttctcggt

SEQ ID NO: 1500 - RNA, 21 nt, synthetic construct
  source 1..21: mol_type = other RNA
gagaagtcaccaagaagctag

SEQ ID NO: 1501 - RNA, 23 nt, synthetic construct
  source 1..23: mol_type = other RNA
ctagcttcttggtgacttctcgg

SEQ ID NO: 1502 - RNA, 21 nt, synthetic construct
  source 1..21: mol_type = other RNA
ggaccgagaagtcaccaagaa

SEQ ID NO: 1503 - RNA, 23 nt, synthetic construct
  source 1..23: mol_type = other RNA
ttcttggtgacttctcggtcctt

SEQ ID NO: 1504 - RNA, 21 nt, synthetic construct
  source 1..21: mol_type = other RNA
aggaccgagaagtcaccaaga

SEQ ID NO: 1505 - RNA, 23 nt, synthetic construct
  source 1..23: mol_type = other RNA
tcttggtgacttctcggtccttg

SEQ ID NO: 1506 - RNA, 21 nt, synthetic construct
  source 1..21: mol_type = other RNA
tcaaagtgttggtaatgcctg

SEQ ID NO: 1507 - RNA, 23 nt, synthetic construct
  source 1..23: mol_type = other RNA
caggcattaccaacactttgaac

SEQ ID NO: 1508 - RNA, 21 nt, synthetic construct
  source 1..21: mol_type = other RNA
caaagtgttggtaatgcctga

SEQ ID NO: 1509 - RNA, 23 nt, synthetic construct
  source 1..23: mol_type = other RNA
tcaggcattaccaacactttgaa

SEQ ID NO: 1510 - RNA, 21 nt, synthetic construct
  source 1..21: mol_type = other RNA
aggttcaaagtgttggtaatg

SEQ ID NO: 1511 - RNA, 23 nt, synthetic construct
  source 1..23: mol_type = other RNA
cattaccaacactttgaacctga

SEQ ID NO: 1512 - RNA, 21 nt, synthetic construct
  source 1..21: mol_type = other RNA
caggttcaaagtgttggtaat

SEQ ID NO: 1513 - RNA, 23 nt, synthetic construct
  source 1..23: mol_type = other RNA
attaccaacactttgaacctgag

SEQ ID NO: 1514 - RNA, 21 nt, synthetic construct
  source 1..21: mol_type = other RNA
tattacttgacaaagagacac

SEQ ID NO: 1515 - RNA, 23 nt, synthetic construct
  source 1..23: mol_type = other RNA
gtgtctctttgtcaagtaataca

SEQ ID NO: 1516 - RNA, 21 nt, synthetic construct
  source 1..21: mol_type = other RNA
attacttgacaaagagacact

SEQ ID NO: 1517 - RNA, 23 nt, synthetic construct
  source 1..23: mol_type = other RNA
agtgtctctttgtcaagtaatac

SEQ ID NO: 1518 - RNA, 21 nt, synthetic construct
  source 1..21: mol_type = other RNA
catgtattacttgacaaagag

SEQ ID NO: 1519 - RNA, 23 nt, synthetic construct
  source 1..23: mol_type = other RNA
ctctttgtcaagtaatacatgct

SEQ ID NO: 1520 - RNA, 21 nt, synthetic construct
  source 1..21: mol_type = other RNA
gcatgtattacttgacaaaga

SEQ ID NO: 1521 - RNA, 23 nt, synthetic construct
  source 1..23: mol_type = other RNA
tctttgtcaagtaatacatgctg

SEQ ID NO: 1522 - RNA, 21 nt, synthetic construct
  source 1..21: mol_type = other RNA
aaagtcatcgacaagacattg

SEQ ID NO: 1523 - RNA, 23 nt, synthetic construct
  source 1..23: mol_type = other RNA
caatgtcttgtcgatgactttca

SEQ ID NO: 1524 - RNA, 21 nt, synthetic construct
  source 1..21: mol_type = other RNA
aagtcatcgacaagacattgg

SEQ ID NO: 1525 - RNA, 23 nt, synthetic construct
  source 1..23: mol_type = other RNA
ccaatgtcttgtcgatgactttc

SEQ ID NO: 1526 - RNA, 21 nt, synthetic construct
  source 1..21: mol_type = other RNA
tgtgaaagtcatcgacaagac

SEQ ID NO: 1527 - RNA, 23 nt, synthetic construct
  source 1..23: mol_type = other RNA
gtcttgtcgatgactttcacatt

SEQ ID NO: 1528 - RNA, 21 nt, synthetic construct
  source 1..21: mol_type = other RNA
atgtgaaagtcatcgacaaga

SEQ ID NO: 1529 - RNA, 23 nt, synthetic construct
  source 1..23: mol_type = other RNA
tcttgtcgatgactttcacattc

SEQ ID NO: 1530 - RNA, 21 nt, synthetic construct
  source 1..21: mol_type = other RNA
atatgtggctaaagcaataga

SEQ ID NO: 1531 - RNA, 23 nt, synthetic construct
  source 1..23: mol_type = other RNA
tctattgctttagccacatatgc

SEQ ID NO: 1532 - RNA, 21 nt, synthetic construct
  source 1..21: mol_type = other RNA
tatgtggctaaagcaatagac

SEQ ID NO: 1533 - RNA, 23 nt, synthetic construct
  source 1..23: mol_type = other RNA
gtctattgctttagccacatatg

SEQ ID NO: 1534 - RNA, 21 nt, synthetic construct
  source 1..21: mol_type = other RNA
ctgcatatgtggctaaagcaa

SEQ ID NO: 1535 - RNA, 23 nt, synthetic construct
  source 1..23: mol_type = other RNA
ttgctttagccacatatgcagca

SEQ ID NO: 1536 - RNA, 21 nt, synthetic construct
  source 1..21: mol_type = other RNA
gctgcatatgtggctaaagca

SEQ ID NO: 1537 - RNA, 23 nt, synthetic construct
  source 1..23: mol_type = other RNA
tgctttagccacatatgcagcaa

SEQ ID NO: 1538 - RNA, 21 nt, synthetic construct
  source 1..21: mol_type = other RNA
agacgacagtggacttgctgc

SEQ ID NO: 1539 - RNA, 23 nt, synthetic construct
  source 1..23: mol_type = other RNA
gcagcaagtccactgtcgtctcc

SEQ ID NO: 1540 - RNA, 21 nt, synthetic construct
  source 1..21: mol_type = other RNA
gacgacagtggacttgctgca

SEQ ID NO: 1541 - RNA, 23 nt, synthetic construct
  source 1..23: mol_type = other RNA
tgcagcaagtccactgtcgtctc

SEQ ID NO: 1542 - RNA, 21 nt, synthetic construct
  source 1..21: mol_type = other RNA
ttggagacgacagtggacttg

SEQ ID NO: 1543 - RNA, 23 nt, synthetic construct
  source 1..23: mol_type = other RNA
caagtccactgtcgtctccaaaa

SEQ ID NO: 1544 - RNA, 21 nt, synthetic construct
  source 1..21: mol_type = other RNA
tttggagacgacagtggactt

SEQ ID NO: 1545 - RNA, 23 nt, synthetic construct
  source 1..23: mol_type = other RNA
aagtccactgtcgtctccaaaat

SEQ ID NO: 1546 - RNA, 21 nt, synthetic construct
  source 1..21: mol_type = other RNA
ggccacctcctcaattgaaga

SEQ ID NO: 1547 - RNA, 23 nt, synthetic construct
  source 1..23: mol_type = other RNA
tcttcaattgaggaggtggccca

SEQ ID NO: 1548 - RNA, 21 nt, synthetic construct
  source 1..21: mol_type = other RNA
gccacctcctcaattgaagaa

SEQ ID NO: 1549 - RNA, 23 nt, synthetic construct
  source 1..23: mol_type = other RNA
ttcttcaattgaggaggtggccc

SEQ ID NO: 1550 - RNA, 21 nt, synthetic construct
  source 1..21: mol_type = other RNA
cctgggccacctcctcaattg

SEQ ID NO: 1551 - RNA, 23 nt, synthetic construct
  source 1..23: mol_type = other RNA
caattgaggaggtggcccaggaa

SEQ ID NO: 1552 - RNA, 21 nt, synthetic construct
  source 1..21: mol_type = other RNA
tcctgggccacctcctcaatt

SEQ ID NO: 1553 - RNA, 23 nt, synthetic construct
  source 1..23: mol_type = other RNA
aattgaggaggtggcccaggaac

SEQ ID NO: 1554 - RNA, 21 nt, synthetic construct
  source 1..21: mol_type = other RNA
tgtatgttacttcttagagag

SEQ ID NO: 1555 - RNA, 23 nt, synthetic construct
  source 1..23: mol_type = other RNA
ctctctaagaagtaacatacatc

SEQ ID NO: 1556 - RNA, 21 nt, synthetic construct
  source 1..21: mol_type = other RNA
gtatgttacttcttagagaga

SEQ ID NO: 1557 - RNA, 23 nt, synthetic construct
  source 1..23: mol_type = other RNA
tctctctaagaagtaacatacat

SEQ ID NO: 1558 - RNA, 21 nt, synthetic construct
  source 1..21: mol_type = other RNA
aggatgtatgttacttcttag

SEQ ID NO: 1559 - RNA, 23 nt, synthetic construct
  source 1..23: mol_type = other RNA
ctaagaagtaacatacatcctaa

SEQ ID NO: 1560 - RNA, 21 nt, synthetic construct
  source 1..21: mol_type = other RNA
taggatgtatgttacttctta

SEQ ID NO: 1561 - RNA, 23 nt, synthetic construct
  source 1..23: mol_type = other RNA
taagaagtaacatacatcctaaa

SEQ ID NO: 1562 - RNA, 21 nt, synthetic construct
  source 1..21: mol_type = other RNA
aaatgttttaggatgtatgtt

SEQ ID NO: 1563 - RNA, 23 nt, synthetic construct
  source 1..23: mol_type = other RNA
aacatacatcctaaaacatttgg

SEQ ID NO: 1564 - RNA, 21 nt, synthetic construct
  source 1..21: mol_type = other RNA
aatgttttaggatgtatgtta

SEQ ID NO: 1565 - RNA, 23 nt, synthetic construct
  source 1..23: mol_type = other RNA
taacatacatcctaaaacatttg

SEQ ID NO: 1566 - RNA, 21 nt, synthetic construct
  source 1..21: mol_type = other RNA
atccaaatgttttaggatgta

SEQ ID NO: 1567 - RNA, 23 nt, synthetic construct
  source 1..23: mol_type = other RNA
tacatcctaaaacatttggatat

SEQ ID NO: 1568 - RNA, 21 nt, synthetic construct
  source 1..21: mol_type = other RNA
tatccaaatgttttaggatgt

SEQ ID NO: 1569 - RNA, 23 nt, synthetic construct
  source 1..23: mol_type = other RNA
acatcctaaaacatttggatata

SEQ ID NO: 1570 - RNA, 21 nt, synthetic construct
  source 1..21: mol_type = other RNA
atgggtggcggtaattggtga

SEQ ID NO: 1571 - RNA, 23 nt, synthetic construct
  source 1..23: mol_type = other RNA
tcaccaattaccgccacccattc

SEQ ID NO: 1572 - RNA, 21 nt, synthetic construct
  source 1..21: mol_type = other RNA
tgggtggcggtaattggtgat

SEQ ID NO: 1573 - RNA, 23 nt, synthetic construct
  source 1..23: mol_type = other RNA
atcaccaattaccgccacccatt

SEQ ID NO: 1574 - RNA, 21 nt, synthetic construct
  source 1..21: mol_type = other RNA
tggaatgggtggcggtaattg

SEQ ID NO: 1575 - RNA, 23 nt, synthetic construct
  source 1..23: mol_type = other RNA
caattaccgccacccattccaat

SEQ ID NO: 1576 - RNA, 21 nt, synthetic construct
  source 1..21: mol_type = other RNA
ttggaatgggtggcggtaatt

SEQ ID NO: 1577 - RNA, 23 nt, synthetic construct
  source 1..23: mol_type = other RNA
aattaccgccacccattccaatt

SEQ ID NO: 1578 - RNA, 21 nt, synthetic construct
  source 1..21: mol_type = other RNA
ttcaaagtgttggtaatgcct

SEQ ID NO: 1579 - RNA, 23 nt, synthetic construct
  source 1..23: mol_type = other RNA
aggcattaccaacactttgaacc

SEQ ID NO: 1580 - RNA, 21 nt, synthetic construct
  source 1..21: mol_type = other RNA
tcaaagtgttggtaatgcctg

SEQ ID NO: 1581 - RNA, 23 nt, synthetic construct
  source 1..23: mol_type = other RNA
caggcattaccaacactttgaac

SEQ ID NO: 1582 - RNA, 21 nt, synthetic construct
  source 1..21: mol_type = other RNA
caggttcaaagtgttggtaat

SEQ ID NO: 1583 - RNA, 23 nt, synthetic construct
  source 1..23: mol_type = other RNA
attaccaacactttgaacctgag

SEQ ID NO: 1584 - RNA, 21 nt, synthetic construct
  source 1..21: mol_type = other RNA
tcaggttcaaagtgttggtaa

SEQ ID NO: 1585 - RNA, 23 nt, synthetic construct
  source 1..23: mol_type = other RNA
ttaccaacactttgaacctgagc

SEQ ID NO: 1586 - RNA, 21 nt, synthetic construct
  source 1..21: mol_type = other RNA
ccacctcctcaattgaagaag

SEQ ID NO: 1587 - RNA, 23 nt, synthetic construct
  source 1..23: mol_type = other RNA
cttcttcaattgaggaggtggcc

SEQ ID NO: 1588 - RNA, 21 nt, synthetic construct
  source 1..21: mol_type = other RNA
cacctcctcaattgaagaagt

SEQ ID NO: 1589 - RNA, 23 nt, synthetic construct
  source 1..23: mol_type = other RNA
acttcttcaattgaggaggtggc

SEQ ID NO: 1590 - RNA, 21 nt, synthetic construct
  source 1..21: mol_type = other RNA
tgggccacctcctcaattgaa

SEQ ID NO: 1591 - RNA, 23 nt, synthetic construct
  source 1..23: mol_type = other RNA
ttcaattgaggaggtggcccagg

SEQ ID NO: 1592 - RNA, 21 nt, synthetic construct
  source 1..21: mol_type = other RNA
ctgggccacctcctcaattga

SEQ ID NO: 1593 - RNA, 23 nt, synthetic construct
  source 1..23: mol_type = other RNA
tcaattgaggaggtggcccagga

SEQ ID NO: 1594 - RNA, 21 nt, synthetic construct
  source 1..21: mol_type = other RNA
gagtgggtgccagaatgtgaa

SEQ ID NO: 1595 - RNA, 23 nt, synthetic construct
  source 1..23: mol_type = other RNA
ttcacattctggcacccactcag

SEQ ID NO: 1596 - RNA, 21 nt, synthetic construct
  source 1..21: mol_type = other RNA
agtgggtgccagaatgtgaaa

SEQ ID NO: 1597 - RNA, 23 nt, synthetic construct
  source 1..23: mol_type = other RNA
tttcacattctggcacccactca

SEQ ID NO: 1598 - RNA, 21 nt, synthetic construct
  source 1..21: mol_type = other RNA
ctctgagtgggtgccagaatg

SEQ ID NO: 1599 - RNA, 23 nt, synthetic construct
  source 1..23: mol_type = other RNA
cattctggcacccactcagagcc

SEQ ID NO: 1600 - RNA, 21 nt, synthetic construct
  source 1..21: mol_type = other RNA
gctctgagtgggtgccagaat

SEQ ID NO: 1601 - RNA, 23 nt, synthetic construct
  source 1..23: mol_type = other RNA
attctggcacccactcagagcca

SEQ ID NO: 1602 - RNA, 21 nt, synthetic construct
  source 1..21: mol_type = other RNA
gcactgatgttctgaaagctc

SEQ ID NO: 1603 - RNA, 23 nt, synthetic construct
  source 1..23: mol_type = other RNA
gagctttcagaacatcagtgcct

SEQ ID NO: 1604 - RNA, 21 nt, synthetic construct
  source 1..21: mol_type = other RNA
cactgatgttctgaaagctct

SEQ ID NO: 1605 - RNA, 23 nt, synthetic construct
  source 1..23: mol_type = other RNA
agagctttcagaacatcagtgcc

SEQ ID NO: 1606 - RNA, 21 nt, synthetic construct
  source 1..21: mol_type = other RNA
aaaggcactgatgttctgaaa

SEQ ID NO: 1607 - RNA, 23 nt, synthetic construct
  source 1..23: mol_type = other RNA
tttcagaacatcagtgcctttcc

SEQ ID NO: 1608 - RNA, 21 nt, synthetic construct
  source 1..21: mol_type = other RNA
gaaaggcactgatgttctgaa

SEQ ID NO: 1609 - RNA, 23 nt, synthetic construct
  source 1..23: mol_type = other RNA
ttcagaacatcagtgcctttccg

SEQ ID NO: 1610 - RNA, 21 nt, synthetic construct
  source 1..21: mol_type = other RNA
gggaaggtggaagtcttcctg

SEQ ID NO: 1611 - RNA, 23 nt, synthetic construct
  source 1..23: mol_type = other RNA
caggaagacttccaccttccctt

SEQ ID NO: 1612 - RNA, 21 nt, synthetic construct
  source 1..21: mol_type = other RNA
ggaaggtggaagtcttcctgg

SEQ ID NO: 1613 - RNA, 23 nt, synthetic construct
  source 1..23: mol_type = other RNA
ccaggaagacttccaccttccct

SEQ ID NO: 1614 - RNA, 21 nt, synthetic construct
  source 1..21: mol_type = other RNA
ggaagggaaggtggaagtctt

SEQ ID NO: 1615 - RNA, 23 nt, synthetic construct
  source 1..23: mol_type = other RNA
aagacttccaccttcccttccac

SEQ ID NO: 1616 - RNA, 21 nt, synthetic construct
  source 1..21: mol_type = other RNA
tggaagggaaggtggaagtct

SEQ ID NO: 1617 - RNA, 23 nt, synthetic construct
  source 1..23: mol_type = other RNA
agacttccaccttcccttccaca

SEQ ID NO: 1618 - RNA, 21 nt, synthetic construct
  source 1..21: mol_type = other RNA
tgctaaatcagtacttccaaa

SEQ ID NO: 1619 - RNA, 23 nt, synthetic construct
  source 1..23: mol_type = other RNA
tttggaagtactgatttagcatg

SEQ ID NO: 1620 - RNA, 21 nt, synthetic construct
  source 1..21: mol_type = other RNA
gctaaatcagtacttccaaag

SEQ ID NO: 1621 - RNA, 23 nt, synthetic construct
  source 1..23: mol_type = other RNA
ctttggaagtactgatttagcat

SEQ ID NO: 1622 - RNA, 21 nt, synthetic construct
  source 1..21: mol_type = other RNA
aacatgctaaatcagtacttc

SEQ ID NO: 1623 - RNA, 23 nt, synthetic construct
  source 1..23: mol_type = other RNA
gaagtactgatttagcatgttgt

SEQ ID NO: 1624 - RNA, 21 nt, synthetic construct
  source 1..21: mol_type = other RNA
caacatgctaaatcagtactt

SEQ ID NO: 1625 - RNA, 23 nt, synthetic construct
  source 1..23: mol_type = other RNA
aagtactgatttagcatgttgtt

SEQ ID NO: 1626 - RNA, 21 nt, synthetic construct
  source 1..21: mol_type = other RNA
ccacaactcaggatgaaaaat

SEQ ID NO: 1627 - RNA, 23 nt, synthetic construct
  source 1..23: mol_type = other RNA
atttttcatcctgagttgtggcg

SEQ ID NO: 1628 - RNA, 21 nt, synthetic construct
  source 1..21: mol_type = other RNA
cacaactcaggatgaaaaatt

SEQ ID NO: 1629 - RNA, 23 nt, synthetic construct
  source 1..23: mol_type = other RNA
aatttttcatcctgagttgtggc

SEQ ID NO: 1630 - RNA, 21 nt, synthetic construct
  source 1..21: mol_type = other RNA
gccgccacaactcaggatgaa

SEQ ID NO: 1631 - RNA, 23 nt, synthetic construct
  source 1..23: mol_type = other RNA
ttcatcctgagttgtggcggcag

SEQ ID NO: 1632 - RNA, 21 nt, synthetic construct
  source 1..21: mol_type = other RNA
tgccgccacaactcaggatga

SEQ ID NO: 1633 - RNA, 23 nt, synthetic construct
  source 1..23: mol_type = other RNA
tcatcctgagttgtggcggcagt

SEQ ID NO: 1634 - RNA, 21 nt, synthetic construct
  source 1..21: mol_type = other RNA
gcaaccgtctggatgatgtgc

SEQ ID NO: 1635 - RNA, 23 nt, synthetic construct
  source 1..23: mol_type = other RNA
gcacatcatccagacggttgccc

SEQ ID NO: 1636 - RNA, 21 nt, synthetic construct
  source 1..21: mol_type = other RNA
caaccgtctggatgatgtgcg

SEQ ID NO: 1637 - RNA, 23 nt, synthetic construct
  source 1..23: mol_type = other RNA
cgcacatcatccagacggttgcc

SEQ ID NO: 1638 - RNA, 21 nt, synthetic construct
  source 1..21: mol_type = other RNA
ctgggcaaccgtctggatgat

SEQ ID NO: 1639 - RNA, 23 nt, synthetic construct
  source 1..23: mol_type = other RNA
atcatccagacggttgcccaggt

SEQ ID NO: 1640 - RNA, 21 nt, synthetic construct
  source 1..21: mol_type = other RNA
cctgggcaaccgtctggatga

SEQ ID NO: 1641 - RNA, 23 nt, synthetic construct
  source 1..23: mol_type = other RNA
tcatccagacggttgcccaggta

SEQ ID NO: 1642 - RNA, 21 nt, synthetic construct
  source 1..21: mol_type = other RNA
gcaaatgatgaagaaactttg

SEQ ID NO: 1643 - RNA, 23 nt, synthetic construct
  source 1..23: mol_type = other RNA
caaagtttcttcatcatttgccc

SEQ ID NO: 1644 - RNA, 21 nt, synthetic construct
  source 1..21: mol_type = other RNA
caaatgatgaagaaactttgg

SEQ ID NO: 1645 - RNA, 23 nt, synthetic construct
  source 1..23: mol_type = other RNA
ccaaagtttcttcatcatttgcc

SEQ ID NO: 1646 - RNA, 21 nt, synthetic construct
  source 1..21: mol_type = other RNA
tggggcaaatgatgaagaaac

SEQ ID NO: 1647 - RNA, 23 nt, synthetic construct
  source 1..23: mol_type = other RNA
gtttcttcatcatttgccccaga

SEQ ID NO: 1648 - RNA, 21 nt, synthetic construct
  source 1..21: mol_type = other RNA
ctggggcaaatgatgaagaaa

SEQ ID NO: 1649 - RNA, 23 nt, synthetic construct
  source 1..23: mol_type = other RNA
tttcttcatcatttgccccagac

SEQ ID NO: 1650 - RNA, 21 nt, synthetic construct
  source 1..21: mol_type = other RNA
ccaaggctgtgtttgtgggga

SEQ ID NO: 1651 - RNA, 23 nt, synthetic construct
  source 1..23: mol_type = other RNA
tccccacaaacacagccttggcg

SEQ ID NO: 1652 - RNA, 21 nt, synthetic construct
  source 1..21: mol_type = other RNA
caaggctgtgtttgtggggag

SEQ ID NO: 1653 - RNA, 23 nt, synthetic construct
  source 1..23: mol_type = other RNA
ctccccacaaacacagccttggc

SEQ ID NO: 1654 - RNA, 21 nt, synthetic construct
  source 1..21: mol_type = other RNA
ggcgccaaggctgtgtttgtg

SEQ ID NO: 1655 - RNA, 23 nt, synthetic construct
  source 1..23: mol_type = other RNA
cacaaacacagccttggcgccaa

SEQ ID NO: 1656 - RNA, 21 nt, synthetic construct
  source 1..21: mol_type = other RNA
tggcgccaaggctgtgtttgt

SEQ ID NO: 1657 - RNA, 23 nt, synthetic construct
  source 1..23: mol_type = other RNA
acaaacacagccttggcgccaag

SEQ ID NO: 1658 - RNA, 21 nt, synthetic construct
  source 1..21: mol_type = other RNA
actgccgccacaactcaggat

SEQ ID NO: 1659 - RNA, 23 nt, synthetic construct
  source 1..23: mol_type = other RNA
atcctgagttgtggcggcagttt

SEQ ID NO: 1660 - RNA, 21 nt, synthetic construct
  source 1..21: mol_type = other RNA
ctgccgccacaactcaggatg

SEQ ID NO: 1661 - RNA, 23 nt, synthetic construct
  source 1..23: mol_type = other RNA
catcctgagttgtggcggcagtt

SEQ ID NO: 1662 - RNA, 21 nt, synthetic construct
  source 1..21: mol_type = other RNA
tcaaactgccgccacaactca

SEQ ID NO: 1663 - RNA, 23 nt, synthetic construct
  source 1..23: mol_type = other RNA
tgagttgtggcggcagtttgaat

SEQ ID NO: 1664 - RNA, 21 nt, synthetic construct
  source 1..21: mol_type = other RNA
ttcaaactgccgccacaactc

SEQ ID NO: 1665 - RNA, 23 nt, synthetic construct
  source 1..23: mol_type = other RNA
gagttgtggcggcagtttgaatc

SEQ ID NO: 1666 - RNA, 21 nt, synthetic construct
  source 1..21: mol_type = other RNA
gggaagatatcaaatggctga

SEQ ID NO: 1667 - RNA, 23 nt, synthetic construct
  source 1..23: mol_type = other RNA
tcagccatttgatatcttcccag

SEQ ID NO: 1668 - RNA, 21 nt, synthetic construct
  source 1..21: mol_type = other RNA
ggaagatatcaaatggctgag

SEQ ID NO: 1669 - RNA, 23 nt, synthetic construct
  source 1..23: mol_type = other RNA
ctcagccatttgatatcttccca

SEQ ID NO: 1670 - RNA, 21 nt, synthetic construct
  source 1..21: mol_type = other RNA
agctgggaagatatcaaatgg

SEQ ID NO: 1671 - RNA, 23 nt, synthetic construct
  source 1..23: mol_type = other RNA
ccatttgatatcttcccagctga

SEQ ID NO: 1672 - RNA, 21 nt, synthetic construct
  source 1..21: mol_type = other RNA
cagctgggaagatatcaaatg

SEQ ID NO: 1673 - RNA, 23 nt, synthetic construct
  source 1..23: mol_type = other RNA
catttgatatcttcccagctgat

SEQ ID NO: 1674 - RNA, 21 nt, synthetic construct
  source 1..21: mol_type = other RNA
aatcagtacttccaaagtcta

SEQ ID NO: 1675 - RNA, 23 nt, synthetic construct
  source 1..23: mol_type = other RNA
tagactttggaagtactgattta

SEQ ID NO: 1676 - RNA, 21 nt, synthetic construct
  source 1..21: mol_type = other RNA
atcagtacttccaaagtctat

SEQ ID NO: 1677 - RNA, 23 nt, synthetic construct
  source 1..23: mol_type = other RNA
atagactttggaagtactgattt

SEQ ID NO: 1678 - RNA, 21 nt, synthetic construct
  source 1..21: mol_type = other RNA
gctaaatcagtacttccaaag

SEQ ID NO: 1679 - RNA, 23 nt, synthetic construct
  source 1..23: mol_type = other RNA
ctttggaagtactgatttagcat

SEQ ID NO: 1680 - RNA, 21 nt, synthetic construct
  source 1..21: mol_type = other RNA
tgctaaatcagtacttccaaa

SEQ ID NO: 1681 - RNA, 23 nt, synthetic construct
  source 1..23: mol_type = other RNA
tttggaagtactgatttagcatg

SEQ ID NO: 1682 - RNA, 21 nt, synthetic construct
  source 1..21: mol_type = other RNA
tcagcatgccaatatgtgtgg

SEQ ID NO: 1683 - RNA, 23 nt, synthetic construct
  source 1..23: mol_type = other RNA
ccacacatattggcatgctgacc

SEQ ID NO: 1684 - RNA, 21 nt, synthetic construct
  source 1..21: mol_type = other RNA
cagcatgccaatatgtgtggg

SEQ ID NO: 1685 - RNA, 23 nt, synthetic construct
  source 1..23: mol_type = other RNA
cccacacatattggcatgctgac

SEQ ID NO: 1686 - RNA, 21 nt, synthetic construct
  source 1..21: mol_type = other RNA
agggtcagcatgccaatatgt

SEQ ID NO: 1687 - RNA, 23 nt, synthetic construct
  source 1..23: mol_type = other RNA
acatattggcatgctgaccctct

SEQ ID NO: 1688 - RNA, 21 nt, synthetic construct
  source 1..21: mol_type = other RNA
gagggtcagcatgccaatatg

SEQ ID NO: 1689 - RNA, 23 nt, synthetic construct
  source 1..23: mol_type = other RNA
catattggcatgctgaccctctg

SEQ ID NO: 1690 - RNA, 21 nt, synthetic construct
  source 1..21: mol_type = other RNA
gcatatgtggctaaagcaata

SEQ ID NO: 1691 - RNA, 23 nt, synthetic construct
  source 1..23: mol_type = other RNA
tattgctttagccacatatgcag

SEQ ID NO: 1692 - RNA, 21 nt, synthetic construct
  source 1..21: mol_type = other RNA
catatgtggctaaagcaatag

SEQ ID NO: 1693 - RNA, 23 nt, synthetic construct
  source 1..23: mol_type = other RNA
ctattgctttagccacatatgca

SEQ ID NO: 1694 - RNA, 21 nt, synthetic construct
  source 1..21: mol_type = other RNA
tgctgcatatgtggctaaagc

SEQ ID NO: 1695 - RNA, 23 nt, synthetic construct
  source 1..23: mol_type = other RNA
gctttagccacatatgcagcaag

SEQ ID NO: 1696 - RNA, 21 nt, synthetic construct
  source 1..21: mol_type = other RNA
ttgctgcatatgtggctaaag

SEQ ID NO: 1697 - RNA, 23 nt, synthetic construct
  source 1..23: mol_type = other RNA
ctttagccacatatgcagcaagt

SEQ ID NO: 1698 - RNA, 21 nt, synthetic construct
  source 1..21: mol_type = other RNA
aaatgatgaagaaactttggc

SEQ ID NO: 1699 - RNA, 23 nt, synthetic construct
  source 1..23: mol_type = other RNA
gccaaagtttcttcatcatttgc

SEQ ID NO: 1700 - RNA, 21 nt, synthetic construct
  source 1..21: mol_type = other RNA
aatgatgaagaaactttggct

SEQ ID NO: 1701 - RNA, 23 nt, synthetic construct
  source 1..23: mol_type = other RNA
agccaaagtttcttcatcatttg

SEQ ID NO: 1702 - RNA, 21 nt, synthetic construct
  source 1..21: mol_type = other RNA
gggcaaatgatgaagaaactt

SEQ ID NO: 1703 - RNA, 23 nt, synthetic construct
  source 1..23: mol_type = other RNA
aagtttcttcatcatttgcccca

SEQ ID NO: 1704 - RNA, 21 nt, synthetic construct
  source 1..21: mol_type = other RNA
ggggcaaatgatgaagaaact

SEQ ID NO: 1705 - RNA, 23 nt, synthetic construct
  source 1..23: mol_type = other RNA
agtttcttcatcatttgccccag

SEQ ID NO: 1706 - RNA, 21 nt, synthetic construct
  source 1..21: mol_type = other RNA
gagatactaaaggaagaattc

SEQ ID NO: 1707 - RNA, 23 nt, synthetic construct
  source 1..23: mol_type = other RNA
gaattcttcctttagtatctcga

SEQ ID NO: 1708 - RNA, 21 nt, synthetic construct
  source 1..21: mol_type = other RNA
agatactaaaggaagaattcc

SEQ ID NO: 1709 - RNA, 23 nt, synthetic construct
  source 1..23: mol_type = other RNA
ggaattcttcctttagtatctcg

SEQ ID NO: 1710 - RNA, 21 nt, synthetic construct
  source 1..21: mol_type = other RNA
cctcgagatactaaaggaaga

SEQ ID NO: 1711 - RNA, 23 nt, synthetic construct
  source 1..23: mol_type = other RNA
tcttcctttagtatctcgaggac

SEQ ID NO: 1712 - RNA, 21 nt, synthetic construct
  source 1..21: mol_type = other RNA
tcctcgagatactaaaggaag

SEQ ID NO: 1713 - RNA, 23 nt, synthetic construct
  source 1..23: mol_type = other RNA
cttcctttagtatctcgaggaca

SEQ ID NO: 1714 - RNA, 21 nt, synthetic construct
  source 1..21: mol_type = other RNA
acaactcaggatgaaaaattt

SEQ ID NO: 1715 - RNA, 23 nt, synthetic construct
  source 1..23: mol_type = other RNA
aaatttttcatcctgagttgtgg

SEQ ID NO: 1716 - RNA, 21 nt, synthetic construct
  source 1..21: mol_type = other RNA
caactcaggatgaaaaatttt

SEQ ID NO: 1717 - RNA, 23 nt, synthetic construct
  source 1..23: mol_type = other RNA
aaaatttttcatcctgagttgtg

SEQ ID NO: 1718 - RNA, 21 nt, synthetic construct
  source 1..21: mol_type = other RNA
cgccacaactcaggatgaaaa

SEQ ID NO: 1719 - RNA, 23 nt, synthetic construct
  source 1..23: mol_type = other RNA
ttttcatcctgagttgtggcggc

SEQ ID NO: 1720 - RNA, 21 nt, synthetic construct
  source 1..21: mol_type = other RNA
ccgccacaactcaggatgaaa

SEQ ID NO: 1721 - RNA, 23 nt, synthetic construct
  source 1..23: mol_type = other RNA
tttcatcctgagttgtggcggca

SEQ ID NO: 1722 - RNA, 21 nt, synthetic construct
  source 1..21: mol_type = other RNA
agggaaggtggaagtcttcct

SEQ ID NO: 1723 - RNA, 23 nt, synthetic construct
  source 1..23: mol_type = other RNA
aggaagacttccaccttcccttc

SEQ ID NO: 1724 - RNA, 21 nt, synthetic construct
  source 1..21: mol_type = other RNA
gggaaggtggaagtcttcctg

SEQ ID NO: 1725 - RNA, 23 nt, synthetic construct
  source 1..23: mol_type = other RNA
caggaagacttccaccttccctt

SEQ ID NO: 1726 - RNA, 21 nt, synthetic construct
  source 1..21: mol_type = other RNA
tggaagggaaggtggaagtct

SEQ ID NO: 1727 - RNA, 23 nt, synthetic construct
  source 1..23: mol_type = other RNA
agacttccaccttcccttccaca

SEQ ID NO: 1728 - RNA, 21 nt, synthetic construct
  source 1..21: mol_type = other RNA
gtggaagggaaggtggaagtc

SEQ ID NO: 1729 - RNA, 23 nt, synthetic construct
  source 1..23: mol_type = other RNA
gacttccaccttcccttccacag

SEQ ID NO: 1730 - RNA, 21 nt, synthetic construct
  source 1..21: mol_type = other RNA
ggcgagcttgccactgtgaga

SEQ ID NO: 1731 - RNA, 23 nt, synthetic construct
  source 1..23: mol_type = other RNA
tctcacagtggcaagctcgccgt

SEQ ID NO: 1732 - RNA, 21 nt, synthetic construct
  source 1..21: mol_type = other RNA
gcgagcttgccactgtgagag

SEQ ID NO: 1733 - RNA, 23 nt, synthetic construct
  source 1..23: mol_type = other RNA
ctctcacagtggcaagctcgccg

SEQ ID NO: 1734 - RNA, 21 nt, synthetic construct
  source 1..21: mol_type = other RNA
ggacggcgagcttgccactgt

SEQ ID NO: 1735 - RNA, 23 nt, synthetic construct
  source 1..23: mol_type = other RNA
acagtggcaagctcgccgtccac

SEQ ID NO: 1736 - RNA, 21 nt, synthetic construct
  source 1..21: mol_type = other RNA
tggacggcgagcttgccactg

SEQ ID NO: 1737 - RNA, 23 nt, synthetic construct
  source 1..23: mol_type = other RNA
cagtggcaagctcgccgtccaca

SEQ ID NO: 1738 - RNA, 21 nt, synthetic construct
  source 1..21: mol_type = other RNA
atgtgcgtaacagattcaaac

SEQ ID NO: 1739 - RNA, 23 nt, synthetic construct
  source 1..23: mol_type = other RNA
gtttgaatctgttacgcacatca

SEQ ID NO: 1740 - RNA, 21 nt, synthetic construct
  source 1..21: mol_type = other RNA
tgtgcgtaacagattcaaact

SEQ ID NO: 1741 - RNA, 23 nt, synthetic construct
  source 1..23: mol_type = other RNA
agtttgaatctgttacgcacatc

SEQ ID NO: 1742 - RNA, 21 nt, synthetic construct
  source 1..21: mol_type = other RNA
gatgatgtgcgtaacagattc

SEQ ID NO: 1743 - RNA, 23 nt, synthetic construct
  source 1..23: mol_type = other RNA
gaatctgttacgcacatcatcca

SEQ ID NO: 1744 - RNA, 21 nt, synthetic construct
  source 1..21: mol_type = other RNA
ggatgatgtgcgtaacagatt

SEQ ID NO: 1745 - RNA, 23 nt, synthetic construct
  source 1..23: mol_type = other RNA
aatctgttacgcacatcatccag

SEQ ID NO: 1746 - RNA, 21 nt, synthetic construct
  source 1..21: mol_type = other RNA
gggtcagcatgccaatatgtg

SEQ ID NO: 1747 - RNA, 23 nt, synthetic construct
  source 1..23: mol_type = other RNA
cacatattggcatgctgaccctc

SEQ ID NO: 1748 - RNA, 21 nt, synthetic construct
  source 1..21: mol_type = other RNA
ggtcagcatgccaatatgtgt

SEQ ID NO: 1749 - RNA, 23 nt, synthetic construct
  source 1..23: mol_type = other RNA
acacatattggcatgctgaccct

SEQ ID NO: 1750 - RNA, 21 nt, synthetic construct
  source 1..21: mol_type = other RNA
cagagggtcagcatgccaata

SEQ ID NO: 1751 - RNA, 23 nt, synthetic construct
  source 1..23: mol_type = other RNA
tattggcatgctgaccctctgtc

SEQ ID NO: 1752 - RNA, 21 nt, synthetic construct
  source 1..21: mol_type = other RNA
acagagggtcagcatgccaat

SEQ ID NO: 1753 - RNA, 23 nt, synthetic construct
  source 1..23: mol_type = other RNA
attggcatgctgaccctctgtcc

SEQ ID NO: 1754 - RNA, 21 nt, synthetic construct
  source 1..21: mol_type = other RNA
gcttgaatgggatcttggtgt

SEQ ID NO: 1755 - RNA, 23 nt, synthetic construct
  source 1..23: mol_type = other RNA
acaccaagatcccattcaagcca

SEQ ID NO: 1756 - RNA, 21 nt, synthetic construct
  source 1..21: mol_type = other RNA
cttgaatgggatcttggtgtc

SEQ ID NO: 1757 - RNA, 23 nt, synthetic construct
  source 1..23: mol_type = other RNA
gacaccaagatcccattcaagcc

SEQ ID NO: 1758 - RNA, 21 nt, synthetic construct
  source 1..21: mol_type = other RNA
catggcttgaatgggatcttg

SEQ ID NO: 1759 - RNA, 23 nt, synthetic construct
  source 1..23: mol_type = other RNA
caagatcccattcaagccatgtt

SEQ ID NO: 1760 - RNA, 21 nt, synthetic construct
  source 1..21: mol_type = other RNA
acatggcttgaatgggatctt

SEQ ID NO: 1761 - RNA, 23 nt, synthetic construct
  source 1..23: mol_type = other RNA
aagatcccattcaagccatgttt

SEQ ID NO: 1762 - RNA, 21 nt, synthetic construct
  source 1..21: mol_type = other RNA
tcaaatggctgagaagactga

SEQ ID NO: 1763 - RNA, 23 nt, synthetic construct
  source 1..23: mol_type = other RNA
tcagtcttctcagccatttgata

SEQ ID NO: 1764 - RNA, 21 nt, synthetic construct
  source 1..21: mol_type = other RNA
caaatggctgagaagactgac

SEQ ID NO: 1765 - RNA, 23 nt, synthetic construct
  source 1..23: mol_type = other RNA
gtcagtcttctcagccatttgat

SEQ ID NO: 1766 - RNA, 21 nt, synthetic construct
  source 1..21: mol_type = other RNA
gatatcaaatggctgagaaga

SEQ ID NO: 1767 - RNA, 23 nt, synthetic construct
  source 1..23: mol_type = other RNA
tcttctcagccatttgatatctt

SEQ ID NO: 1768 - RNA, 21 nt, synthetic construct
  source 1..21: mol_type = other RNA
agatatcaaatggctgagaag

SEQ ID NO: 1769 - RNA, 23 nt, synthetic construct
  source 1..23: mol_type = other RNA
cttctcagccatttgatatcttc

SEQ ID NO: 1770 - RNA, 21 nt, synthetic construct
  source 1..21: mol_type = other RNA
gaaagtcatcgacaagacatt

SEQ ID NO: 1771 - RNA, 23 nt, synthetic construct
  source 1..23: mol_type = other RNA
aatgtcttgtcgatgactttcac

SEQ ID NO: 1772 - RNA, 21 nt, synthetic construct
  source 1..21: mol_type = other RNA
aaagtcatcgacaagacattg

SEQ ID NO: 1773 - RNA, 23 nt, synthetic construct
  source 1..23: mol_type = other RNA
caatgtcttgtcgatgactttca

SEQ ID NO: 1774 - RNA, 21 nt, synthetic construct
  source 1..21: mol_type = other RNA
atgtgaaagtcatcgacaaga

SEQ ID NO: 1775 - RNA, 23 nt, synthetic construct
  source 1..23: mol_type = other RNA
tcttgtcgatgactttcacattc

SEQ ID NO: 1776 - RNA, 21 nt, synthetic construct
  source 1..21: mol_type = other RNA
aatgtgaaagtcatcgacaag

SEQ ID NO: 1777 - RNA, 23 nt, synthetic construct
  source 1..23: mol_type = other RNA
cttgtcgatgactttcacattct

SEQ ID NO: 1778 - RNA, 21 nt, synthetic construct
  source 1..21: mol_type = other RNA
ggctaatttgtatcaatgatt

SEQ ID NO: 1779 - RNA, 23 nt, synthetic construct
  source 1..23: mol_type = other RNA
aatcattgatacaaattagccgg

SEQ ID NO: 1780 - RNA, 21 nt, synthetic construct
  source 1..21: mol_type = other RNA
gctaatttgtatcaatgatta

SEQ ID NO: 1781 - RNA, 23 nt, synthetic construct
  source 1..23: mol_type = other RNA
taatcattgatacaaattagccg

SEQ ID NO: 1782 - RNA, 21 nt, synthetic construct
  source 1..21: mol_type = other RNA
ccccggctaatttgtatcaat

SEQ ID NO: 1783 - RNA, 23 nt, synthetic construct
  source 1..23: mol_type = other RNA
attgatacaaattagccggggga

SEQ ID NO: 1784 - RNA, 21 nt, synthetic construct
  source 1..21: mol_type = other RNA
cccccggctaatttgtatcaa

SEQ ID NO: 1785 - RNA, 23 nt, synthetic construct
  source 1..23: mol_type = other RNA
ttgatacaaattagccgggggag

SEQ ID NO: 1786 - RNA, 21 nt, synthetic construct
  source 1..21: mol_type = other RNA
tgtcgacttctgttttaggac

SEQ ID NO: 1787 - RNA, 23 nt, synthetic construct
  source 1..23: mol_type = other RNA
gtcctaaaacagaagtcgacaga

SEQ ID NO: 1788 - RNA, 21 nt, synthetic construct
  source 1..21: mol_type = other RNA
gtcgacttctgttttaggaca

SEQ ID NO: 1789 - RNA, 23 nt, synthetic construct
  source 1..23: mol_type = other RNA
tgtcctaaaacagaagtcgacag

SEQ ID NO: 1790 - RNA, 21 nt, synthetic construct
  source 1..21: mol_type = other RNA
gatctgtcgacttctgtttta

SEQ ID NO: 1791 - RNA, 23 nt, synthetic construct
  source 1..23: mol_type = other RNA
taaaacagaagtcgacagatctg

SEQ ID NO: 1792 - RNA, 21 nt, synthetic construct
  source 1..21: mol_type = other RNA
agatctgtcgacttctgtttt

SEQ ID NO: 1793 - RNA, 23 nt, synthetic construct
  source 1..23: mol_type = other RNA
aaaacagaagtcgacagatctgt

SEQ ID NO: 1794 - RNA, 21 nt, synthetic construct
  source 1..21: mol_type = other RNA
ccgagaagtcaccaagaagct

SEQ ID NO: 1795 - RNA, 23 nt, synthetic construct
  source 1..23: mol_type = other RNA
agcttcttggtgacttctcggtc

SEQ ID NO: 1796 - RNA, 21 nt, synthetic construct
  source 1..21: mol_type = other RNA
cgagaagtcaccaagaagcta

SEQ ID NO: 1797 - RNA, 23 nt, synthetic construct
  source 1..23: mol_type = other RNA
tagcttcttggtgacttctcggt

SEQ ID NO: 1798 - RNA, 21 nt, synthetic construct
  source 1..21: mol_type = other RNA
aggaccgagaagtcaccaaga

SEQ ID NO: 1799 - RNA, 23 nt, synthetic construct
  source 1..23: mol_type = other RNA
tcttggtgacttctcggtccttg

SEQ ID NO: 1800 - RNA, 21 nt, synthetic construct
  source 1..21: mol_type = other RNA
aaggaccgagaagtcaccaag

SEQ ID NO: 1801 - RNA, 23 nt, synthetic construct
  source 1..23: mol_type = other RNA
cttggtgacttctcggtccttgt

SEQ ID NO: 1802 - RNA, 21 nt, synthetic construct
  source 1..21: mol_type = other RNA
aaacatggcttgaatgggatc

SEQ ID NO: 1803 - RNA, 23 nt, synthetic construct
  source 1..23: mol_type = other RNA
gatcccattcaagccatgtttaa

SEQ ID NO: 1804 - RNA, 21 nt, synthetic construct
  source 1..21: mol_type = other RNA
aacatggcttgaatgggatct

SEQ ID NO: 1805 - RNA, 23 nt, synthetic construct
  source 1..23: mol_type = other RNA
agatcccattcaagccatgttta

SEQ ID NO: 1806 - RNA, 21 nt, synthetic construct
  source 1..21: mol_type = other RNA
tgttaaacatggcttgaatgg

SEQ ID NO: 1807 - RNA, 23 nt, synthetic construct
  source 1..23: mol_type = other RNA
ccattcaagccatgtttaacagc

SEQ ID NO: 1808 - RNA, 21 nt, synthetic construct
  source 1..21: mol_type = other RNA
ctgttaaacatggcttgaatg

SEQ ID NO: 1809 - RNA, 23 nt, synthetic construct
  source 1..23: mol_type = other RNA
cattcaagccatgtttaacagcc

SEQ ID NO: 1810 - RNA, 21 nt, synthetic construct
  source 1..21: mol_type = other RNA
gacttgctgcatatgtggcta

SEQ ID NO: 1811 - RNA, 23 nt, synthetic construct
  source 1..23: mol_type = other RNA
tagccacatatgcagcaagtcca

SEQ ID NO: 1812 - RNA, 21 nt, synthetic construct
  source 1..21: mol_type = other RNA
acttgctgcatatgtggctaa

SEQ ID NO: 1813 - RNA, 23 nt, synthetic construct
  source 1..23: mol_type = other RNA
ttagccacatatgcagcaagtcc

SEQ ID NO: 1814 - RNA, 21 nt, synthetic construct
  source 1..21: mol_type = other RNA
agtggacttgctgcatatgtg

SEQ ID NO: 1815 - RNA, 23 nt, synthetic construct
  source 1..23: mol_type = other RNA
cacatatgcagcaagtccactgt

SEQ ID NO: 1816 - RNA, 21 nt, synthetic construct
  source 1..21: mol_type = other RNA
cagtggacttgctgcatatgt

SEQ ID NO: 1817 - RNA, 23 nt, synthetic construct
  source 1..23: mol_type = other RNA
acatatgcagcaagtccactgtc

SEQ ID NO: 1818 - RNA, 21 nt, synthetic construct
  source 1..21: mol_type = other RNA
taaatcagtacttccaaagtc

SEQ ID NO: 1819 - RNA, 23 nt, synthetic construct
  source 1..23: mol_type = other RNA
gactttggaagtactgatttagc

SEQ ID NO: 1820 - RNA, 21 nt, synthetic construct
  source 1..21: mol_type = other RNA
aaatcagtacttccaaagtct

SEQ ID NO: 1821 - RNA, 23 nt, synthetic construct
  source 1..23: mol_type = other RNA
agactttggaagtactgatttag

SEQ ID NO: 1822 - RNA, 21 nt, synthetic construct
  source 1..21: mol_type = other RNA
atgctaaatcagtacttccaa

SEQ ID NO: 1823 - RNA, 23 nt, synthetic construct
  source 1..23: mol_type = other RNA
ttggaagtactgatttagcatgt

SEQ ID NO: 1824 - RNA, 21 nt, synthetic construct
  source 1..21: mol_type = other RNA
catgctaaatcagtacttcca

SEQ ID NO: 1825 - RNA, 23 nt, synthetic construct
  source 1..23: mol_type = other RNA
tggaagtactgatttagcatgtt

SEQ ID NO: 1826 - RNA, 21 nt, synthetic construct
  source 1..21: mol_type = other RNA
tcctcaattgaagaagtggcg

SEQ ID NO: 1827 - RNA, 23 nt, synthetic construct
  source 1..23: mol_type = other RNA
cgccacttcttcaattgaggagg

SEQ ID NO: 1828 - RNA, 21 nt, synthetic construct
  source 1..21: mol_type = other RNA
cctcaattgaagaagtggcgg

SEQ ID NO: 1829 - RNA, 23 nt, synthetic construct
  source 1..23: mol_type = other RNA
ccgccacttcttcaattgaggag

SEQ ID NO: 1830 - RNA, 21 nt, synthetic construct
  source 1..21: mol_type = other RNA
cacctcctcaattgaagaagt

SEQ ID NO: 1831 - RNA, 23 nt, synthetic construct
  source 1..23: mol_type = other RNA
acttcttcaattgaggaggtggc

SEQ ID NO: 1832 - RNA, 21 nt, synthetic construct
  source 1..21: mol_type = other RNA
ccacctcctcaattgaagaag

SEQ ID NO: 1833 - RNA, 23 nt, synthetic construct
  source 1..23: mol_type = other RNA
cttcttcaattgaggaggtggcc

SEQ ID NO: 1834 - RNA, 21 nt, synthetic construct
  source 1..21: mol_type = other RNA
caagatgtcctcgagatacta

SEQ ID NO: 1835 - RNA, 23 nt, synthetic construct
  source 1..23: mol_type = other RNA
tagtatctcgaggacatcttgaa

SEQ ID NO: 1836 - RNA, 21 nt, synthetic construct
  source 1..21: mol_type = other RNA
aagatgtcctcgagatactaa

SEQ ID NO: 1837 - RNA, 23 nt, synthetic construct
  source 1..23: mol_type = other RNA
ttagtatctcgaggacatcttga

SEQ ID NO: 1838 - RNA, 21 nt, synthetic construct
  source 1..21: mol_type = other RNA
tgttcaagatgtcctcgagat

SEQ ID NO: 1839 - RNA, 23 nt, synthetic construct
  source 1..23: mol_type = other RNA
atctcgaggacatcttgaacacc

SEQ ID NO: 1840 - RNA, 21 nt, synthetic construct
  source 1..21: mol_type = other RNA
gtgttcaagatgtcctcgaga

SEQ ID NO: 1841 - RNA, 23 nt, synthetic construct
  source 1..23: mol_type = other RNA
tctcgaggacatcttgaacacct

SEQ ID NO: 1842 - RNA, 21 nt, synthetic construct
  source 1..21: mol_type = other RNA
acatgctaaatcagtacttcc

SEQ ID NO: 1843 - RNA, 23 nt, synthetic construct
  source 1..23: mol_type = other RNA
ggaagtactgatttagcatgttg

SEQ ID NO: 1844 - RNA, 21 nt, synthetic construct
  source 1..21: mol_type = other RNA
catgctaaatcagtacttcca

SEQ ID NO: 1845 - RNA, 23 nt, synthetic construct
  source 1..23: mol_type = other RNA
tggaagtactgatttagcatgtt

SEQ ID NO: 1846 - RNA, 21 nt, synthetic construct
  source 1..21: mol_type = other RNA
aacaacatgctaaatcagtac

SEQ ID NO: 1847 - RNA, 23 nt, synthetic construct
  source 1..23: mol_type = other RNA
gtactgatttagcatgttgttca

SEQ ID NO: 1848 - RNA, 21 nt, synthetic construct
  source 1..21: mol_type = other RNA
gaacaacatgctaaatcagta

SEQ ID NO: 1849 - RNA, 23 nt, synthetic construct
  source 1..23: mol_type = other RNA
tactgatttagcatgttgttcat

SEQ ID NO: 1850 - RNA, 21 nt, synthetic construct
  source 1..21: mol_type = other RNA
gaaaggcactgatgttctgaa

SEQ ID NO: 1851 - RNA, 23 nt, synthetic construct
  source 1..23: mol_type = other RNA
ttcagaacatcagtgcctttccg

SEQ ID NO: 1852 - RNA, 21 nt, synthetic construct
  source 1..21: mol_type = other RNA
aaaggcactgatgttctgaaa

SEQ ID NO: 1853 - RNA, 23 nt, synthetic construct
  source 1..23: mol_type = other RNA
tttcagaacatcagtgcctttcc

SEQ ID NO: 1854 - RNA, 21 nt, synthetic construct
  source 1..21: mol_type = other RNA
tgcggaaaggcactgatgttc

SEQ ID NO: 1855 - RNA, 23 nt, synthetic construct
  source 1..23: mol_type = other RNA
gaacatcagtgcctttccgcaca

SEQ ID NO: 1856 - RNA, 21 nt, synthetic construct
  source 1..21: mol_type = other RNA
gtgcggaaaggcactgatgtt

SEQ ID NO: 1857 - RNA, 23 nt, synthetic construct
  source 1..23: mol_type = other RNA
aacatcagtgcctttccgcacac

SEQ ID NO: 1858 - RNA, 21 nt, synthetic construct
  source 1..21: mol_type = other RNA
gtcagcatgccaatatgtgtg

SEQ ID NO: 1859 - RNA, 23 nt, synthetic construct
  source 1..23: mol_type = other RNA
cacacatattggcatgctgaccc

SEQ ID NO: 1860 - RNA, 21 nt, synthetic construct
  source 1..21: mol_type = other RNA
tcagcatgccaatatgtgtgg

SEQ ID NO: 1861 - RNA, 23 nt, synthetic construct
  source 1..23: mol_type = other RNA
ccacacatattggcatgctgacc

SEQ ID NO: 1862 - RNA, 21 nt, synthetic construct
  source 1..21: mol_type = other RNA
gagggtcagcatgccaatatg

SEQ ID NO: 1863 - RNA, 23 nt, synthetic construct
  source 1..23: mol_type = other RNA
catattggcatgctgaccctctg

SEQ ID NO: 1864 - RNA, 21 nt, synthetic construct
  source 1..21: mol_type = other RNA
agagggtcagcatgccaatat

SEQ ID NO: 1865 - RNA, 23 nt, synthetic construct
  source 1..23: mol_type = other RNA
atattggcatgctgaccctctgt

SEQ ID NO: 1866 - RNA, 21 nt, synthetic construct
  source 1..21: mol_type = other RNA
gatgctccggaatgttgctga

SEQ ID NO: 1867 - RNA, 23 nt, synthetic construct
  source 1..23: mol_type = other RNA
tcagcaacattccggagcatcct

SEQ ID NO: 1868 - RNA, 21 nt, synthetic construct
  source 1..21: mol_type = other RNA
atgctccggaatgttgctgaa

SEQ ID NO: 1869 - RNA, 23 nt, synthetic construct
  source 1..23: mol_type = other RNA
ttcagcaacattccggagcatcc

SEQ ID NO: 1870 - RNA, 21 nt, synthetic construct
  source 1..21: mol_type = other RNA
caaggatgctccggaatgttg

SEQ ID NO: 1871 - RNA, 23 nt, synthetic construct
  source 1..23: mol_type = other RNA
caacattccggagcatccttgga

SEQ ID NO: 1872 - RNA, 21 nt, synthetic construct
  source 1..21: mol_type = other RNA
ccaaggatgctccggaatgtt

SEQ ID NO: 1873 - RNA, 23 nt, synthetic construct
  source 1..23: mol_type = other RNA
aacattccggagcatccttggat

SEQ ID NO: 1874 - RNA, 21 nt, synthetic construct
  source 1..21: mol_type = other RNA
gcgtaacagattcaaactgcc

SEQ ID NO: 1875 - RNA, 23 nt, synthetic construct
  source 1..23: mol_type = other RNA
ggcagtttgaatctgttacgcac

SEQ ID NO: 1876 - RNA, 21 nt, synthetic construct
  source 1..21: mol_type = other RNA
cgtaacagattcaaactgccg

SEQ ID NO: 1877 - RNA, 23 nt, synthetic construct
  source 1..23: mol_type = other RNA
cggcagtttgaatctgttacgca

SEQ ID NO: 1878 - RNA, 21 nt, synthetic construct
  source 1..21: mol_type = other RNA
atgtgcgtaacagattcaaac

SEQ ID NO: 1879 - RNA, 23 nt, synthetic construct
  source 1..23: mol_type = other RNA
gtttgaatctgttacgcacatca

SEQ ID NO: 1880 - RNA, 21 nt, synthetic construct
  source 1..21: mol_type = other RNA
gatgtgcgtaacagattcaaa

SEQ ID NO: 1881 - RNA, 23 nt, synthetic construct
  source 1..23: mol_type = other RNA
tttgaatctgttacgcacatcat

SEQ ID NO: 1882 - RNA, 21 nt, synthetic construct
  source 1..21: mol_type = other RNA
agagaagatgggctacaaggc

SEQ ID NO: 1883 - RNA, 23 nt, synthetic construct
  source 1..23: mol_type = other RNA
gccttgtagcccatcttctctgc

SEQ ID NO: 1884 - RNA, 21 nt, synthetic construct
  source 1..21: mol_type = other RNA
gagaagatgggctacaaggcc

SEQ ID NO: 1885 - RNA, 23 nt, synthetic construct
  source 1..23: mol_type = other RNA
ggccttgtagcccatcttctctg

SEQ ID NO: 1886 - RNA, 21 nt, synthetic construct
  source 1..21: mol_type = other RNA
aggcagagaagatgggctaca

SEQ ID NO: 1887 - RNA, 23 nt, synthetic construct
  source 1..23: mol_type = other RNA
tgtagcccatcttctctgcctgc

SEQ ID NO: 1888 - RNA, 21 nt, synthetic construct
  source 1..21: mol_type = other RNA
caggcagagaagatgggctac

SEQ ID NO: 1889 - RNA, 23 nt, synthetic construct
  source 1..23: mol_type = other RNA
gtagcccatcttctctgcctgcc

SEQ ID NO: 1890 - RNA, 21 nt, synthetic construct
  source 1..21: mol_type = other RNA
  modified_base 1: mod_base = OTHER; note = 2'-O-methyladenosine-3'-phosphorothioate
  modified_base 2: mod_base = OTHER; note = 2'-O-methyluridine-3'-phosphorothioate
  modified_base 3: mod_base = OTHER; note = 2'-O-methylguanosine-3'-phosphate
  modified_base 4: mod_base = OTHER; note = 2'-O-methyluridine-3'-phosphate
  modified_base 5: mod_base = OTHER; note = 2'-O-methyladenosine-3'-phosphate
  modified_base 6: mod_base = OTHER; note = 2'-O-methyluridine-3'-phosphate
  modified_base 7: mod_base = OTHER; note = 2'-deoxy-2'-fluoroguanosine-3'-phosphate
  modified_base 8: mod_base = OTHER; note = 2'-O-methyluridine-3'-phosphate
  modified_base 9: mod_base = OTHER; note = 2'-deoxy-2'-fluorouridine-3'-phosphate
  modified_base 10: mod_base = OTHER; note = 2'-deoxy-2'-fluoroadenosine-3'-phosphate
  modified_base 11: mod_base = OTHER; note = 2'-deoxy-2'-fluorocytidine-3'-phosphate
  modified_base 12: mod_base = OTHER; note = 2'-O-methyluridine-3'-phosphate
  modified_base 13: mod_base = OTHER; note = 2'-O-methyluridine-3'-phosphate
  modified_base 14: mod_base = OTHER; note = 2'-O-methylcytidine-3'-phosphate
  modified_base 15: mod_base = OTHER; note = 2'-O-methyluridine-3'-phosphate
  modified_base 16: mod_base = OTHER; note = 2'-O-methyluridine-3'-phosphate
  modified_base 17: mod_base = OTHER; note = 2'-O-methyladenosine-3'-phosphate
  modified_base 18: mod_base = OTHER; note = 2'-O-methylguanosine-3'-phosphate
  modified_base 19: mod_base = OTHER; note = 2'-O-methyladenosine-3'-phosphate
  modified_base 20: mod_base = OTHER; note = 2'-O-methylguanosine-3'-phosphate
  modified_base 21: mod_base = OTHER; note = 2'-O-methyladenosine-3'-phosphate ((2S,4R)-1-[29-[[2-(acetylamino)-2-deoxy-beta-D-galactopyra nosyl]oxy]-14,14-bis[[3-[[3-[[5-[[2-(acetylamino)-2-deoxy-b eta-D-galactopyranosyl]oxy]-1-oxopentyl]amino]propyl]amino] -3-oxopropoxy]methyl]-1,12,19,25-tetraoxo-16-oxa-13,20,24-t riazanonacos-1-yl]-4-hydroxy-2-pyrrolidinyl)methyl ester
atgtatgttacttcttagaga

SEQ ID NO: 1891 - RNA, 23 nt, synthetic construct
  source 1..23: mol_type = other RNA
  modified_base 1: mod_base = OTHER; note = 2'-O-methyluridine-3'-phosphorothioate
  modified_base 2: mod_base = OTHER; note = 2'-deoxy-2'-fluorocytidine-3'-phosphorothioate
  modified_base 3: mod_base = OTHER; note = 2'-O-methyluridine-3'-phosphate
  modified_base 4: mod_base = OTHER; note = 2'-O-methylcytidine-3'-phosphate
  modified_base 5: mod_base = OTHER; note = 2'-O-methyluridine-3'-phosphate
  modified_base 6: mod_base = OTHER; note = 2'-deoxy-2'-fluoroadenosine-3'-phosphate
  modified_base 7: mod_base = OTHER; note = 2'-O-methyladenosine-3'-phosphate
  modified_base 8: mod_base = OTHER; note = 2'-deoxy-2'-fluoroguanosine-3'-phosphate
  modified_base 9: mod_base = OTHER; note = 2'-deoxy-2'-fluoroadenosine-3'-phosphate
  modified_base 10: mod_base = OTHER; note = 2'-O-methyladenosine-3'-phosphate
  modified_base 11: mod_base = OTHER; note = 2'-O-methylguanosine-3'-phosphate
  modified_base 12: mod_base = OTHER; note = 2'-O-methyluridine-3'-phosphate
  modified_base 13: mod_base = OTHER; note = 2'-O-methyladenosine-3'-phosphate
  modified_base 14: mod_base = OTHER; note = 2'-deoxy-2'-fluoroadenosine-3'-phosphate
  modified_base 15: mod_base = OTHER; note = 2'-O-methylcytidine-3'-phosphate
  modified_base 16: mod_base = OTHER; note = 2'-deoxy-2'-fluoroadenosine-3'-phosphate
  modified_base 17: mod_base = OTHER; note = 2'-O-methyluridine-3'-phosphate
  modified_base 18: mod_base = OTHER; note = 2'-O-methyladenosine-3'-phosphate
  modified_base 19: mod_base = OTHER; note = 2'-O-methylcytidine-3'-phosphate
  modified_base 20: mod_base = OTHER; note = 2'-O-methyladenosine-3'-phosphate
  modified_base 21: mod_base = OTHER; note = 2'-O-methyluridine-3'-phosphorothioate
  modified_base 22: mod_base = OTHER; note = 2'-O-methylcytidine-3'-phosphorothioate
  modified_base 23: mod_base = OTHER; note = 2'-O-methylcytidine
tctctaagaagtaacatacatcc

SEQ ID NO: 1892 - RNA, 21 nt, synthetic construct
  source 1..21: mol_type = other RNA
  modified_base 1: mod_base = OTHER; note = 2'-O-methyluridine-3'-phosphorothioate
  modified_base 2: mod_base = OTHER; note = 2'-O-methylguanosine-3'-phosphorothioate
  modified_base 3: mod_base = OTHER; note = 2'-O-methyluridine-3'-phosphate
  modified_base 4: mod_base = OTHER; note = 2'-O-methyladenosine-3'-phosphate
  modified_base 5: mod_base = OTHER; note = 2'-O-methyluridine-3'-phosphate
  modified_base 6: mod_base = OTHER; note = 2'-O-methylguanosine-3'-phosphate
  modified_base 7: mod_base = OTHER; note = 2'-deoxy-2'-fluorouridine-3'-phosphate
  modified_base 8: mod_base = OTHER; note = 2'-O-methyluridine-3'-phosphate
  modified_base 9: mod_base = OTHER; note = 2'-deoxy-2'-fluoroadenosine-3'-phosphate
  modified_base 10: mod_base = OTHER; note = 2'-deoxy-2'-fluorocytidine-3'-phosphate
  modified_base 11: mod_base = OTHER; note = 2'-deoxy-2'-fluorouridine-3'-phosphate
  modified_base 12: mod_base = OTHER; note = 2'-O-methyluridine-3'-phosphate
  modified_base 13: mod_base = OTHER; note = 2'-O-methylcytidine-3'-phosphate
  modified_base 14: mod_base = OTHER; note = 2'-O-methyluridine-3'-phosphate
  modified_base 15: mod_base = OTHER; note = 2'-O-methyluridine-3'-phosphate
  modified_base 16: mod_base = OTHER; note = 2'-O-methyladenosine-3'-phosphate
  modified_base 17: mod_base = OTHER; note = 2'-O-methylguanosine-3'-phosphate
  modified_base 18: mod_base = OTHER; note = 2'-O-methyladenosine-3'-phosphate
  modified_base 19: mod_base = OTHER; note = 2'-O-methylguanosine-3'-phosphate
  modified_base 20: mod_base = OTHER; note = 2'-O-methyladenosine-3'-phosphate
  modified_base 21: mod_base = OTHER; note = 2'-O-methylguanosine-3'-phosphate ((2S,4R)-1-[29-[[2-(acetylamino)-2-deoxy-beta-D-galactopyra nosyl]oxy]-14,14-bis[[3-[[3-[[5-[[2-(acetylamino)-2-deoxy-b eta-D-galactopyranosyl]oxy]-1-oxopentyl]amino]propyl]amino] -3-oxopropoxy]methyl]-1,12,19,25-tetraoxo-16-oxa-13,20,24-t riazanonacos-1-yl]-4-hydroxy-2-pyrrolidinyl)methyl ester
tgtatgttacttcttagagag

SEQ ID NO: 1893 - RNA, 23 nt, synthetic construct
  source 1..23: mol_type = other RNA
  modified_base 1: mod_base = OTHER; note = 2'-O-methylcytidine-3'-phosphorothioate
  modified_base 2: mod_base = OTHER; note = 2'-deoxy-2'-fluorouridine-3'-phosphorothioate
  modified_base 3: mod_base = OTHER; note = 2'-O-methylcytidine-3'-phosphate
  modified_base 4: mod_base = OTHER; note = 2'-O-methyluridine-3'-phosphate
  modified_base 5: mod_base = OTHER; note = 2'-O-methylcytidine-3'-phosphate
  modified_base 6: mod_base = OTHER; note = 2'-deoxy-2'-fluorouridine-3'-phosphate
  modified_base 7: mod_base = OTHER; note = 2'-O-methyladenosine-3'-phosphate
  modified_base 8: mod_base = OTHER; note = 2'-deoxy-2'-fluoroadenosine-3'-phosphate
  modified_base 9: mod_base = OTHER; note = 2'-deoxy-2'-fluoroguanosine-3'-phosphate
  modified_base 10: mod_base = OTHER; note = 2'-O-methyladenosine-3'-phosphate
  modified_base 11: mod_base = OTHER; note = 2'-O-methyladenosine-3'-phosphate
  modified_base 12: mod_base = OTHER; note = 2'-O-methylguanosine-3'-phosphate
  modified_base 13: mod_base = OTHER; note = 2'-O-methyluridine-3'-phosphate
  modified_base 14: mod_base = OTHER; note = 2'-deoxy-2'-fluoroadenosine-3'-phosphate
  modified_base 15: mod_base = OTHER; note = 2'-O-methyladenosine-3'-phosphate
  modified_base 16: mod_base = OTHER; note = 2'-deoxy-2'-fluorocytidine-3'-phosphate
  modified_base 17: mod_base = OTHER; note = 2'-O-methyladenosine-3'-phosphate
  modified_base 18: mod_base = OTHER; note = 2'-O-methyluridine-3'-phosphate
  modified_base 19: mod_base = OTHER; note = 2'-O-methyladenosine-3'-phosphate
  modified_base 20: mod_base = OTHER; note = 2'-O-methylcytidine-3'-phosphate
  modified_base 21: mod_base = OTHER; note = 2'-O-methyladenosine-3'-phosphorothioate
  modified_base 22: mod_base = OTHER; note = 2'-O-methyluridine-3'-phosphorothioate
  modified_base 23: mod_base = OTHER; note = 2'-O-methylcytidine
ctctctaagaagtaacatacatc

SEQ ID NO: 1894 - RNA, 21 nt, synthetic construct
  source 1..21: mol_type = other RNA
  modified_base 1: mod_base = OTHER; note = 2'-O-methyluridine-3'-phosphorothioate
  modified_base 2: mod_base = OTHER; note = 2'-O-methyladenosine-3'-phosphorothioate
  modified_base 3: mod_base = OTHER; note = 2'-O-methylguanosine-3'-phosphate
  modified_base 4: mod_base = OTHER; note = 2'-O-methylguanosine-3'-phosphate
  modified_base 5: mod_base = OTHER; note = 2'-O-methyladenosine-3'-phosphate
  modified_base 6: mod_base = OTHER; note = 2'-O-methyluridine-3'-phosphate
  modified_base 7: mod_base = OTHER; note = 2'-deoxy-2'-fluoroguanosine-3'-phosphate
  modified_base 8: mod_base = OTHER; note = 2'-O-methyluridine-3'-phosphate
  modified_base 9: mod_base = OTHER; note = 2'-deoxy-2'-fluoroadenosine-3'-phosphate
  modified_base 10: mod_base = OTHER; note = 2'-deoxy-2'-fluorouridine-3'-phosphate
  modified_base 11: mod_base = OTHER; note = 2'-deoxy-2'-fluoroguanosine-3'-phosphate
  modified_base 12: mod_base = OTHER; note = 2'-O-methyluridine-3'-phosphate
  modified_base 13: mod_base = OTHER; note = 2'-O-methyluridine-3'-phosphate
  modified_base 14: mod_base = OTHER; note = 2'-O-methyladenosine-3'-phosphate
  modified_base 15: mod_base = OTHER; note = 2'-O-methylcytidine-3'-phosphate
  modified_base 16: mod_base = OTHER; note = 2'-O-methyluridine-3'-phosphate
  modified_base 17: mod_base = OTHER; note = 2'-O-methyluridine-3'-phosphate
  modified_base 18: mod_base = OTHER; note = 2'-O-methylcytidine-3'-phosphate
  modified_base 19: mod_base = OTHER; note = 2'-O-methyluridine-3'-phosphate
  modified_base 20: mod_base = OTHER; note = 2'-O-methyluridine-3'-phosphate
  modified_base 21: mod_base = OTHER; note = 2'-O-methyladenosine-3'-phosphate ((2S,4R)-1-[29-[[2-(acetylamino)-2-deoxy-beta-D-galactopyra nosyl]oxy]-14,14-bis[[3-[[3-[[5-[[2-(acetylamino)-2-deoxy-b eta-D-galactopyranosyl]oxy]-1-oxopentyl]amino]propyl]amino] -3-oxopropoxy]methyl]-1,12,19,25-tetraoxo-16-oxa-13,20,24-t riazanonacos-1-yl]-4-hydroxy-2-pyrrolidinyl)methyl ester
taggatgtatgttacttctta

SEQ ID NO: 1895 - RNA, 23 nt, synthetic construct
  source 1..23: mol_type = other RNA
  modified_base 1: mod_base = OTHER; note = 2'-O-methyluridine-3'-phosphorothioate
  modified_base 2: mod_base = OTHER; note = 2'-deoxy-2'-fluoroadenosine-3'-phosphorothioate
  modified_base 3: mod_base = OTHER; note = 2'-O-methyladenosine-3'-phosphate
  modified_base 4: mod_base = OTHER; note = 2'-O-methylguanosine-3'-phosphate
  modified_base 5: mod_base = OTHER; note = 2'-O-methyladenosine-3'-phosphate
  modified_base 6: mod_base = OTHER; note = 2'-deoxy-2'-fluoroadenosine-3'-phosphate
  modified_base 7: mod_base = OTHER; note = 2'-O-methylguanosine-3'-phosphate
  modified_base 8: mod_base = OTHER; note = 2'-deoxy-2'-fluorouridine-3'-phosphate
  modified_base 9: mod_base = OTHER; note = 2'-deoxy-2'-fluoroadenosine-3'-phosphate
  modified_base 10: mod_base = OTHER; note = 2'-O-methyladenosine-3'-phosphate
  modified_base 11: mod_base = OTHER; note = 2'-O-methylcytidine-3'-phosphate
  modified_base 12: mod_base = OTHER; note = 2'-O-methyladenosine-3'-phosphate
  modified_base 13: mod_base = OTHER; note = 2'-O-methyluridine-3'-phosphate
  modified_base 14: mod_base = OTHER; note = 2'-deoxy-2'-fluoroadenosine-3'-phosphate
  modified_base 15: mod_base = OTHER; note = 2'-O-methylcytidine-3'-phosphate
  modified_base 16: mod_base = OTHER; note = 2'-deoxy-2'-fluoroadenosine-3'-phosphate
  modified_base 17: mod_base = OTHER; note = 2'-O-methyluridine-3'-phosphate
  modified_base 18: mod_base = OTHER; note = 2'-O-methylcytidine-3'-phosphate
  modified_base 19: mod_base = OTHER; note = 2'-O-methylcytidine-3'-phosphate
  modified_base 20: mod_base = OTHER; note = 2'-O-methyluridine-3'-phosphate
  modified_base 21: mod_base = OTHER; note = 2'-O-methyladenosine-3'-phosphorothioate
  modified_base 22: mod_base = OTHER; note = 2'-O-methyladenosine-3'-phosphorothioate
  modified_base 23: mod_base = OTHER; note = 2'-O-methyladenosine
taagaagtaacatacatcctaaa

SEQ ID NO: 1896 - RNA, 21 nt, synthetic construct
  source 1..21: mol_type = other RNA
  modified_base 1: mod_base = OTHER; note = 2'-O-methyluridine-3'-phosphorothioate
  modified_base 2: mod_base = OTHER; note = 2'-O-methyluridine-3'-phosphorothioate
  modified_base 3: mod_base = OTHER; note = 2'-O-methyladenosine-3'-phosphate
  modified_base 4: mod_base = OTHER; note = 2'-O-methylguanosine-3'-phosphate
  modified_base 5: mod_base = OTHER; note = 2'-O-methylguanosine-3'-phosphate
  modified_base 6: mod_base = OTHER; note = 2'-O-methyladenosine-3'-phosphate
  modified_base 7: mod_base = OTHER; note = 2'-deoxy-2'-fluorouridine-3'-phosphate
  modified_base 8: mod_base = OTHER; note = 2'-O-methylguanosine-3'-phosphate
  modified_base 9: mod_base = OTHER; note = 2'-deoxy-2'-fluorouridine-3'-phosphate
  modified_base 10: mod_base = OTHER; note = 2'-deoxy-2'-fluoroadenosine-3'-phosphate
  modified_base 11: mod_base = OTHER; note = 2'-deoxy-2'-fluorouridine-3'-phosphate
  modified_base 12: mod_base = OTHER; note = 2'-O-methylguanosine-3'-phosphate
  modified_base 13: mod_base = OTHER; note = 2'-O-methyluridine-3'-phosphate
  modified_base 14: mod_base = OTHER; note = 2'-O-methyluridine-3'-phosphate
  modified_base 15: mod_base = OTHER; note = 2'-O-methyladenosine-3'-phosphate
  modified_base 16: mod_base = OTHER; note = 2'-O-methylcytidine-3'-phosphate
  modified_base 17: mod_base = OTHER; note = 2'-O-methyluridine-3'-phosphate
  modified_base 18: mod_base = OTHER; note = 2'-O-methyluridine-3'-phosphate
  modified_base 19: mod_base = OTHER; note = 2'-O-methylcytidine-3'-phosphate
  modified_base 20: mod_base = OTHER; note = 2'-O-methyluridine-3'-phosphate
  modified_base 21: mod_base = OTHER; note = 2'-O-methyluridine-3'-phosphate ((2S,4R)-1-[29-[[2-(acetylamino)-2-deoxy-beta-D-galactopyra nosyl]oxy]-14,14-bis[[3-[[3-[[5-[[2-(acetylamino)-2-deoxy-b eta-D-galactopyranosyl]oxy]-1-oxopentyl]amino]propyl]amino] -3-oxopropoxy]methyl]-1,12,19,25-tetraoxo-16-oxa-13,20,24-t riazanonacos-1-yl]-4-hydroxy-2-pyrrolidinyl)methyl ester
ttaggatgtatgttacttctt

SEQ ID NO: 1897 - RNA, 23 nt, synthetic construct
  source 1..23: mol_type = other RNA
  modified_base 1: mod_base = OTHER; note = 2'-O-methyladenosine-3'-phosphorothioate
  modified_base 2: mod_base = OTHER; note = 2'-deoxy-2'-fluoroadenosine-3'-phosphorothioate
  modified_base 3: mod_base = OTHER; note = 2'-O-methylguanosine-3'-phosphate
  modified_base 4: mod_base = OTHER; note = 2'-O-methyladenosine-3'-phosphate
  modified_base 5: mod_base = OTHER; note = 2'-O-methyladenosine-3'-phosphate
  modified_base 6: mod_base = OTHER; note = 2'-deoxy-2'-fluoroguanosine-3'-phosphate
  modified_base 7: mod_base = OTHER; note = 2'-O-methyluridine-3'-phosphate
  modified_base 8: mod_base = OTHER; note = 2'-deoxy-2'-fluoroadenosine-3'-phosphate
  modified_base 9: mod_base = OTHER; note = 2'-deoxy-2'-fluoroadenosine-3'-phosphate
  modified_base 10: mod_base = OTHER; note = 2'-O-methylcytidine-3'-phosphate
  modified_base 11: mod_base = OTHER; note = 2'-O-methyladenosine-3'-phosphate
  modified_base 12: mod_base = OTHER; note = 2'-O-methyluridine-3'-phosphate
  modified_base 13: mod_base = OTHER; note = 2'-O-methyladenosine-3'-phosphate
  modified_base 14: mod_base = OTHER; note = 2'-deoxy-2'-fluorocytidine-3'-phosphate
  modified_base 15: mod_base = OTHER; note = 2'-O-methyladenosine-3'-phosphate
  modified_base 16: mod_base = OTHER; note = 2'-deoxy-2'-fluorouridine-3'-phosphate
  modified_base 17: mod_base = OTHER; note = 2'-O-methylcytidine-3'-phosphate
  modified_base 18: mod_base = OTHER; note = 2'-O-methylcytidine-3'-phosphate
  modified_base 19: mod_base = OTHER; note = 2'-O-methyluridine-3'-phosphate
  modified_base 20: mod_base = OTHER; note = 2'-O-methyladenosine-3'-phosphate
  modified_base 21: mod_base = OTHER; note = 2'-O-methyladenosine-3'-phosphorothioate
  modified_base 22: mod_base = OTHER; note = 2'-O-methyladenosine-3'-phosphorothioate
  modified_base 23: mod_base = OTHER; note = 2'-O-methyladenosine
aagaagtaacatacatcctaaaa

SEQ ID NO: 1898 - RNA, 21 nt, synthetic construct
  source 1..21: mol_type = other RNA
  modified_base 1: mod_base = OTHER; note = 2'-O-methyladenosine-3'-phosphorothioate
  modified_base 2: mod_base = OTHER; note = 2'-O-methylguanosine-3'-phosphorothioate
  modified_base 3: mod_base = OTHER; note = 2'-O-methyladenosine-3'-phosphate
  modified_base 4: mod_base = OTHER; note = 2'-O-methyladenosine-3'-phosphate
  modified_base 5: mod_base = OTHER; note = 2'-O-methyladenosine-3'-phosphate
  modified_base 6: mod_base = OTHER; note = 2'-O-methylguanosine-3'-phosphate
  modified_base 7: mod_base = OTHER; note = 2'-deoxy-2'-fluoroguanosine-3'-phosphate
  modified_base 8: mod_base = OTHER; note = 2'-O-methyluridine-3'-phosphate
  modified_base 9: mod_base = OTHER; note = 2'-deoxy-2'-fluoroguanosine-3'-phosphate
  modified_base 10: mod_base = OTHER; note = 2'-deoxy-2'-fluorouridine-3'-phosphate
  modified_base 11: mod_base = OTHER; note = 2'-deoxy-2'-fluorouridine-3'-phosphate
  modified_base 12: mod_base = OTHER; note = 2'-O-methylcytidine-3'-phosphate
  modified_base 13: mod_base = OTHER; note = 2'-O-methyladenosine-3'-phosphate
  modified_base 14: mod_base = OTHER; note = 2'-O-methyladenosine-3'-phosphate
  modified_base 15: mod_base = OTHER; note = 2'-O-methylguanosine-3'-phosphate
  modified_base 16: mod_base = OTHER; note = 2'-O-methyladenosine-3'-phosphate
  modified_base 17: mod_base = OTHER; note = 2'-O-methyluridine-3'-phosphate
  modified_base 18: mod_base = OTHER; note = 2'-O-methylguanosine-3'-phosphate
  modified_base 19: mod_base = OTHER; note = 2'-O-methyluridine-3'-phosphate
  modified_base 20: mod_base = OTHER; note = 2'-O-methylcytidine-3'-phosphate
  modified_base 21: mod_base = OTHER; note = 2'-O-methylcytidine-3'-phosphate ((2S,4R)-1-[29-[[2-(acetylamino)-2-deoxy-beta-D-galactopyra nosyl]oxy]-14,14-bis[[3-[[3-[[5-[[2-(acetylamino)-2-deoxy-b eta-D-galactopyranosyl]oxy]-1-oxopentyl]amino]propyl]amino] -3-oxopropoxy]methyl]-1,12,19,25-tetraoxo-16-oxa-13,20,24-t riazanonacos-1-yl]-4-hydroxy-2-pyrrolidinyl)methyl ester
agaaaggtgttcaagatgtcc

SEQ ID NO: 1899 - RNA, 23 nt, synthetic construct
  source 1..23: mol_type = other RNA
  modified_base 1: mod_base = OTHER; note = 2'-O-methylguanosine-3'-phosphorothioate
  modified_base 2: mod_base = OTHER; note = 2'-deoxy-2'-fluoroguanosine-3'-phosphorothioate
  modified_base 3: mod_base = OTHER; note = 2'-O-methyladenosine-3'-phosphate
  modified_base 4: mod_base = OTHER; note = 2'-O-methylcytidine-3'-phosphate
  modified_base 5: mod_base = OTHER; note = 2'-O-methyladenosine-3'-phosphate
  modified_base 6: mod_base = OTHER; note = 2'-deoxy-2'-fluorouridine-3'-phosphate
  modified_base 7: mod_base = OTHER; note = 2'-O-methylcytidine-3'-phosphate
  modified_base 8: mod_base = OTHER; note = 2'-deoxy-2'-fluorouridine-3'-phosphate
  modified_base 9: mod_base = OTHER; note = 2'-deoxy-2'-fluorouridine-3'-phosphate
  modified_base 10: mod_base = OTHER; note = 2'-O-methylguanosine-3'-phosphate
  modified_base 11: mod_base = OTHER; note = 2'-O-methyladenosine-3'-phosphate
  modified_base 12: mod_base = OTHER; note = 2'-O-methyladenosine-3'-phosphate
  modified_base 13: mod_base = OTHER; note = 2'-O-methylcytidine-3'-phosphate
  modified_base 14: mod_base = OTHER; note = 2'-deoxy-2'-fluoroadenosine-3'-phosphate
  modified_base 15: mod_base = OTHER; note = 2'-O-methylcytidine-3'-phosphate
  modified_base 16: mod_base = OTHER; note = 2'-deoxy-2'-fluorocytidine-3'-phosphate
  modified_base 17: mod_base = OTHER; note = 2'-O-methyluridine-3'-phosphate
  modified_base 18: mod_base = OTHER; note = 2'-O-methyluridine-3'-phosphate
  modified_base 19: mod_base = OTHER; note = 2'-O-methyluridine-3'-phosphate
  modified_base 20: mod_base = OTHER; note = 2'-O-methylcytidine-3'-phosphate
  modified_base 21: mod_base = OTHER; note = 2'-O-methyluridine-3'-phosphorothioate
  modified_base 22: mod_base = OTHER; note = 2'-O-methylcytidine-3'-phosphorothioate
  modified_base 23: mod_base = OTHER; note = 2'-O-methylcytidine
ggacatcttgaacacctttctcc

SEQ ID NO: 1900 - RNA, 21 nt, synthetic construct
  source 1..21: mol_type = other RNA
  modified_base 1: mod_base = OTHER; note = 2'-O-methylguanosine-3'-phosphorothioate
  modified_base 2: mod_base = OTHER; note = 2'-O-methyladenosine-3'-phosphorothioate
  modified_base 3: mod_base = OTHER; note = 2'-O-methyladenosine-3'-phosphate
  modified_base 4: mod_base = OTHER; note = 2'-O-methyladenosine-3'-phosphate
  modified_base 5: mod_base = OTHER; note = 2'-O-methylguanosine-3'-phosphate
  modified_base 6: mod_base = OTHER; note = 2'-O-methylguanosine-3'-phosphate
  modified_base 7: mod_base = OTHER; note = 2'-deoxy-2'-fluorouridine-3'-phosphate
  modified_base 8: mod_base = OTHER; note = 2'-O-methylguanosine-3'-phosphate
  modified_base 9: mod_base = OTHER; note = 2'-deoxy-2'-fluorouridine-3'-phosphate
  modified_base 10: mod_base = OTHER; note = 2'-deoxy-2'-fluorouridine-3'-phosphate
  modified_base 11: mod_base = OTHER; note = 2'-deoxy-2'-fluorocytidine-3'-phosphate
  modified_base 12: mod_base = OTHER; note = 2'-O-methyladenosine-3'-phosphate
  modified_base 13: mod_base = OTHER; note = 2'-O-methyladenosine-3'-phosphate
  modified_base 14: mod_base = OTHER; note = 2'-O-methylguanosine-3'-phosphate
  modified_base 15: mod_base = OTHER; note = 2'-O-methyladenosine-3'-phosphate
  modified_base 16: mod_base = OTHER; note = 2'-O-methyluridine-3'-phosphate
  modified_base 17: mod_base = OTHER; note = 2'-O-methylguanosine-3'-phosphate
  modified_base 18: mod_base = OTHER; note = 2'-O-methyluridine-3'-phosphate
  modified_base 19: mod_base = OTHER; note = 2'-O-methylcytidine-3'-phosphate
  modified_base 20: mod_base = OTHER; note = 2'-O-methylcytidine-3'-phosphate
  modified_base 21: mod_base = OTHER; note = 2'-O-methyluridine-3'-phosphate ((2S,4R)-1-[29-[[2-(acetylamino)-2-deoxy-beta-D-galactopyra nosyl]oxy]-14,14-bis[[3-[[3-[[5-[[2-(acetylamino)-2-deoxy-b eta-D-galactopyranosyl]oxy]-1-oxopentyl]amino]propyl]amino] -3-oxopropoxy]methyl]-1,12,19,25-tetraoxo-16-oxa-13,20,24-t riazanonacos-1-yl]-4-hydroxy-2-pyrrolidinyl)methyl ester
gaaaggtgttcaagatgtcct

SEQ ID NO: 1901 - RNA, 23 nt, synthetic construct
  source 1..23: mol_type = other RNA
  modified_base 1: mod_base = OTHER; note = 2'-O-methyladenosine-3'-phosphorothioate
  modified_base 2: mod_base = OTHER; note = 2'-deoxy-2'-fluoroguanosine-3'-phosphorothioate
  modified_base 3: mod_base = OTHER; note = 2'-O-methylguanosine-3'-phosphate
  modified_base 4: mod_base = OTHER; note = 2'-O-methyladenosine-3'-phosphate
  modified_base 5: mod_base = OTHER; note = 2'-O-methylcytidine-3'-phosphate
  modified_base 6: mod_base = OTHER; note = 2'-deoxy-2'-fluoroadenosine-3'-phosphate
  modified_base 7: mod_base = OTHER; note = 2'-O-methyluridine-3'-phosphate
  modified_base 8: mod_base = OTHER; note = 2'-deoxy-2'-fluorocytidine-3'-phosphate
  modified_base 9: mod_base = OTHER; note = 2'-deoxy-2'-fluorouridine-3'-phosphate
  modified_base 10: mod_base = OTHER; note = 2'-O-methyluridine-3'-phosphate
  modified_base 11: mod_base = OTHER; note = 2'-O-methylguanosine-3'-phosphate
  modified_base 12: mod_base = OTHER; note = 2'-O-methyladenosine-3'-phosphate
  modified_base 13: mod_base = OTHER; note = 2'-O-methyladenosine-3'-phosphate
  modified_base 14: mod_base = OTHER; note = 2'-deoxy-2'-fluorocytidine-3'-phosphate
  modified_base 15: mod_base = OTHER; note = 2'-O-methyladenosine-3'-phosphate
  modified_base 16: mod_base = OTHER; note = 2'-deoxy-2'-fluorocytidine-3'-phosphate
  modified_base 17: mod_base = OTHER; note = 2'-O-methylcytidine-3'-phosphate
  modified_base 18: mod_base = OTHER; note = 2'-O-methyluridine-3'-phosphate
  modified_base 19: mod_base = OTHER; note = 2'-O-methyluridine-3'-phosphate
  modified_base 20: mod_base = OTHER; note = 2'-O-methyluridine-3'-phosphate
  modified_base 21: mod_base = OTHER; note = 2'-O-methylcytidine-3'-phosphorothioate
  modified_base 22: mod_base = OTHER; note = 2'-O-methyluridine-3'-phosphorothioate
  modified_base 23: mod_base = OTHER; note = 2'-O-methylcytidine
aggacatcttgaacacctttctc

SEQ ID NO: 1902 - RNA, 21 nt, synthetic construct
  source 1..21: mol_type = other RNA
  modified_base 1: mod_base = OTHER; note = 2'-O-methylguanosine-3'-phosphorothioate
  modified_base 2: mod_base = OTHER; note = 2'-O-methylguanosine-3'-phosphorothioate
  modified_base 3: mod_base = OTHER; note = 2'-O-methylguanosine-3'-phosphate
  modified_base 4: mod_base = OTHER; note = 2'-O-methylguanosine-3'-phosphate
  modified_base 5: mod_base = OTHER; note = 2'-O-methyladenosine-3'-phosphate
  modified_base 6: mod_base = OTHER; note = 2'-O-methylguanosine-3'-phosphate
  modified_base 7: mod_base = OTHER; note = 2'-deoxy-2'-fluoroadenosine-3'-phosphate
  modified_base 8: mod_base = OTHER; note = 2'-O-methyladenosine-3'-phosphate
  modified_base 9: mod_base = OTHER; note = 2'-deoxy-2'-fluoroadenosine-3'-phosphate
  modified_base 10: mod_base = OTHER; note = 2'-deoxy-2'-fluoroguanosine-3'-phosphate
  modified_base 11: mod_base = OTHER; note = 2'-deoxy-2'-fluoroguanosine-3'-phosphate
  modified_base 12: mod_base = OTHER; note = 2'-O-methyluridine-3'-phosphate
  modified_base 13: mod_base = OTHER; note = 2'-O-methylguanosine-3'-phosphate
  modified_base 14: mod_base = OTHER; note = 2'-O-methyluridine-3'-phosphate
  modified_base 15: mod_base = OTHER; note = 2'-O-methyluridine-3'-phosphate
  modified_base 16: mod_base = OTHER; note = 2'-O-methylcytidine-3'-phosphate
  modified_base 17: mod_base = OTHER; note = 2'-O-methyladenosine-3'-phosphate
  modified_base 18: mod_base = OTHER; note = 2'-O-methyladenosine-3'-phosphate
  modified_base 19: mod_base = OTHER; note = 2'-O-methylguanosine-3'-phosphate
  modified_base 20: mod_base = OTHER; note = 2'-O-methyladenosine-3'-phosphate
  modified_base 21: mod_base = OTHER; note = 2'-O-methyluridine-3'-phosphate ((2S,4R)-1-[29-[[2-(acetylamino)-2-deoxy-beta-D-galactopyra nosyl]oxy]-14,14-bis[[3-[[3-[[5-[[2-(acetylamino)-2-deoxy-b eta-D-galactopyranosyl]oxy]-1-oxopentyl]amino]propyl]amino] -3-oxopropoxy]methyl]-1,12,19,25-tetraoxo-16-oxa-13,20,24-t riazanonacos-1-yl]-4-hydroxy-2-pyrrolidinyl)methyl ester
ggggagaaaggtgttcaagat

SEQ ID NO: 1903 - RNA, 23 nt, synthetic construct
  source 1..23: mol_type = other RNA
  modified_base 1: mod_base = OTHER; note = 2'-O-methyladenosine-3'-phosphorothioate
  modified_base 2: mod_base = OTHER; note = 2'-deoxy-2'-fluorouridine-3'-phosphorothioate
  modified_base 3: mod_base = OTHER; note = 2'-O-methylcytidine-3'-phosphate
  modified_base 4: mod_base = OTHER; note = 2'-O-methyluridine-3'-phosphate
  modified_base 5: mod_base = OTHER; note = 2'-O-methyluridine-3'-phosphate
  modified_base 6: mod_base = OTHER; note = 2'-deoxy-2'-fluoroguanosine-3'-phosphate
  modified_base 7: mod_base = OTHER; note = 2'-O-methyladenosine-3'-phosphate
  modified_base 8: mod_base = OTHER; note = 2'-deoxy-2'-fluoroadenosine-3'-phosphate
  modified_base 9: mod_base = OTHER; note = 2'-deoxy-2'-fluorocytidine-3'-phosphate
  modified_base 10: mod_base = OTHER; note = 2'-O-methyladenosine-3'-phosphate
  modified_base 11: mod_base = OTHER; note = 2'-O-methylcytidine-3'-phosphate
  modified_base 12: mod_base = OTHER; note = 2'-O-methylcytidine-3'-phosphate
  modified_base 13: mod_base = OTHER; note = 2'-O-methyluridine-3'-phosphate
  modified_base 14: mod_base = OTHER; note = 2'-deoxy-2'-fluorouridine-3'-phosphate
  modified_base 15: mod_base = OTHER; note = 2'-O-methyluridine-3'-phosphate
  modified_base 16: mod_base = OTHER; note = 2'-deoxy-2'-fluorocytidine-3'-phosphate
  modified_base 17: mod_base = OTHER; note = 2'-O-methyluridine-3'-phosphate
  modified_base 18: mod_base = OTHER; note = 2'-O-methylcytidine-3'-phosphate
  modified_base 19: mod_base = OTHER; note = 2'-O-methylcytidine-3'-phosphate
  modified_base 20: mod_base = OTHER; note = 2'-O-methylcytidine-3'-phosphate
  modified_base 21: mod_base = OTHER; note = 2'-O-methylcytidine-3'-phosphorothioate
  modified_base 22: mod_base = OTHER; note = 2'-O-methylcytidine-3'-phosphorothioate
  modified_base 23: mod_base = OTHER; note = 2'-O-methyluridine
atcttgaacacctttctccccct

SEQ ID NO: 1904 - RNA, 21 nt, synthetic construct
  source 1..21: mol_type = other RNA
  modified_base 1: mod_base = OTHER; note = 2'-O-methylguanosine-3'-phosphorothioate
  modified_base 2: mod_base = OTHER; note = 2'-O-methylguanosine-3'-phosphorothioate
  modified_base 3: mod_base = OTHER; note = 2'-O-methylguanosine-3'-phosphate
  modified_base 4: mod_base = OTHER; note = 2'-O-methylguanosine-3'-phosphate
  modified_base 5: mod_base = OTHER; note = 2'-O-methylguanosine-3'-phosphate
  modified_base 6: mod_base = OTHER; note = 2'-O-methyladenosine-3'-phosphate
  modified_base 7: mod_base = OTHER; note = 2'-deoxy-2'-fluoroguanosine-3'-phosphate
  modified_base 8: mod_base = OTHER; note = 2'-O-methyladenosine-3'-phosphate
  modified_base 9: mod_base = OTHER; note = 2'-deoxy-2'-fluoroadenosine-3'-phosphate
  modified_base 10: mod_base = OTHER; note = 2'-deoxy-2'-fluoroadenosine-3'-phosphate
  modified_base 11: mod_base = OTHER; note = 2'-deoxy-2'-fluoroguanosine-3'-phosphate
  modified_base 12: mod_base = OTHER; note = 2'-O-methylguanosine-3'-phosphate
  modified_base 13: mod_base = OTHER; note = 2'-O-methyluridine-3'-phosphate
  modified_base 14: mod_base = OTHER; note = 2'-O-methylguanosine-3'-phosphate
  modified_base 15: mod_base = OTHER; note = 2'-O-methyluridine-3'-phosphate
  modified_base 16: mod_base = OTHER; note = 2'-O-methyluridine-3'-phosphate
  modified_base 17: mod_base = OTHER; note = 2'-O-methylcytidine-3'-phosphate
  modified_base 18: mod_base = OTHER; note = 2'-O-methyladenosine-3'-phosphate
  modified_base 19: mod_base = OTHER; note = 2'-O-methyladenosine-3'-phosphate
  modified_base 20: mod_base = OTHER; note = 2'-O-methylguanosine-3'-phosphate
  modified_base 21: mod_base = OTHER; note = 2'-O-methyladenosine-3'-phosphate ((2S,4R)-1-[29-[[2-(acetylamino)-2-deoxy-beta-D-galactopyra nosyl]oxy]-14,14-bis[[3-[[3-[[5-[[2-(acetylamino)-2-deoxy-b eta-D-galactopyranosyl]oxy]-1-oxopentyl]amino]propyl]amino] -3-oxopropoxy]methyl]-1,12,19,25-tetraoxo-16-oxa-13,20,24-t riazanonacos-1-yl]-4-hydroxy-2-pyrrolidinyl)methyl ester
gggggagaaaggtgttcaaga

SEQ ID NO: 1905 - RNA, 23 nt, synthetic construct
  source 1..23: mol_type = other RNA
  modified_base 1: mod_base = OTHER; note = 2'-O-methyluridine-3'-phosphorothioate
  modified_base 2: mod_base = OTHER; note = 2'-deoxy-2'-fluorocytidine-3'-phosphorothioate
  modified_base 3: mod_base = OTHER; note = 2'-O-methyluridine-3'-phosphate
  modified_base 4: mod_base = OTHER; note = 2'-O-methyluridine-3'-phosphate
  modified_base 5: mod_base = OTHER; note = 2'-O-methylguanosine-3'-phosphate
  modified_base 6: mod_base = OTHER; note = 2'-deoxy-2'-fluoroadenosine-3'-phosphate
  modified_base 7: mod_base = OTHER; note = 2'-O-methyladenosine-3'-phosphate
  modified_base 8: mod_base = OTHER; note = 2'-deoxy-2'-fluorocytidine-3'-phosphate
  modified_base 9: mod_base = OTHER; note = 2'-deoxy-2'-fluoroadenosine-3'-phosphate
  modified_base 10: mod_base = OTHER; note = 2'-O-methylcytidine-3'-phosphate
  modified_base 11: mod_base = OTHER; note = 2'-O-methylcytidine-3'-phosphate
  modified_base 12: mod_base = OTHER; note = 2'-O-methyluridine-3'-phosphate
  modified_base 13: mod_base = OTHER; note = 2'-O-methyluridine-3'-phosphate
  modified_base 14: mod_base = OTHER; note = 2'-deoxy-2'-fluorouridine-3'-phosphate
  modified_base 15: mod_base = OTHER; note = 2'-O-methylcytidine-3'-phosphate
  modified_base 16: mod_base = OTHER; note = 2'-deoxy-2'-fluorouridine-3'-phosphate
  modified_base 17: mod_base = OTHER; note = 2'-O-methylcytidine-3'-phosphate
  modified_base 18: mod_base = OTHER; note = 2'-O-methylcytidine-3'-phosphate
  modified_base 19: mod_base = OTHER; note = 2'-O-methylcytidine-3'-phosphate
  modified_base 20: mod_base = OTHER; note = 2'-O-methylcytidine-3'-phosphate
  modified_base 21: mod_base = OTHER; note = 2'-O-methylcytidine-3'-phosphorothioate
  modified_base 22: mod_base = OTHER; note = 2'-O-methyluridine-3'-phosphorothioate
  modified_base 23: mod_base = OTHER; note = 2'-O-methylguanosine
tcttgaacacctttctccccctg

SEQ ID NO: 1906 - RNA, 21 nt, synthetic construct
  source 1..21: mol_type = other RNA
  modified_base 1: mod_base = OTHER; note = 2'-O-methyladenosine-3'-phosphorothioate
  modified_base 2: mod_base = OTHER; note = 2'-O-methylguanosine-3'-phosphorothioate
  modified_base 3: mod_base = OTHER; note = 2'-O-methyladenosine-3'-phosphate
  modified_base 4: mod_base = OTHER; note = 2'-O-methyladenosine-3'-phosphate
  modified_base 5: mod_base = OTHER; note = 2'-O-methyladenosine-3'-phosphate
  modified_base 6: mod_base = OTHER; note = 2'-O-methylcytidine-3'-phosphate
  modified_base 7: mod_base = OTHER; note = 2'-deoxy-2'-fluorouridine-3'-phosphate
  modified_base 8: mod_base = OTHER; note = 2'-O-methyluridine-3'-phosphate
  modified_base 9: mod_base = OTHER; note = 2'-deoxy-2'-fluorouridine-3'-phosphate
  modified_base 10: mod_base = OTHER; note = 2'-deoxy-2'-fluoroguanosine-3'-phosphate
  modified_base 11: mod_base = OTHER; note = 2'-deoxy-2'-fluoroguanosine-3'-phosphate
  modified_base 12: mod_base = OTHER; note = 2'-O-methylcytidine-3'-phosphate
  modified_base 13: mod_base = OTHER; note = 2'-O-methyluridine-3'-phosphate
  modified_base 14: mod_base = OTHER; note = 2'-O-methylguanosine-3'-phosphate
  modified_base 15: mod_base = OTHER; note = 2'-O-methyladenosine-3'-phosphate
  modified_base 16: mod_base = OTHER; note = 2'-O-methyluridine-3'-phosphate
  modified_base 17: mod_base = OTHER; note = 2'-O-methyladenosine-3'-phosphate
  modified_base 18: mod_base = OTHER; note = 2'-O-methyladenosine-3'-phosphate
  modified_base 19: mod_base = OTHER; note = 2'-O-methyluridine-3'-phosphate
  modified_base 20: mod_base = OTHER; note = 2'-O-methyladenosine-3'-phosphate
  modified_base 21: mod_base = OTHER; note = 2'-O-methyluridine-3'-phosphate ((2S,4R)-1-[29-[[2-(acetylamino)-2-deoxy-beta-D-galactopyra nosyl]oxy]-14,14-bis[[3-[[3-[[5-[[2-(acetylamino)-2-deoxy-b eta-D-galactopyranosyl]oxy]-1-oxopentyl]amino]propyl]amino] -3-oxopropoxy]methyl]-1,12,19,25-tetraoxo-16-oxa-13,20,24-t riazanonacos-1-yl]-4-hydroxy-2-pyrrolidinyl)methyl ester
agaaactttggctgataatat

SEQ ID NO: 1907 - RNA, 23 nt, synthetic construct
  source 1..23: mol_type = other RNA
  modified_base 1: mod_base = OTHER; note = 2'-O-methyladenosine-3'-phosphorothioate
  modified_base 2: mod_base = OTHER; note = 2'-deoxy-2'-fluorouridine-3'-phosphorothioate
  modified_base 3: mod_base = OTHER; note = 2'-O-methyladenosine-3'-phosphate
  modified_base 4: mod_base = OTHER; note = 2'-O-methyluridine-3'-phosphate
  modified_base 5: mod_base = OTHER; note = 2'-O-methyluridine-3'-phosphate
  modified_base 6: mod_base = OTHER; note = 2'-deoxy-2'-fluoroadenosine-3'-phosphate
  modified_base 7: mod_base = OTHER; note = 2'-O-methyluridine-3'-phosphate
  modified_base 8: mod_base = OTHER; note = 2'-deoxy-2'-fluorocytidine-3'-phosphate
  modified_base 9: mod_base = OTHER; note = 2'-deoxy-2'-fluoroadenosine-3'-phosphate
  modified_base 10: mod_base = OTHER; note = 2'-O-methylguanosine-3'-phosphate
  modified_base 11: mod_base = OTHER; note = 2'-O-methylcytidine-3'-phosphate
  modified_base 12: mod_base = OTHER; note = 2'-O-methylcytidine-3'-phosphate
  modified_base 13: mod_base = OTHER; note = 2'-O-methyladenosine-3'-phosphate
  modified_base 14: mod_base = OTHER; note = 2'-deoxy-2'-fluoroadenosine-3'-phosphate
  modified_base 15: mod_base = OTHER; note = 2'-O-methyladenosine-3'-phosphate
  modified_base 16: mod_base = OTHER; note = 2'-deoxy-2'-fluoroguanosine-3'-phosphate
  modified_base 17: mod_base = OTHER; note = 2'-O-methyluridine-3'-phosphate
  modified_base 18: mod_base = OTHER; note = 2'-O-methyluridine-3'-phosphate
  modified_base 19: mod_base = OTHER; note = 2'-O-methyluridine-3'-phosphate
  modified_base 20: mod_base = OTHER; note = 2'-O-methylcytidine-3'-phosphate
  modified_base 21: mod_base = OTHER; note = 2'-O-methyluridine-3'-phosphorothioate
  modified_base 22: mod_base = OTHER; note = 2'-O-methyluridine-3'-phosphorothioate
  modified_base 23: mod_base = OTHER; note = 2'-O-methylcytidine
atattatcagccaaagtttcttc

SEQ ID NO: 1908 - RNA, 21 nt, synthetic construct
  source 1..21: mol_type = other RNA
  modified_base 1: mod_base = OTHER; note = 2'-O-methylguanosine-3'-phosphorothioate
  modified_base 2: mod_base = OTHER; note = 2'-O-methyladenosine-3'-phosphorothioate
  modified_base 3: mod_base = OTHER; note = 2'-O-methyladenosine-3'-phosphate
  modified_base 4: mod_base = OTHER; note = 2'-O-methyladenosine-3'-phosphate
  modified_base 5: mod_base = OTHER; note = 2'-O-methylcytidine-3'-phosphate
  modified_base 6: mod_base = OTHER; note = 2'-O-methyluridine-3'-phosphate
  modified_base 7: mod_base = OTHER; note = 2'-deoxy-2'-fluorouridine-3'-phosphate
  modified_base 8: mod_base = OTHER; note = 2'-O-methyluridine-3'-phosphate
  modified_base 9: mod_base = OTHER; note = 2'-deoxy-2'-fluoroguanosine-3'-phosphate
  modified_base 10: mod_base = OTHER; note = 2'-deoxy-2'-fluoroguanosine-3'-phosphate
  modified_base 11: mod_base = OTHER; note = 2'-deoxy-2'-fluorocytidine-3'-phosphate
  modified_base 12: mod_base = OTHER; note = 2'-O-methyluridine-3'-phosphate
  modified_base 13: mod_base = OTHER; note = 2'-O-methylguanosine-3'-phosphate
  modified_base 14: mod_base = OTHER; note = 2'-O-methyladenosine-3'-phosphate
  modified_base 15: mod_base = OTHER; note = 2'-O-methyluridine-3'-phosphate
  modified_base 16: mod_base = OTHER; note = 2'-O-methyladenosine-3'-phosphate
  modified_base 17: mod_base = OTHER; note = 2'-O-methyladenosine-3'-phosphate
  modified_base 18: mod_base = OTHER; note = 2'-O-methyluridine-3'-phosphate
  modified_base 19: mod_base = OTHER; note = 2'-O-methyladenosine-3'-phosphate
  modified_base 20: mod_base = OTHER; note = 2'-O-methyluridine-3'-phosphate
  modified_base 21: mod_base = OTHER; note = 2'-O-methyluridine-3'-phosphate ((2S,4R)-1-[29-[[2-(acetylamino)-2-deoxy-beta-D-galactopyra nosyl]oxy]-14,14-bis[[3-[[3-[[5-[[2-(acetylamino)-2-deoxy-b eta-D-galactopyranosyl]oxy]-1-oxopentyl]amino]propyl]amino] -3-oxopropoxy]methyl]-1,12,19,25-tetraoxo-16-oxa-13,20,24-t riazanonacos-1-yl]-4-hydroxy-2-pyrrolidinyl)methyl ester
gaaactttggctgataatatt

SEQ ID NO: 1909 - RNA, 23 nt, synthetic construct
  source 1..23: mol_type = other RNA
  modified_base 1: mod_base = OTHER; note = 2'-O-methyladenosine-3'-phosphorothioate
  modified_base 2: mod_base = OTHER; note = 2'-deoxy-2'-fluoroadenosine-3'-phosphorothioate
  modified_base 3: mod_base = OTHER; note = 2'-O-methyluridine-3'-phosphate
  modified_base 4: mod_base = OTHER; note = 2'-O-methyladenosine-3'-phosphate
  modified_base 5: mod_base = OTHER; note = 2'-O-methyluridine-3'-phosphate
  modified_base 6: mod_base = OTHER; note = 2'-deoxy-2'-fluorouridine-3'-phosphate
  modified_base 7: mod_base = OTHER; note = 2'-O-methyladenosine-3'-phosphate
  modified_base 8: mod_base = OTHER; note = 2'-deoxy-2'-fluorouridine-3'-phosphate
  modified_base 9: mod_base = OTHER; note = 2'-deoxy-2'-fluorocytidine-3'-phosphate
  modified_base 10: mod_base = OTHER; note = 2'-O-methyladenosine-3'-phosphate
  modified_base 11: mod_base = OTHER; note = 2'-O-methylguanosine-3'-phosphate
  modified_base 12: mod_base = OTHER; note = 2'-O-methylcytidine-3'-phosphate
  modified_base 13: mod_base = OTHER; note = 2'-O-methylcytidine-3'-phosphate
  modified_base 14: mod_base = OTHER; note = 2'-deoxy-2'-fluoroadenosine-3'-phosphate
  modified_base 15: mod_base = OTHER; note = 2'-O-methyladenosine-3'-phosphate
  modified_base 16: mod_base = OTHER; note = 2'-deoxy-2'-fluoroadenosine-3'-phosphate
  modified_base 17: mod_base = OTHER; note = 2'-O-methylguanosine-3'-phosphate
  modified_base 18: mod_base = OTHER; note = 2'-O-methyluridine-3'-phosphate
  modified_base 19: mod_base = OTHER; note = 2'-O-methyluridine-3'-phosphate
  modified_base 20: mod_base = OTHER; note = 2'-O-methyluridine-3'-phosphate
  modified_base 21: mod_base = OTHER; note = 2'-O-methylcytidine-3'-phosphorothioate
  modified_base 22: mod_base = OTHER; note = 2'-O-methyluridine-3'-phosphorothioate
  modified_base 23: mod_base = OTHER; note = 2'-O-methyluridine
aatattatcagccaaagtttctt

SEQ ID NO: 1910 - RNA, 21 nt, synthetic construct
  source 1..21: mol_type = other RNA
  modified_base 1: mod_base = OTHER; note = 2'-O-methyladenosine-3'-phosphorothioate
  modified_base 2: mod_base = OTHER; note = 2'-O-methyluridine-3'-phosphorothioate
  modified_base 3: mod_base = OTHER; note = 2'-O-methylguanosine-3'-phosphate
  modified_base 4: mod_base = OTHER; note = 2'-O-methyladenosine-3'-phosphate
  modified_base 5: mod_base = OTHER; note = 2'-O-methyladenosine-3'-phosphate
  modified_base 6: mod_base = OTHER; note = 2'-O-methylguanosine-3'-phosphate
  modified_base 7: mod_base = OTHER; note = 2'-deoxy-2'-fluoroadenosine-3'-phosphate
  modified_base 8: mod_base = OTHER; note = 2'-O-methyladenosine-3'-phosphate
  modified_base 9: mod_base = OTHER; note = 2'-deoxy-2'-fluoroadenosine-3'-phosphate
  modified_base 10: mod_base = OTHER; note = 2'-deoxy-2'-fluorocytidine-3'-phosphate
  modified_base 11: mod_base = OTHER; note = 2'-deoxy-2'-fluorouridine-3'-phosphate
  modified_base 12: mod_base = OTHER; note = 2'-O-methyluridine-3'-phosphate
  modified_base 13: mod_base = OTHER; note = 2'-O-methyluridine-3'-phosphate
  modified_base 14: mod_base = OTHER; note = 2'-O-methylguanosine-3'-phosphate
  modified_base 15: mod_base = OTHER; note = 2'-O-methylguanosine-3'-phosphate
  modified_base 16: mod_base = OTHER; note = 2'-O-methylcytidine-3'-phosphate
  modified_base 17: mod_base = OTHER; note = 2'-O-methyluridine-3'-phosphate
  modified_base 18: mod_base = OTHER; note = 2'-O-methylguanosine-3'-phosphate
  modified_base 19: mod_base = OTHER; note = 2'-O-methyladenosine-3'-phosphate
  modified_base 20: mod_base = OTHER; note = 2'-O-methyluridine-3'-phosphate
  modified_base 21: mod_base = OTHER; note = 2'-O-methyladenosine-3'-phosphate ((2S,4R)-1-[29-[[2-(acetylamino)-2-deoxy-beta-D-galactopyra nosyl]oxy]-14,14-bis[[3-[[3-[[5-[[2-(acetylamino)-2-deoxy-b eta-D-galactopyranosyl]oxy]-1-oxopentyl]amino]propyl]amino] -3-oxopropoxy]methyl]-1,12,19,25-tetraoxo-16-oxa-13,20,24-t riazanonacos-1-yl]-4-hydroxy-2-pyrrolidinyl)methyl ester
atgaagaaactttggctgata

SEQ ID NO: 1911 - RNA, 23 nt, synthetic construct
  source 1..23: mol_type = other RNA
  modified_base 1: mod_base = OTHER; note = 2'-O-methyluridine-3'-phosphorothioate
  modified_base 2: mod_base = OTHER; note = 2'-deoxy-2'-fluoroadenosine-3'-phosphorothioate
  modified_base 3: mod_base = OTHER; note = 2'-O-methyluridine-3'-phosphate
  modified_base 4: mod_base = OTHER; note = 2'-O-methylcytidine-3'-phosphate
  modified_base 5: mod_base = OTHER; note = 2'-O-methyladenosine-3'-phosphate
  modified_base 6: mod_base = OTHER; note = 2'-deoxy-2'-fluoroguanosine-3'-phosphate
  modified_base 7: mod_base = OTHER; note = 2'-O-methylcytidine-3'-phosphate
  modified_base 8: mod_base = OTHER; note = 2'-deoxy-2'-fluorocytidine-3'-phosphate
  modified_base 9: mod_base = OTHER; note = 2'-deoxy-2'-fluoroadenosine-3'-phosphate
  modified_base 10: mod_base = OTHER; note = 2'-O-methyladenosine-3'-phosphate
  modified_base 11: mod_base = OTHER; note = 2'-O-methyladenosine-3'-phosphate
  modified_base 12: mod_base = OTHER; note = 2'-O-methylguanosine-3'-phosphate
  modified_base 13: mod_base = OTHER; note = 2'-O-methyluridine-3'-phosphate
  modified_base 14: mod_base = OTHER; note = 2'-deoxy-2'-fluorouridine-3'-phosphate
  modified_base 15: mod_base = OTHER; note = 2'-O-methyluridine-3'-phosphate
  modified_base 16: mod_base = OTHER; note = 2'-deoxy-2'-fluorocytidine-3'-phosphate
  modified_base 17: mod_base = OTHER; note = 2'-O-methyluridine-3'-phosphate
  modified_base 18: mod_base = OTHER; note = 2'-O-methyluridine-3'-phosphate
  modified_base 19: mod_base = OTHER; note = 2'-O-methylcytidine-3'-phosphate
  modified_base 20: mod_base = OTHER; note = 2'-O-methyladenosine-3'-phosphate
  modified_base 21: mod_base = OTHER; note = 2'-O-methyluridine-3'-phosphorothioate
  modified_base 22: mod_base = OTHER; note = 2'-O-methylcytidine-3'-phosphorothioate
  modified_base 23: mod_base = OTHER; note = 2'-O-methyladenosine
tatcagccaaagtttcttcatca

SEQ ID NO: 1912 - RNA, 21 nt, synthetic construct
  source 1..21: mol_type = other RNA
  modified_base 1: mod_base = OTHER; note = 2'-O-methylguanosine-3'-phosphorothioate
  modified_base 2: mod_base = OTHER; note = 2'-O-methyladenosine-3'-phosphorothioate
  modified_base 3: mod_base = OTHER; note = 2'-O-methyluridine-3'-phosphate
  modified_base 4: mod_base = OTHER; note = 2'-O-methylguanosine-3'-phosphate
  modified_base 5: mod_base = OTHER; note = 2'-O-methyladenosine-3'-phosphate
  modified_base 6: mod_base = OTHER; note = 2'-O-methyladenosine-3'-phosphate
  modified_base 7: mod_base = OTHER; note = 2'-deoxy-2'-fluoroguanosine-3'-phosphate
  modified_base 8: mod_base = OTHER; note = 2'-O-methyladenosine-3'-phosphate
  modified_base 9: mod_base = OTHER; note = 2'-deoxy-2'-fluoroadenosine-3'-phosphate
  modified_base 10: mod_base = OTHER; note = 2'-deoxy-2'-fluoroadenosine-3'-phosphate
  modified_base 11: mod_base = OTHER; note = 2'-deoxy-2'-fluorocytidine-3'-phosphate
  modified_base 12: mod_base = OTHER; note = 2'-O-methyluridine-3'-phosphate
  modified_base 13: mod_base = OTHER; note = 2'-O-methyluridine-3'-phosphate
  modified_base 14: mod_base = OTHER; note = 2'-O-methyluridine-3'-phosphate
  modified_base 15: mod_base = OTHER; note = 2'-O-methylguanosine-3'-phosphate
  modified_base 16: mod_base = OTHER; note = 2'-O-methylguanosine-3'-phosphate
  modified_base 17: mod_base = OTHER; note = 2'-O-methylcytidine-3'-phosphate
  modified_base 18: mod_base = OTHER; note = 2'-O-methyluridine-3'-phosphate
  modified_base 19: mod_base = OTHER; note = 2'-O-methylguanosine-3'-phosphate
  modified_base 20: mod_base = OTHER; note = 2'-O-methyladenosine-3'-phosphate
  modified_base 21: mod_base = OTHER; note = 2'-O-methyluridine-3'-phosphate ((2S,4R)-1-[29-[[2-(acetylamino)-2-deoxy-beta-D-galactopyra nosyl]oxy]-14,14-bis[[3-[[3-[[5-[[2-(acetylamino)-2-deoxy-b eta-D-galactopyranosyl]oxy]-1-oxopentyl]amino]propyl]amino] -3-oxopropoxy]methyl]-1,12,19,25-tetraoxo-16-oxa-13,20,24-t riazanonacos-1-yl]-4-hydroxy-2-pyrrolidinyl)methyl ester
gatgaagaaactttggctgat

SEQ ID NO: 1913 - RNA, 23 nt, synthetic construct
  source 1..23: mol_type = other RNA
  modified_base 1: mod_base = OTHER; note = 2'-O-methyladenosine-3'-phosphorothioate
  modified_base 2: mod_base = OTHER; note = 2'-deoxy-2'-fluorouridine-3'-phosphorothioate
  modified_base 3: mod_base = OTHER; note = 2'-O-methylcytidine-3'-phosphate
  modified_base 4: mod_base = OTHER; note = 2'-O-methyladenosine-3'-phosphate
  modified_base 5: mod_base = OTHER; note = 2'-O-methylguanosine-3'-phosphate
  modified_base 6: mod_base = OTHER; note = 2'-deoxy-2'-fluorocytidine-3'-phosphate
  modified_base 7: mod_base = OTHER; note = 2'-O-methylcytidine-3'-phosphate
  modified_base 8: mod_base = OTHER; note = 2'-deoxy-2'-fluoroadenosine-3'-phosphate
  modified_base 9: mod_base = OTHER; note = 2'-deoxy-2'-fluoroadenosine-3'-phosphate
  modified_base 10: mod_base = OTHER; note = 2'-O-methyladenosine-3'-phosphate
  modified_base 11: mod_base = OTHER; note = 2'-O-methylguanosine-3'-phosphate
  modified_base 12: mod_base = OTHER; note = 2'-O-methyluridine-3'-phosphate
  modified_base 13: mod_base = OTHER; note = 2'-O-methyluridine-3'-phosphate
  modified_base 14: mod_base = OTHER; note = 2'-deoxy-2'-fluorouridine-3'-phosphate
  modified_base 15: mod_base = OTHER; note = 2'-O-methylcytidine-3'-phosphate
  modified_base 16: mod_base = OTHER; note = 2'-deoxy-2'-fluorouridine-3'-phosphate
  modified_base 17: mod_base = OTHER; note = 2'-O-methyluridine-3'-phosphate
  modified_base 18: mod_base = OTHER; note = 2'-O-methylcytidine-3'-phosphate
  modified_base 19: mod_base = OTHER; note = 2'-O-methyladenosine-3'-phosphate
  modified_base 20: mod_base = OTHER; note = 2'-O-methyluridine-3'-phosphate
  modified_base 21: mod_base = OTHER; note = 2'-O-methylcytidine-3'-phosphorothioate
  modified_base 22: mod_base = OTHER; note = 2'-O-methyladenosine-3'-phosphorothioate
  modified_base 23: mod_base = OTHER; note = 2'-O-methyluridine
atcagccaaagtttcttcatcat

SEQ ID NO: 1914 - RNA, 21 nt, synthetic construct
  source 1..21: mol_type = other RNA
  modified_base 1: mod_base = OTHER; note = 2'-O-methyladenosine-3'-phosphorothioate
  modified_base 2: mod_base = OTHER; note = 2'-O-methyladenosine-3'-phosphorothioate
  modified_base 3: mod_base = OTHER; note = 2'-O-methylguanosine-3'-phosphate
  modified_base 4: mod_base = OTHER; note = 2'-O-methylguanosine-3'-phosphate
  modified_base 5: mod_base = OTHER; note = 2'-O-methylcytidine-3'-phosphate
  modified_base 6: mod_base = OTHER; note = 2'-O-methyladenosine-3'-phosphate
  modified_base 7: mod_base = OTHER; note = 2'-deoxy-2'-fluorocytidine-3'-phosphate
  modified_base 8: mod_base = OTHER; note = 2'-O-methyluridine-3'-phosphate
  modified_base 9: mod_base = OTHER; note = 2'-deoxy-2'-fluoroguanosine-3'-phosphate
  modified_base 10: mod_base = OTHER; note = 2'-deoxy-2'-fluoroadenosine-3'-phosphate
  modified_base 11: mod_base = OTHER; note = 2'-deoxy-2'-fluorouridine-3'-phosphate
  modified_base 12: mod_base = OTHER; note = 2'-O-methylguanosine-3'-phosphate
  modified_base 13: mod_base = OTHER; note = 2'-O-methyluridine-3'-phosphate
  modified_base 14: mod_base = OTHER; note = 2'-O-methyluridine-3'-phosphate
  modified_base 15: mod_base = OTHER; note = 2'-O-methylcytidine-3'-phosphate
  modified_base 16: mod_base = OTHER; note = 2'-O-methyluridine-3'-phosphate
  modified_base 17: mod_base = OTHER; note = 2'-O-methylguanosine-3'-phosphate
  modified_base 18: mod_base = OTHER; note = 2'-O-methyladenosine-3'-phosphate
  modified_base 19: mod_base = OTHER; note = 2'-O-methyladenosine-3'-phosphate
  modified_base 20: mod_base = OTHER; note = 2'-O-methyladenosine-3'-phosphate
  modified_base 21: mod_base = OTHER; note = 2'-O-methylguanosine-3'-phosphate ((2S,4R)-1-[29-[[2-(acetylamino)-2-deoxy-beta-D-galactopyra nosyl]oxy]-14,14-bis[[3-[[3-[[5-[[2-(acetylamino)-2-deoxy-b eta-D-galactopyranosyl]oxy]-1-oxopentyl]amino]propyl]amino] -3-oxopropoxy]methyl]-1,12,19,25-tetraoxo-16-oxa-13,20,24-t riazanonacos-1-yl]-4-hydroxy-2-pyrrolidinyl)methyl ester
aaggcactgatgttctgaaag

SEQ ID NO: 1915 - RNA, 23 nt, synthetic construct
  source 1..23: mol_type = other RNA
  modified_base 1: mod_base = OTHER; note = 2'-O-methylcytidine-3'-phosphorothioate
  modified_base 2: mod_base = OTHER; note = 2'-deoxy-2'-fluorouridine-3'-phosphorothioate
  modified_base 3: mod_base = OTHER; note = 2'-O-methyluridine-3'-phosphate
  modified_base 4: mod_base = OTHER; note = 2'-O-methyluridine-3'-phosphate
  modified_base 5: mod_base = OTHER; note = 2'-O-methylcytidine-3'-phosphate
  modified_base 6: mod_base = OTHER; note = 2'-deoxy-2'-fluoroadenosine-3'-phosphate
  modified_base 7: mod_base = OTHER; note = 2'-O-methylguanosine-3'-phosphate
  modified_base 8: mod_base = OTHER; note = 2'-deoxy-2'-fluoroadenosine-3'-phosphate
  modified_base 9: mod_base = OTHER; note = 2'-deoxy-2'-fluoroadenosine-3'-phosphate
  modified_base 10: mod_base = OTHER; note = 2'-O-methylcytidine-3'-phosphate
  modified_base 11: mod_base = OTHER; note = 2'-O-methyladenosine-3'-phosphate
  modified_base 12: mod_base = OTHER; note = 2'-O-methyluridine-3'-phosphate
  modified_base 13: mod_base = OTHER; note = 2'-O-methylcytidine-3'-phosphate
  modified_base 14: mod_base = OTHER; note = 2'-deoxy-2'-fluoroadenosine-3'-phosphate
  modified_base 15: mod_base = OTHER; note = 2'-O-methylguanosine-3'-phosphate
  modified_base 16: mod_base = OTHER; note = 2'-deoxy-2'-fluorouridine-3'-phosphate
  modified_base 17: mod_base = OTHER; note = 2'-O-methylguanosine-3'-phosphate
  modified_base 18: mod_base = OTHER; note = 2'-O-methylcytidine-3'-phosphate
  modified_base 19: mod_base = OTHER; note = 2'-O-methylcytidine-3'-phosphate
  modified_base 20: mod_base = OTHER; note = 2'-O-methyluridine-3'-phosphate
  modified_base 21: mod_base = OTHER; note = 2'-O-methyluridine-3'-phosphorothioate
  modified_base 22: mod_base = OTHER; note = 2'-O-methyluridine-3'-phosphorothioate
  modified_base 23: mod_base = OTHER; note = 2'-O-methylcytidine
ctttcagaacatcagtgcctttc

SEQ ID NO: 1916 - RNA, 21 nt, synthetic construct
  source 1..21: mol_type = other RNA
  modified_base 1: mod_base = OTHER; note = 2'-O-methyladenosine-3'-phosphorothioate
  modified_base 2: mod_base = OTHER; note = 2'-O-methylguanosine-3'-phosphorothioate
  modified_base 3: mod_base = OTHER; note = 2'-O-methylguanosine-3'-phosphate
  modified_base 4: mod_base = OTHER; note = 2'-O-methylcytidine-3'-phosphate
  modified_base 5: mod_base = OTHER; note = 2'-O-methyladenosine-3'-phosphate
  modified_base 6: mod_base = OTHER; note = 2'-O-methylcytidine-3'-phosphate
  modified_base 7: mod_base = OTHER; note = 2'-deoxy-2'-fluorouridine-3'-phosphate
  modified_base 8: mod_base = OTHER; note = 2'-O-methylguanosine-3'-phosphate
  modified_base 9: mod_base = OTHER; note = 2'-deoxy-2'-fluoroadenosine-3'-phosphate
  modified_base 10: mod_base = OTHER; note = 2'-deoxy-2'-fluorouridine-3'-phosphate
  modified_base 11: mod_base = OTHER; note = 2'-deoxy-2'-fluoroguanosine-3'-phosphate
  modified_base 12: mod_base = OTHER; note = 2'-O-methyluridine-3'-phosphate
  modified_base 13: mod_base = OTHER; note = 2'-O-methyluridine-3'-phosphate
  modified_base 14: mod_base = OTHER; note = 2'-O-methylcytidine-3'-phosphate
  modified_base 15: mod_base = OTHER; note = 2'-O-methyluridine-3'-phosphate
  modified_base 16: mod_base = OTHER; note = 2'-O-methylguanosine-3'-phosphate
  modified_base 17: mod_base = OTHER; note = 2'-O-methyladenosine-3'-phosphate
  modified_base 18: mod_base = OTHER; note = 2'-O-methyladenosine-3'-phosphate
  modified_base 19: mod_base = OTHER; note = 2'-O-methyladenosine-3'-phosphate
  modified_base 20: mod_base = OTHER; note = 2'-O-methylguanosine-3'-phosphate
  modified_base 21: mod_base = OTHER; note = 2'-O-methylcytidine-3'-phosphate ((2S,4R)-1-[29-[[2-(acetylamino)-2-deoxy-beta-D-galactopyra nosyl]oxy]-14,14-bis[[3-[[3-[[5-[[2-(acetylamino)-2-deoxy-b eta-D-galactopyranosyl]oxy]-1-oxopentyl]amino]propyl]amino] -3-oxopropoxy]methyl]-1,12,19,25-tetraoxo-16-oxa-13,20,24-t riazanonacos-1-yl]-4-hydroxy-2-pyrrolidinyl)methyl ester
aggcactgatgttctgaaagc

SEQ ID NO: 1917 - RNA, 23 nt, synthetic construct
  source 1..23: mol_type = other RNA
  modified_base 1: mod_base = OTHER; note = 2'-O-methylguanosine-3'-phosphorothioate
  modified_base 2: mod_base = OTHER; note = 2'-deoxy-2'-fluorocytidine-3'-phosphorothioate
  modified_base 3: mod_base = OTHER; note = 2'-O-methyluridine-3'-phosphate
  modified_base 4: mod_base = OTHER; note = 2'-O-methyluridine-3'-phosphate
  modified_base 5: mod_base = OTHER; note = 2'-O-methyluridine-3'-phosphate
  modified_base 6: mod_base = OTHER; note = 2'-deoxy-2'-fluorocytidine-3'-phosphate
  modified_base 7: mod_base = OTHER; note = 2'-O-methyladenosine-3'-phosphate
  modified_base 8: mod_base = OTHER; note = 2'-deoxy-2'-fluoroguanosine-3'-phosphate
  modified_base 9: mod_base = OTHER; note = 2'-deoxy-2'-fluoroadenosine-3'-phosphate
  modified_base 10: mod_base = OTHER; note = 2'-O-methyladenosine-3'-phosphate
  modified_base 11: mod_base = OTHER; note = 2'-O-methylcytidine-3'-phosphate
  modified_base 12: mod_base = OTHER; note = 2'-O-methyladenosine-3'-phosphate
  modified_base 13: mod_base = OTHER; note = 2'-O-methyluridine-3'-phosphate
  modified_base 14: mod_base = OTHER; note = 2'-deoxy-2'-fluorocytidine-3'-phosphate
  modified_base 15: mod_base = OTHER; note = 2'-O-methyladenosine-3'-phosphate
  modified_base 16: mod_base = OTHER; note = 2'-deoxy-2'-fluoroguanosine-3'-phosphate
  modified_base 17: mod_base = OTHER; note = 2'-O-methyluridine-3'-phosphate
  modified_base 18: mod_base = OTHER; note = 2'-O-methylguanosine-3'-phosphate
  modified_base 19: mod_base = OTHER; note = 2'-O-methylcytidine-3'-phosphate
  modified_base 20: mod_base = OTHER; note = 2'-O-methylcytidine-3'-phosphate
  modified_base 21: mod_base = OTHER; note = 2'-O-methyluridine-3'-phosphorothioate
  modified_base 22: mod_base = OTHER; note = 2'-O-methyluridine-3'-phosphorothioate
  modified_base 23: mod_base = OTHER; note = 2'-O-methyluridine
gctttcagaacatcagtgccttt

SEQ ID NO: 1918 - RNA, 21 nt, synthetic construct
  source 1..21: mol_type = other RNA
  modified_base 1: mod_base = OTHER; note = 2'-O-methylcytidine-3'-phosphorothioate
  modified_base 2: mod_base = OTHER; note = 2'-O-methylguanosine-3'-phosphorothioate
  modified_base 3: mod_base = OTHER; note = 2'-O-methylguanosine-3'-phosphate
  modified_base 4: mod_base = OTHER; note = 2'-O-methyladenosine-3'-phosphate
  modified_base 5: mod_base = OTHER; note = 2'-O-methyladenosine-3'-phosphate
  modified_base 6: mod_base = OTHER; note = 2'-O-methyladenosine-3'-phosphate
  modified_base 7: mod_base = OTHER; note = 2'-deoxy-2'-fluoroguanosine-3'-phosphate
  modified_base 8: mod_base = OTHER; note = 2'-O-methylguanosine-3'-phosphate
  modified_base 9: mod_base = OTHER; note = 2'-deoxy-2'-fluorocytidine-3'-phosphate
  modified_base 10: mod_base = OTHER; note = 2'-deoxy-2'-fluoroadenosine-3'-phosphate
  modified_base 11: mod_base = OTHER; note = 2'-deoxy-2'-fluorocytidine-3'-phosphate
  modified_base 12: mod_base = OTHER; note = 2'-O-methyluridine-3'-phosphate
  modified_base 13: mod_base = OTHER; note = 2'-O-methylguanosine-3'-phosphate
  modified_base 14: mod_base = OTHER; note = 2'-O-methyladenosine-3'-phosphate
  modified_base 15: mod_base = OTHER; note = 2'-O-methyluridine-3'-phosphate
  modified_base 16: mod_base = OTHER; note = 2'-O-methylguanosine-3'-phosphate
  modified_base 17: mod_base = OTHER; note = 2'-O-methyluridine-3'-phosphate
  modified_base 18: mod_base = OTHER; note = 2'-O-methyluridine-3'-phosphate
  modified_base 19: mod_base = OTHER; note = 2'-O-methylcytidine-3'-phosphate
  modified_base 20: mod_base = OTHER; note = 2'-O-methyluridine-3'-phosphate
  modified_base 21: mod_base = OTHER; note = 2'-O-methylguanosine-3'-phosphate ((2S,4R)-1-[29-[[2-(acetylamino)-2-deoxy-beta-D-galactopyra nosyl]oxy]-14,14-bis[[3-[[3-[[5-[[2-(acetylamino)-2-deoxy-b eta-D-galactopyranosyl]oxy]-1-oxopentyl]amino]propyl]amino] -3-oxopropoxy]methyl]-1,12,19,25-tetraoxo-16-oxa-13,20,24-t riazanonacos-1-yl]-4-hydroxy-2-pyrrolidinyl)methyl ester
cggaaaggcactgatgttctg

SEQ ID NO: 1919 - RNA, 23 nt, synthetic construct
  source 1..23: mol_type = other RNA
  modified_base 1: mod_base = OTHER; note = 2'-O-methylcytidine-3'-phosphorothioate
  modified_base 2: mod_base = OTHER; note = 2'-deoxy-2'-fluoroadenosine-3'-phosphorothioate
  modified_base 3: mod_base = OTHER; note = 2'-O-methylguanosine-3'-phosphate
  modified_base 4: mod_base = OTHER; note = 2'-O-methyladenosine-3'-phosphate
  modified_base 5: mod_base = OTHER; note = 2'-O-methyladenosine-3'-phosphate
  modified_base 6: mod_base = OTHER; note = 2'-deoxy-2'-fluorocytidine-3'-phosphate
  modified_base 7: mod_base = OTHER; note = 2'-O-methyladenosine-3'-phosphate
  modified_base 8: mod_base = OTHER; note = 2'-deoxy-2'-fluorouridine-3'-phosphate
  modified_base 9: mod_base = OTHER; note = 2'-deoxy-2'-fluorocytidine-3'-phosphate
  modified_base 10: mod_base = OTHER; note = 2'-O-methyladenosine-3'-phosphate
  modified_base 11: mod_base = OTHER; note = 2'-O-methylguanosine-3'-phosphate
  modified_base 12: mod_base = OTHER; note = 2'-O-methyluridine-3'-phosphate
  modified_base 13: mod_base = OTHER; note = 2'-O-methylguanosine-3'-phosphate
  modified_base 14: mod_base = OTHER; note = 2'-deoxy-2'-fluorocytidine-3'-phosphate
  modified_base 15: mod_base = OTHER; note = 2'-O-methylcytidine-3'-phosphate
  modified_base 16: mod_base = OTHER; note = 2'-deoxy-2'-fluorouridine-3'-phosphate
  modified_base 17: mod_base = OTHER; note = 2'-O-methyluridine-3'-phosphate
  modified_base 18: mod_base = OTHER; note = 2'-O-methyluridine-3'-phosphate
  modified_base 19: mod_base = OTHER; note = 2'-O-methylcytidine-3'-phosphate
  modified_base 20: mod_base = OTHER; note = 2'-O-methylcytidine-3'-phosphate
  modified_base 21: mod_base = OTHER; note = 2'-O-methylguanosine-3'-phosphorothioate
  modified_base 22: mod_base = OTHER; note = 2'-O-methylcytidine-3'-phosphorothioate
  modified_base 23: mod_base = OTHER; note = 2'-O-methyladenosine
cagaacatcagtgcctttccgca

SEQ ID NO: 1920 - RNA, 21 nt, synthetic construct
  source 1..21: mol_type = other RNA
  modified_base 1: mod_base = OTHER; note = 2'-O-methylguanosine-3'-phosphorothioate
  modified_base 2: mod_base = OTHER; note = 2'-O-methylcytidine-3'-phosphorothioate
  modified_base 3: mod_base = OTHER; note = 2'-O-methylguanosine-3'-phosphate
  modified_base 4: mod_base = OTHER; note = 2'-O-methylguanosine-3'-phosphate
  modified_base 5: mod_base = OTHER; note = 2'-O-methyladenosine-3'-phosphate
  modified_base 6: mod_base = OTHER; note = 2'-O-methyladenosine-3'-phosphate
  modified_base 7: mod_base = OTHER; note = 2'-deoxy-2'-fluoroadenosine-3'-phosphate
  modified_base 8: mod_base = OTHER; note = 2'-O-methylguanosine-3'-phosphate
  modified_base 9: mod_base = OTHER; note = 2'-deoxy-2'-fluoroguanosine-3'-phosphate
  modified_base 10: mod_base = OTHER; note = 2'-deoxy-2'-fluorocytidine-3'-phosphate
  modified_base 11: mod_base = OTHER; note = 2'-deoxy-2'-fluoroadenosine-3'-phosphate
  modified_base 12: mod_base = OTHER; note = 2'-O-methylcytidine-3'-phosphate
  modified_base 13: mod_base = OTHER; note = 2'-O-methyluridine-3'-phosphate
  modified_base 14: mod_base = OTHER; note = 2'-O-methylguanosine-3'-phosphate
  modified_base 15: mod_base = OTHER; note = 2'-O-methyladenosine-3'-phosphate
  modified_base 16: mod_base = OTHER; note = 2'-O-methyluridine-3'-phosphate
  modified_base 17: mod_base = OTHER; note = 2'-O-methylguanosine-3'-phosphate
  modified_base 18: mod_base = OTHER; note = 2'-O-methyluridine-3'-phosphate
  modified_base 19: mod_base = OTHER; note = 2'-O-methyluridine-3'-phosphate
  modified_base 20: mod_base = OTHER; note = 2'-O-methylcytidine-3'-phosphate
  modified_base 21: mod_base = OTHER; note = 2'-O-methyluridine-3'-phosphate ((2S,4R)-1-[29-[[2-(acetylamino)-2-deoxy-beta-D-galactopyra nosyl]oxy]-14,14-bis[[3-[[3-[[5-[[2-(acetylamino)-2-deoxy-b eta-D-galactopyranosyl]oxy]-1-oxopentyl]amino]propyl]amino] -3-oxopropoxy]methyl]-1,12,19,25-tetraoxo-16-oxa-13,20,24-t riazanonacos-1-yl]-4-hydroxy-2-pyrrolidinyl)methyl ester
gcggaaaggcactgatgttct

SEQ ID NO: 1921 - RNA, 23 nt, synthetic construct
  source 1..23: mol_type = other RNA
  modified_base 1: mod_base = OTHER; note = 2'-O-methyladenosine-3'-phosphorothioate
  modified_base 2: mod_base = OTHER; note = 2'-deoxy-2'-fluoroguanosine-3'-phosphorothioate
  modified_base 3: mod_base = OTHER; note = 2'-O-methyladenosine-3'-phosphate
  modified_base 4: mod_base = OTHER; note = 2'-O-methyladenosine-3'-phosphate
  modified_base 5: mod_base = OTHER; note = 2'-O-methylcytidine-3'-phosphate
  modified_base 6: mod_base = OTHER; note = 2'-deoxy-2'-fluoroadenosine-3'-phosphate
  modified_base 7: mod_base = OTHER; note = 2'-O-methyluridine-3'-phosphate
  modified_base 8: mod_base = OTHER; note = 2'-deoxy-2'-fluorocytidine-3'-phosphate
  modified_base 9: mod_base = OTHER; note = 2'-deoxy-2'-fluoroadenosine-3'-phosphate
  modified_base 10: mod_base = OTHER; note = 2'-O-methylguanosine-3'-phosphate
  modified_base 11: mod_base = OTHER; note = 2'-O-methyluridine-3'-phosphate
  modified_base 12: mod_base = OTHER; note = 2'-O-methylguanosine-3'-phosphate
  modified_base 13: mod_base = OTHER; note = 2'-O-methylcytidine-3'-phosphate
  modified_base 14: mod_base = OTHER; note = 2'-deoxy-2'-fluorocytidine-3'-phosphate
  modified_base 15: mod_base = OTHER; note = 2'-O-methyluridine-3'-phosphate
  modified_base 16: mod_base = OTHER; note = 2'-deoxy-2'-fluorouridine-3'-phosphate
  modified_base 17: mod_base = OTHER; note = 2'-O-methyluridine-3'-phosphate
  modified_base 18: mod_base = OTHER; note = 2'-O-methylcytidine-3'-phosphate
  modified_base 19: mod_base = OTHER; note = 2'-O-methylcytidine-3'-phosphate
  modified_base 20: mod_base = OTHER; note = 2'-O-methylguanosine-3'-phosphate
  modified_base 21: mod_base = OTHER; note = 2'-O-methylcytidine-3'-phosphorothioate
  modified_base 22: mod_base = OTHER; note = 2'-O-methyladenosine-3'-phosphorothioate
  modified_base 23: mod_base = OTHER; note = 2'-O-methylcytidine
agaacatcagtgcctttccgcac

SEQ ID NO: 1922 - RNA, 21 nt, synthetic construct
  source 1..21: mol_type = other RNA
  modified_base 1: mod_base = OTHER; note = 2'-O-methyladenosine-3'-phosphorothioate
  modified_base 2: mod_base = OTHER; note = 2'-O-methylguanosine-3'-phosphorothioate
  modified_base 3: mod_base = OTHER; note = 2'-O-methyladenosine-3'-phosphate
  modified_base 4: mod_base = OTHER; note = 2'-O-methyladenosine-3'-phosphate
  modified_base 5: mod_base = OTHER; note = 2'-O-methylguanosine-3'-phosphate
  modified_base 6: mod_base = OTHER; note = 2'-O-methyladenosine-3'-phosphate
  modified_base 7: mod_base = OTHER; note = 2'-deoxy-2'-fluorocytidine-3'-phosphate
  modified_base 8: mod_base = OTHER; note = 2'-O-methyluridine-3'-phosphate
  modified_base 9: mod_base = OTHER; note = 2'-deoxy-2'-fluoroguanosine-3'-phosphate
  modified_base 10: mod_base = OTHER; note = 2'-deoxy-2'-fluoroadenosine-3'-phosphate
  modified_base 11: mod_base = OTHER; note = 2'-deoxy-2'-fluorocytidine-3'-phosphate
  modified_base 12: mod_base = OTHER; note = 2'-O-methyladenosine-3'-phosphate
  modified_base 13: mod_base = OTHER; note = 2'-O-methyluridine-3'-phosphate
  modified_base 14: mod_base = OTHER; note = 2'-O-methylcytidine-3'-phosphate
  modified_base 15: mod_base = OTHER; note = 2'-O-methyladenosine-3'-phosphate
  modified_base 16: mod_base = OTHER; note = 2'-O-methyluridine-3'-phosphate
  modified_base 17: mod_base = OTHER; note = 2'-O-methyluridine-3'-phosphate
  modified_base 18: mod_base = OTHER; note = 2'-O-methylguanosine-3'-phosphate
  modified_base 19: mod_base = OTHER; note = 2'-O-methylcytidine-3'-phosphate
  modified_base 20: mod_base = OTHER; note = 2'-O-methylcytidine-3'-phosphate
  modified_base 21: mod_base = OTHER; note = 2'-O-methyladenosine-3'-phosphate ((2S,4R)-1-[29-[[2-(acetylamino)-2-deoxy-beta-D-galactopyra nosyl]oxy]-14,14-bis[[3-[[3-[[5-[[2-(acetylamino)-2-deoxy-b eta-D-galactopyranosyl]oxy]-1-oxopentyl]amino]propyl]amino] -3-oxopropoxy]methyl]-1,12,19,25-tetraoxo-16-oxa-13,20,24-t riazanonacos-1-yl]-4-hydroxy-2-pyrrolidinyl)methyl ester
agaagactgacatcattgcca

SEQ ID NO: 1923 - RNA, 23 nt, synthetic construct
  source 1..23: mol_type = other RNA
  modified_base 1: mod_base = OTHER; note = 2'-O-methyluridine-3'-phosphorothioate
  modified_base 2: mod_base = OTHER; note = 2'-deoxy-2'-fluoroguanosine-3'-phosphorothioate
  modified_base 3: mod_base = OTHER; note = 2'-O-methylguanosine-3'-phosphate
  modified_base 4: mod_base = OTHER; note = 2'-O-methylcytidine-3'-phosphate
  modified_base 5: mod_base = OTHER; note = 2'-O-methyladenosine-3'-phosphate
  modified_base 6: mod_base = OTHER; note = 2'-deoxy-2'-fluoroadenosine-3'-phosphate
  modified_base 7: mod_base = OTHER; note = 2'-O-methyluridine-3'-phosphate
  modified_base 8: mod_base = OTHER; note = 2'-deoxy-2'-fluoroguanosine-3'-phosphate
  modified_base 9: mod_base = OTHER; note = 2'-deoxy-2'-fluoroadenosine-3'-phosphate
  modified_base 10: mod_base = OTHER; note = 2'-O-methyluridine-3'-phosphate
  modified_base 11: mod_base = OTHER; note = 2'-O-methylguanosine-3'-phosphate
  modified_base 12: mod_base = OTHER; note = 2'-O-methyluridine-3'-phosphate
  modified_base 13: mod_base = OTHER; note = 2'-O-methylcytidine-3'-phosphate
  modified_base 14: mod_base = OTHER; note = 2'-deoxy-2'-fluoroadenosine-3'-phosphate
  modified_base 15: mod_base = OTHER; note = 2'-O-methylguanosine-3'-phosphate
  modified_base 16: mod_base = OTHER; note = 2'-deoxy-2'-fluorouridine-3'-phosphate
  modified_base 17: mod_base = OTHER; note = 2'-O-methylcytidine-3'-phosphate
  modified_base 18: mod_base = OTHER; note = 2'-O-methyluridine-3'-phosphate
  modified_base 19: mod_base = OTHER; note = 2'-O-methyluridine-3'-phosphate
  modified_base 20: mod_base = OTHER; note = 2'-O-methylcytidine-3'-phosphate
  modified_base 21: mod_base = OTHER; note = 2'-O-methyluridine-3'-phosphorothioate
  modified_base 22: mod_base = OTHER; note = 2'-O-methylcytidine-3'-phosphorothioate
  modified_base 23: mod_base = OTHER; note = 2'-O-methyladenosine
tggcaatgatgtcagtcttctca

SEQ ID NO: 1924 - RNA, 21 nt, synthetic construct
  source 1..21: mol_type = other RNA
  modified_base 1: mod_base = OTHER; note = 2'-O-methylguanosine-3'-phosphorothioate
  modified_base 2: mod_base = OTHER; note = 2'-O-methyladenosine-3'-phosphorothioate
  modified_base 3: mod_base = OTHER; note = 2'-O-methyladenosine-3'-phosphate
  modified_base 4: mod_base = OTHER; note = 2'-O-methylguanosine-3'-phosphate
  modified_base 5: mod_base = OTHER; note = 2'-O-methyladenosine-3'-phosphate
  modified_base 6: mod_base = OTHER; note = 2'-O-methylcytidine-3'-phosphate
  modified_base 7: mod_base = OTHER; note = 2'-deoxy-2'-fluorouridine-3'-phosphate
  modified_base 8: mod_base = OTHER; note = 2'-O-methylguanosine-3'-phosphate
  modified_base 9: mod_base = OTHER; note = 2'-deoxy-2'-fluoroadenosine-3'-phosphate
  modified_base 10: mod_base = OTHER; note = 2'-deoxy-2'-fluorocytidine-3'-phosphate
  modified_base 11: mod_base = OTHER; note = 2'-deoxy-2'-fluoroadenosine-3'-phosphate
  modified_base 12: mod_base = OTHER; note = 2'-O-methyluridine-3'-phosphate
  modified_base 13: mod_base = OTHER; note = 2'-O-methylcytidine-3'-phosphate
  modified_base 14: mod_base = OTHER; note = 2'-O-methyladenosine-3'-phosphate
  modified_base 15: mod_base = OTHER; note = 2'-O-methyluridine-3'-phosphate
  modified_base 16: mod_base = OTHER; note = 2'-O-methyluridine-3'-phosphate
  modified_base 17: mod_base = OTHER; note = 2'-O-methylguanosine-3'-phosphate
  modified_base 18: mod_base = OTHER; note = 2'-O-methylcytidine-3'-phosphate
  modified_base 19: mod_base = OTHER; note = 2'-O-methylcytidine-3'-phosphate
  modified_base 20: mod_base = OTHER; note = 2'-O-methyladenosine-3'-phosphate
  modified_base 21: mod_base = OTHER; note = 2'-O-methyladenosine-3'-phosphate ((2S,4R)-1-[29-[[2-(acetylamino)-2-deoxy-beta-D-galactopyra nosyl]oxy]-14,14-bis[[3-[[3-[[5-[[2-(acetylamino)-2-deoxy-b eta-D-galactopyranosyl]oxy]-1-oxopentyl]amino]propyl]amino] -3-oxopropoxy]methyl]-1,12,19,25-tetraoxo-16-oxa-13,20,24-t riazanonacos-1-yl]-4-hydroxy-2-pyrrolidinyl)methyl ester
gaagactgacatcattgccaa

SEQ ID NO: 1925 - RNA, 23 nt, synthetic construct
  source 1..23: mol_type = other RNA
  modified_base 1: mod_base = OTHER; note = 2'-O-methyluridine-3'-phosphorothioate
  modified_base 2: mod_base = OTHER; note = 2'-deoxy-2'-fluorouridine-3'-phosphorothioate
  modified_base 3: mod_base = OTHER; note = 2'-O-methylguanosine-3'-phosphate
  modified_base 4: mod_base = OTHER; note = 2'-O-methylguanosine-3'-phosphate
  modified_base 5: mod_base = OTHER; note = 2'-O-methylcytidine-3'-phosphate
  modified_base 6: mod_base = OTHER; note = 2'-deoxy-2'-fluoroadenosine-3'-phosphate
  modified_base 7: mod_base = OTHER; note = 2'-O-methyladenosine-3'-phosphate
  modified_base 8: mod_base = OTHER; note = 2'-deoxy-2'-fluorouridine-3'-phosphate
  modified_base 9: mod_base = OTHER; note = 2'-deoxy-2'-fluoroguanosine-3'-phosphate
  modified_base 10: mod_base = OTHER; note = 2'-O-methyladenosine-3'-phosphate
  modified_base 11: mod_base = OTHER; note = 2'-O-methyluridine-3'-phosphate
  modified_base 12: mod_base = OTHER; note = 2'-O-methylguanosine-3'-phosphate
  modified_base 13: mod_base = OTHER; note = 2'-O-methyluridine-3'-phosphate
  modified_base 14: mod_base = OTHER; note = 2'-deoxy-2'-fluorocytidine-3'-phosphate
  modified_base 15: mod_base = OTHER; note = 2'-O-methyladenosine-3'-phosphate
  modified_base 16: mod_base = OTHER; note = 2'-deoxy-2'-fluoroguanosine-3'-phosphate
  modified_base 17: mod_base = OTHER; note = 2'-O-methyluridine-3'-phosphate
  modified_base 18: mod_base = OTHER; note = 2'-O-methylcytidine-3'-phosphate
  modified_base 19: mod_base = OTHER; note = 2'-O-methyluridine-3'-phosphate
  modified_base 20: mod_base = OTHER; note = 2'-O-methyluridine-3'-phosphate
  modified_base 21: mod_base = OTHER; note = 2'-O-methylcytidine-3'-phosphorothioate
  modified_base 22: mod_base = OTHER; note = 2'-O-methyluridine-3'-phosphorothioate
  modified_base 23: mod_base = OTHER; note = 2'-O-methylcytidine
ttggcaatgatgtcagtcttctc

SEQ ID NO: 1926 - RNA, 21 nt, synthetic construct
  source 1..21: mol_type = other RNA
  modified_base 1: mod_base = OTHER; note = 2'-O-methylguanosine-3'-phosphorothioate
  modified_base 2: mod_base = OTHER; note = 2'-O-methylcytidine-3'-phosphorothioate
  modified_base 3: mod_base = OTHER; note = 2'-O-methyluridine-3'-phosphate
  modified_base 4: mod_base = OTHER; note = 2'-O-methylguanosine-3'-phosphate
  modified_base 5: mod_base = OTHER; note = 2'-O-methyladenosine-3'-phosphate
  modified_base 6: mod_base = OTHER; note = 2'-O-methylguanosine-3'-phosphate
  modified_base 7: mod_base = OTHER; note = 2'-deoxy-2'-fluoroadenosine-3'-phosphate
  modified_base 8: mod_base = OTHER; note = 2'-O-methyladenosine-3'-phosphate
  modified_base 9: mod_base = OTHER; note = 2'-deoxy-2'-fluoroguanosine-3'-phosphate
  modified_base 10: mod_base = OTHER; note = 2'-deoxy-2'-fluoroadenosine-3'-phosphate
  modified_base 11: mod_base = OTHER; note = 2'-deoxy-2'-fluorocytidine-3'-phosphate
  modified_base 12: mod_base = OTHER; note = 2'-O-methyluridine-3'-phosphate
  modified_base 13: mod_base = OTHER; note = 2'-O-methylguanosine-3'-phosphate
  modified_base 14: mod_base = OTHER; note = 2'-O-methyladenosine-3'-phosphate
  modified_base 15: mod_base = OTHER; note = 2'-O-methylcytidine-3'-phosphate
  modified_base 16: mod_base = OTHER; note = 2'-O-methyladenosine-3'-phosphate
  modified_base 17: mod_base = OTHER; note = 2'-O-methyluridine-3'-phosphate
  modified_base 18: mod_base = OTHER; note = 2'-O-methylcytidine-3'-phosphate
  modified_base 19: mod_base = OTHER; note = 2'-O-methyladenosine-3'-phosphate
  modified_base 20: mod_base = OTHER; note = 2'-O-methyluridine-3'-phosphate
  modified_base 21: mod_base = OTHER; note = 2'-O-methyluridine-3'-phosphate ((2S,4R)-1-[29-[[2-(acetylamino)-2-deoxy-beta-D-galactopyra nosyl]oxy]-14,14-bis[[3-[[3-[[5-[[2-(acetylamino)-2-deoxy-b eta-D-galactopyranosyl]oxy]-1-oxopentyl]amino]propyl]amino] -3-oxopropoxy]methyl]-1,12,19,25-tetraoxo-16-oxa-13,20,24-t riazanonacos-1-yl]-4-hydroxy-2-pyrrolidinyl)methyl ester
gctgagaagactgacatcatt

SEQ ID NO: 1927 - RNA, 23 nt, synthetic construct
  source 1..23: mol_type = other RNA
  modified_base 1: mod_base = OTHER; note = 2'-O-methyladenosine-3'-phosphorothioate
  modified_base 2: mod_base = OTHER; note = 2'-deoxy-2'-fluoroadenosine-3'-phosphorothioate
  modified_base 3: mod_base = OTHER; note = 2'-O-methyluridine-3'-phosphate
  modified_base 4: mod_base = OTHER; note = 2'-O-methylguanosine-3'-phosphate
  modified_base 5: mod_base = OTHER; note = 2'-O-methyladenosine-3'-phosphate
  modified_base 6: mod_base = OTHER; note = 2'-deoxy-2'-fluorouridine-3'-phosphate
  modified_base 7: mod_base = OTHER; note = 2'-O-methylguanosine-3'-phosphate
  modified_base 8: mod_base = OTHER; note = 2'-deoxy-2'-fluorouridine-3'-phosphate
  modified_base 9: mod_base = OTHER; note = 2'-deoxy-2'-fluorocytidine-3'-phosphate
  modified_base 10: mod_base = OTHER; note = 2'-O-methyladenosine-3'-phosphate
  modified_base 11: mod_base = OTHER; note = 2'-O-methylguanosine-3'-phosphate
  modified_base 12: mod_base = OTHER; note = 2'-O-methyluridine-3'-phosphate
  modified_base 13: mod_base = OTHER; note = 2'-O-methylcytidine-3'-phosphate
  modified_base 14: mod_base = OTHER; note = 2'-deoxy-2'-fluorouridine-3'-phosphate
  modified_base 15: mod_base = OTHER; note = 2'-O-methyluridine-3'-phosphate
  modified_base 16: mod_base = OTHER; note = 2'-deoxy-2'-fluorocytidine-3'-phosphate
  modified_base 17: mod_base = OTHER; note = 2'-O-methyluridine-3'-phosphate
  modified_base 18: mod_base = OTHER; note = 2'-O-methylcytidine-3'-phosphate
  modified_base 19: mod_base = OTHER; note = 2'-O-methyladenosine-3'-phosphate
  modified_base 20: mod_base = OTHER; note = 2'-O-methylguanosine-3'-phosphate
  modified_base 21: mod_base = OTHER; note = 2'-O-methylcytidine-3'-phosphorothioate
  modified_base 22: mod_base = OTHER; note = 2'-O-methylcytidine-3'-phosphorothioate
  modified_base 23: mod_base = OTHER; note = 2'-O-methyladenosine
aatgatgtcagtcttctcagcca

SEQ ID NO: 1928 - RNA, 21 nt, synthetic construct
  source 1..21: mol_type = other RNA
  modified_base 1: mod_base = OTHER; note = 2'-O-methylguanosine-3'-phosphorothioate
  modified_base 2: mod_base = OTHER; note = 2'-O-methylguanosine-3'-phosphorothioate
  modified_base 3: mod_base = OTHER; note = 2'-O-methylcytidine-3'-phosphate
  modified_base 4: mod_base = OTHER; note = 2'-O-methyluridine-3'-phosphate
  modified_base 5: mod_base = OTHER; note = 2'-O-methylguanosine-3'-phosphate
  modified_base 6: mod_base = OTHER; note = 2'-O-methyladenosine-3'-phosphate
  modified_base 7: mod_base = OTHER; note = 2'-deoxy-2'-fluoroguanosine-3'-phosphate
  modified_base 8: mod_base = OTHER; note = 2'-O-methyladenosine-3'-phosphate
  modified_base 9: mod_base = OTHER; note = 2'-deoxy-2'-fluoroadenosine-3'-phosphate
  modified_base 10: mod_base = OTHER; note = 2'-deoxy-2'-fluoroguanosine-3'-phosphate
  modified_base 11: mod_base = OTHER; note = 2'-deoxy-2'-fluoroadenosine-3'-phosphate
  modified_base 12: mod_base = OTHER; note = 2'-O-methylcytidine-3'-phosphate
  modified_base 13: mod_base = OTHER; note = 2'-O-methyluridine-3'-phosphate
  modified_base 14: mod_base = OTHER; note = 2'-O-methylguanosine-3'-phosphate
  modified_base 15: mod_base = OTHER; note = 2'-O-methyladenosine-3'-phosphate
  modified_base 16: mod_base = OTHER; note = 2'-O-methylcytidine-3'-phosphate
  modified_base 17: mod_base = OTHER; note = 2'-O-methyladenosine-3'-phosphate
  modified_base 18: mod_base = OTHER; note = 2'-O-methyluridine-3'-phosphate
  modified_base 19: mod_base = OTHER; note = 2'-O-methylcytidine-3'-phosphate
  modified_base 20: mod_base = OTHER; note = 2'-O-methyladenosine-3'-phosphate
  modified_base 21: mod_base = OTHER; note = 2'-O-methyluridine-3'-phosphate ((2S,4R)-1-[29-[[2-(acetylamino)-2-deoxy-beta-D-galactopyra nosyl]oxy]-14,14-bis[[3-[[3-[[5-[[2-(acetylamino)-2-deoxy-b eta-D-galactopyranosyl]oxy]-1-oxopentyl]amino]propyl]amino] -3-oxopropoxy]methyl]-1,12,19,25-tetraoxo-16-oxa-13,20,24-t riazanonacos-1-yl]-4-hydroxy-2-pyrrolidinyl)methyl ester
ggctgagaagactgacatcat

SEQ ID NO: 1929 - RNA, 23 nt, synthetic construct
  source 1..23: mol_type = other RNA
  modified_base 1: mod_base = OTHER; note = 2'-O-methyladenosine-3'-phosphorothioate
  modified_base 2: mod_base = OTHER; note = 2'-deoxy-2'-fluorouridine-3'-phosphorothioate
  modified_base 3: mod_base = OTHER; note = 2'-O-methylguanosine-3'-phosphate
  modified_base 4: mod_base = OTHER; note = 2'-O-methyladenosine-3'-phosphate
  modified_base 5: mod_base = OTHER; note = 2'-O-methyluridine-3'-phosphate
  modified_base 6: mod_base = OTHER; note = 2'-deoxy-2'-fluoroguanosine-3'-phosphate
  modified_base 7: mod_base = OTHER; note = 2'-O-methyluridine-3'-phosphate
  modified_base 8: mod_base = OTHER; note = 2'-deoxy-2'-fluorocytidine-3'-phosphate
  modified_base 9: mod_base = OTHER; note = 2'-deoxy-2'-fluoroadenosine-3'-phosphate
  modified_base 10: mod_base = OTHER; note = 2'-O-methylguanosine-3'-phosphate
  modified_base 11: mod_base = OTHER; note = 2'-O-methyluridine-3'-phosphate
  modified_base 12: mod_base = OTHER; note = 2'-O-methylcytidine-3'-phosphate
  modified_base 13: mod_base = OTHER; note = 2'-O-methyluridine-3'-phosphate
  modified_base 14: mod_base = OTHER; note = 2'-deoxy-2'-fluorouridine-3'-phosphate
  modified_base 15: mod_base = OTHER; note = 2'-O-methylcytidine-3'-phosphate
  modified_base 16: mod_base = OTHER; note = 2'-deoxy-2'-fluorouridine-3'-phosphate
  modified_base 17: mod_base = OTHER; note = 2'-O-methylcytidine-3'-phosphate
  modified_base 18: mod_base = OTHER; note = 2'-O-methyladenosine-3'-phosphate
  modified_base 19: mod_base = OTHER; note = 2'-O-methylguanosine-3'-phosphate
  modified_base 20: mod_base = OTHER; note = 2'-O-methylcytidine-3'-phosphate
  modified_base 21: mod_base = OTHER; note = 2'-O-methylcytidine-3'-phosphorothioate
  modified_base 22: mod_base = OTHER; note = 2'-O-methyladenosine-3'-phosphorothioate
  modified_base 23: mod_base = OTHER; note = 2'-O-methyluridine
atgatgtcagtcttctcagccat

SEQ ID NO: 1930 - RNA, 21 nt, synthetic construct
  source 1..21: mol_type = other RNA
  modified_base 1: mod_base = OTHER; note = 2'-O-methyluridine-3'-phosphorothioate
  modified_base 2: mod_base = OTHER; note = 2'-O-methyladenosine-3'-phosphorothioate
  modified_base 3: mod_base = OTHER; note = 2'-O-methyladenosine-3'-phosphate
  modified_base 4: mod_base = OTHER; note = 2'-O-methyluridine-3'-phosphate
  modified_base 5: mod_base = OTHER; note = 2'-O-methylguanosine-3'-phosphate
  modified_base 6: mod_base = OTHER; note = 2'-O-methylcytidine-3'-phosphate
  modified_base 7: mod_base = OTHER; note = 2'-deoxy-2'-fluorocytidine-3'-phosphate
  modified_base 8: mod_base = OTHER; note = 2'-O-methyluridine-3'-phosphate
  modified_base 9: mod_base = OTHER; note = 2'-deoxy-2'-fluoroguanosine-3'-phosphate
  modified_base 10: mod_base = OTHER; note = 2'-deoxy-2'-fluoroadenosine-3'-phosphate
  modified_base 11: mod_base = OTHER; note = 2'-deoxy-2'-fluorouridine-3'-phosphate
  modified_base 12: mod_base = OTHER; note = 2'-O-methyluridine-3'-phosphate
  modified_base 13: mod_base = OTHER; note = 2'-O-methylcytidine-3'-phosphate
  modified_base 14: mod_base = OTHER; note = 2'-O-methyladenosine-3'-phosphate
  modified_base 15: mod_base = OTHER; note = 2'-O-methylcytidine-3'-phosphate
  modified_base 16: mod_base = OTHER; note = 2'-O-methyladenosine-3'-phosphate
  modified_base 17: mod_base = OTHER; note = 2'-O-methyladenosine-3'-phosphate
  modified_base 18: mod_base = OTHER; note = 2'-O-methylcytidine-3'-phosphate
  modified_base 19: mod_base = OTHER; note = 2'-O-methyluridine-3'-phosphate
  modified_base 20: mod_base = OTHER; note = 2'-O-methyluridine-3'-phosphate
  modified_base 21: mod_base = OTHER; note = 2'-O-methyluridine-3'-phosphate ((2S,4R)-1-[29-[[2-(acetylamino)-2-deoxy-beta-D-galactopyra nosyl]oxy]-14,14-bis[[3-[[3-[[5-[[2-(acetylamino)-2-deoxy-b eta-D-galactopyranosyl]oxy]-1-oxopentyl]amino]propyl]amino] -3-oxopropoxy]methyl]-1,12,19,25-tetraoxo-16-oxa-13,20,24-t riazanonacos-1-yl]-4-hydroxy-2-pyrrolidinyl)methyl ester
taatgcctgattcacaacttt

SEQ ID NO: 1931 - RNA, 23 nt, synthetic construct
  source 1..23: mol_type = other RNA
  modified_base 1: mod_base = OTHER; note = 2'-O-methyladenosine-3'-phosphorothioate
  modified_base 2: mod_base = OTHER; note = 2'-deoxy-2'-fluoroadenosine-3'-phosphorothioate
  modified_base 3: mod_base = OTHER; note = 2'-O-methyladenosine-3'-phosphate
  modified_base 4: mod_base = OTHER; note = 2'-O-methylguanosine-3'-phosphate
  modified_base 5: mod_base = OTHER; note = 2'-O-methyluridine-3'-phosphate
  modified_base 6: mod_base = OTHER; note = 2'-deoxy-2'-fluorouridine-3'-phosphate
  modified_base 7: mod_base = OTHER; note = 2'-O-methylguanosine-3'-phosphate
  modified_base 8: mod_base = OTHER; note = 2'-deoxy-2'-fluorouridine-3'-phosphate
  modified_base 9: mod_base = OTHER; note = 2'-deoxy-2'-fluoroguanosine-3'-phosphate
  modified_base 10: mod_base = OTHER; note = 2'-O-methyladenosine-3'-phosphate
  modified_base 11: mod_base = OTHER; note = 2'-O-methyladenosine-3'-phosphate
  modified_base 12: mod_base = OTHER; note = 2'-O-methyluridine-3'-phosphate
  modified_base 13: mod_base = OTHER; note = 2'-O-methylcytidine-3'-phosphate
  modified_base 14: mod_base = OTHER; note = 2'-deoxy-2'-fluoroadenosine-3'-phosphate
  modified_base 15: mod_base = OTHER; note = 2'-O-methylguanosine-3'-phosphate
  modified_base 16: mod_base = OTHER; note = 2'-deoxy-2'-fluoroguanosine-3'-phosphate
  modified_base 17: mod_base = OTHER; note = 2'-O-methylcytidine-3'-phosphate
  modified_base 18: mod_base = OTHER; note = 2'-O-methyladenosine-3'-phosphate
  modified_base 19: mod_base = OTHER; note = 2'-O-methyluridine-3'-phosphate
  modified_base 20: mod_base = OTHER; note = 2'-O-methyluridine-3'-phosphate
  modified_base 21: mod_base = OTHER; note = 2'-O-methyladenosine-3'-phosphorothioate
  modified_base 22: mod_base = OTHER; note = 2'-O-methylcytidine-3'-phosphorothioate
  modified_base 23: mod_base = OTHER; note = 2'-O-methylcytidine
aaagttgtgaatcaggcattacc

SEQ ID NO: 1932 - RNA, 21 nt, synthetic construct
  source 1..21: mol_type = other RNA
  modified_base 1: mod_base = OTHER; note = 2'-O-methyladenosine-3'-phosphorothioate
  modified_base 2: mod_base = OTHER; note = 2'-O-methyladenosine-3'-phosphorothioate
  modified_base 3: mod_base = OTHER; note = 2'-O-methyluridine-3'-phosphate
  modified_base 4: mod_base = OTHER; note = 2'-O-methylguanosine-3'-phosphate
  modified_base 5: mod_base = OTHER; note = 2'-O-methylcytidine-3'-phosphate
  modified_base 6: mod_base = OTHER; note = 2'-O-methylcytidine-3'-phosphate
  modified_base 7: mod_base = OTHER; note = 2'-deoxy-2'-fluorouridine-3'-phosphate
  modified_base 8: mod_base = OTHER; note = 2'-O-methylguanosine-3'-phosphate
  modified_base 9: mod_base = OTHER; note = 2'-deoxy-2'-fluoroadenosine-3'-phosphate
  modified_base 10: mod_base = OTHER; note = 2'-deoxy-2'-fluorouridine-3'-phosphate
  modified_base 11: mod_base = OTHER; note = 2'-deoxy-2'-fluorouridine-3'-phosphate
  modified_base 12: mod_base = OTHER; note = 2'-O-methylcytidine-3'-phosphate
  modified_base 13: mod_base = OTHER; note = 2'-O-methyladenosine-3'-phosphate
  modified_base 14: mod_base = OTHER; note = 2'-O-methylcytidine-3'-phosphate
  modified_base 15: mod_base = OTHER; note = 2'-O-methyladenosine-3'-phosphate
  modified_base 16: mod_base = OTHER; note = 2'-O-methyladenosine-3'-phosphate
  modified_base 17: mod_base = OTHER; note = 2'-O-methylcytidine-3'-phosphate
  modified_base 18: mod_base = OTHER; note = 2'-O-methyluridine-3'-phosphate
  modified_base 19: mod_base = OTHER; note = 2'-O-methyluridine-3'-phosphate
  modified_base 20: mod_base = OTHER; note = 2'-O-methyluridine-3'-phosphate
  modified_base 21: mod_base = OTHER; note = 2'-O-methylguanosine-3'-phosphate ((2S,4R)-1-[29-[[2-(acetylamino)-2-deoxy-beta-D-galactopyra nosyl]oxy]-14,14-bis[[3-[[3-[[5-[[2-(acetylamino)-2-deoxy-b eta-D-galactopyranosyl]oxy]-1-oxopentyl]amino]propyl]amino] -3-oxopropoxy]methyl]-1,12,19,25-tetraoxo-16-oxa-13,20,24-t riazanonacos-1-yl]-4-hydroxy-2-pyrrolidinyl)methyl ester
aatgcctgattcacaactttg

SEQ ID NO: 1933 - RNA, 23 nt, synthetic construct
  source 1..23: mol_type = other RNA
  modified_base 1: mod_base = OTHER; note = 2'-O-methylcytidine-3'-phosphorothioate
  modified_base 2: mod_base = OTHER; note = 2'-deoxy-2'-fluoroadenosine-3'-phosphorothioate
  modified_base 3: mod_base = OTHER; note = 2'-O-methyladenosine-3'-phosphate
  modified_base 4: mod_base = OTHER; note = 2'-O-methyladenosine-3'-phosphate
  modified_base 5: mod_base = OTHER; note = 2'-O-methylguanosine-3'-phosphate
  modified_base 6: mod_base = OTHER; note = 2'-deoxy-2'-fluorouridine-3'-phosphate
  modified_base 7: mod_base = OTHER; note = 2'-O-methyluridine-3'-phosphate
  modified_base 8: mod_base = OTHER; note = 2'-deoxy-2'-fluoroguanosine-3'-phosphate
  modified_base 9: mod_base = OTHER; note = 2'-deoxy-2'-fluorouridine-3'-phosphate
  modified_base 10: mod_base = OTHER; note = 2'-O-methylguanosine-3'-phosphate
  modified_base 11: mod_base = OTHER; note = 2'-O-methyladenosine-3'-phosphate
  modified_base 12: mod_base = OTHER; note = 2'-O-methyladenosine-3'-phosphate
  modified_base 13: mod_base = OTHER; note = 2'-O-methyluridine-3'-phosphate
  modified_base 14: mod_base = OTHER; note = 2'-deoxy-2'-fluorocytidine-3'-phosphate
  modified_base 15: mod_base = OTHER; note = 2'-O-methyladenosine-3'-phosphate
  modified_base 16: mod_base = OTHER; note = 2'-deoxy-2'-fluoroguanosine-3'-phosphate
  modified_base 17: mod_base = OTHER; note = 2'-O-methylguanosine-3'-phosphate
  modified_base 18: mod_base = OTHER; note = 2'-O-methylcytidine-3'-phosphate
  modified_base 19: mod_base = OTHER; note = 2'-O-methyladenosine-3'-phosphate
  modified_base 20: mod_base = OTHER; note = 2'-O-methyluridine-3'-phosphate
  modified_base 21: mod_base = OTHER; note = 2'-O-methyluridine-3'-phosphorothioate
  modified_base 22: mod_base = OTHER; note = 2'-O-methyladenosine-3'-phosphorothioate
  modified_base 23: mod_base = OTHER; note = 2'-O-methylcytidine
caaagttgtgaatcaggcattac

SEQ ID NO: 1934 - RNA, 21 nt, synthetic construct
  source 1..21: mol_type = other RNA
  modified_base 1: mod_base = OTHER; note = 2'-O-methyluridine-3'-phosphorothioate
  modified_base 2: mod_base = OTHER; note = 2'-O-methyluridine-3'-phosphorothioate
  modified_base 3: mod_base = OTHER; note = 2'-O-methylguanosine-3'-phosphate
  modified_base 4: mod_base = OTHER; note = 2'-O-methylguanosine-3'-phosphate
  modified_base 5: mod_base = OTHER; note = 2'-O-methyluridine-3'-phosphate
  modified_base 6: mod_base = OTHER; note = 2'-O-methyladenosine-3'-phosphate
  modified_base 7: mod_base = OTHER; note = 2'-deoxy-2'-fluoroadenosine-3'-phosphate
  modified_base 8: mod_base = OTHER; note = 2'-O-methyluridine-3'-phosphate
  modified_base 9: mod_base = OTHER; note = 2'-deoxy-2'-fluoroguanosine-3'-phosphate
  modified_base 10: mod_base = OTHER; note = 2'-deoxy-2'-fluorocytidine-3'-phosphate
  modified_base 11: mod_base = OTHER; note = 2'-deoxy-2'-fluorocytidine-3'-phosphate
  modified_base 12: mod_base = OTHER; note = 2'-O-methyluridine-3'-phosphate
  modified_base 13: mod_base = OTHER; note = 2'-O-methylguanosine-3'-phosphate
  modified_base 14: mod_base = OTHER; note = 2'-O-methyladenosine-3'-phosphate
  modified_base 15: mod_base = OTHER; note = 2'-O-methyluridine-3'-phosphate
  modified_base 16: mod_base = OTHER; note = 2'-O-methyluridine-3'-phosphate
  modified_base 17: mod_base = OTHER; note = 2'-O-methylcytidine-3'-phosphate
  modified_base 18: mod_base = OTHER; note = 2'-O-methyladenosine-3'-phosphate
  modified_base 19: mod_base = OTHER; note = 2'-O-methylcytidine-3'-phosphate
  modified_base 20: mod_base = OTHER; note = 2'-O-methyladenosine-3'-phosphate
  modified_base 21: mod_base = OTHER; note = 2'-O-methyladenosine-3'-phosphate ((2S,4R)-1-[29-[[2-(acetylamino)-2-deoxy-beta-D-galactopyra nosyl]oxy]-14,14-bis[[3-[[3-[[5-[[2-(acetylamino)-2-deoxy-b eta-D-galactopyranosyl]oxy]-1-oxopentyl]amino]propyl]amino] -3-oxopropoxy]methyl]-1,12,19,25-tetraoxo-16-oxa-13,20,24-t riazanonacos-1-yl]-4-hydroxy-2-pyrrolidinyl)methyl ester
ttggtaatgcctgattcacaa

SEQ ID NO: 1935 - RNA, 23 nt, synthetic construct
  source 1..23: mol_type = other RNA
  modified_base 1: mod_base = OTHER; note = 2'-O-methyluridine-3'-phosphorothioate
  modified_base 2: mod_base = OTHER; note = 2'-deoxy-2'-fluorouridine-3'-phosphorothioate
  modified_base 3: mod_base = OTHER; note = 2'-O-methylguanosine-3'-phosphate
  modified_base 4: mod_base = OTHER; note = 2'-O-methyluridine-3'-phosphate
  modified_base 5: mod_base = OTHER; note = 2'-O-methylguanosine-3'-phosphate
  modified_base 6: mod_base = OTHER; note = 2'-deoxy-2'-fluoroadenosine-3'-phosphate
  modified_base 7: mod_base = OTHER; note = 2'-O-methyladenosine-3'-phosphate
  modified_base 8: mod_base = OTHER; note = 2'-deoxy-2'-fluorouridine-3'-phosphate
  modified_base 9: mod_base = OTHER; note = 2'-deoxy-2'-fluorocytidine-3'-phosphate
  modified_base 10: mod_base = OTHER; note = 2'-O-methyladenosine-3'-phosphate
  modified_base 11: mod_base = OTHER; note = 2'-O-methylguanosine-3'-phosphate
  modified_base 12: mod_base = OTHER; note = 2'-O-methylguanosine-3'-phosphate
  modified_base 13: mod_base = OTHER; note = 2'-O-methylcytidine-3'-phosphate
  modified_base 14: mod_base = OTHER; note = 2'-deoxy-2'-fluoroadenosine-3'-phosphate
  modified_base 15: mod_base = OTHER; note = 2'-O-methyluridine-3'-phosphate
  modified_base 16: mod_base = OTHER; note = 2'-deoxy-2'-fluorouridine-3'-phosphate
  modified_base 17: mod_base = OTHER; note = 2'-O-methyladenosine-3'-phosphate
  modified_base 18: mod_base = OTHER; note = 2'-O-methylcytidine-3'-phosphate
  modified_base 19: mod_base = OTHER; note = 2'-O-methylcytidine-3'-phosphate
  modified_base 20: mod_base = OTHER; note = 2'-O-methyladenosine-3'-phosphate
  modified_base 21: mod_base = OTHER; note = 2'-O-methyladenosine-3'-phosphorothioate
  modified_base 22: mod_base = OTHER; note = 2'-O-methylcytidine-3'-phosphorothioate
  modified_base 23: mod_base = OTHER; note = 2'-O-methyladenosine
ttgtgaatcaggcattaccaaca

SEQ ID NO: 1936 - RNA, 21 nt, synthetic construct
  source 1..21: mol_type = other RNA
  modified_base 1: mod_base = OTHER; note = 2'-O-methylguanosine-3'-phosphorothioate
  modified_base 2: mod_base = OTHER; note = 2'-O-methyluridine-3'-phosphorothioate
  modified_base 3: mod_base = OTHER; note = 2'-O-methyluridine-3'-phosphate
  modified_base 4: mod_base = OTHER; note = 2'-O-methylguanosine-3'-phosphate
  modified_base 5: mod_base = OTHER; note = 2'-O-methylguanosine-3'-phosphate
  modified_base 6: mod_base = OTHER; note = 2'-O-methyluridine-3'-phosphate
  modified_base 7: mod_base = OTHER; note = 2'-deoxy-2'-fluoroadenosine-3'-phosphate
  modified_base 8: mod_base = OTHER; note = 2'-O-methyladenosine-3'-phosphate
  modified_base 9: mod_base = OTHER; note = 2'-deoxy-2'-fluorouridine-3'-phosphate
  modified_base 10: mod_base = OTHER; note = 2'-deoxy-2'-fluoroguanosine-3'-phosphate
  modified_base 11: mod_base = OTHER; note = 2'-deoxy-2'-fluorocytidine-3'-phosphate
  modified_base 12: mod_base = OTHER; note = 2'-O-methylcytidine-3'-phosphate
  modified_base 13: mod_base = OTHER; note = 2'-O-methyluridine-3'-phosphate
  modified_base 14: mod_base = OTHER; note = 2'-O-methylguanosine-3'-phosphate
  modified_base 15: mod_base = OTHER; note = 2'-O-methyladenosine-3'-phosphate
  modified_base 16: mod_base = OTHER; note = 2'-O-methyluridine-3'-phosphate
  modified_base 17: mod_base = OTHER; note = 2'-O-methyluridine-3'-phosphate
  modified_base 18: mod_base = OTHER; note = 2'-O-methylcytidine-3'-phosphate
  modified_base 19: mod_base = OTHER; note = 2'-O-methyladenosine-3'-phosphate
  modified_base 20: mod_base = OTHER; note = 2'-O-methylcytidine-3'-phosphate
  modified_base 21: mod_base = OTHER; note = 2'-O-methyladenosine-3'-phosphate ((2S,4R)-1-[29-[[2-(acetylamino)-2-deoxy-beta-D-galactopyra nosyl]oxy]-14,14-bis[[3-[[3-[[5-[[2-(acetylamino)-2-deoxy-b eta-D-galactopyranosyl]oxy]-1-oxopentyl]amino]propyl]amino] -3-oxopropoxy]methyl]-1,12,19,25-tetraoxo-16-oxa-13,20,24-t riazanonacos-1-yl]-4-hydroxy-2-pyrrolidinyl)methyl ester
gttggtaatgcctgattcaca

SEQ ID NO: 1937 - RNA, 23 nt, synthetic construct
  source 1..23: mol_type = other RNA
  modified_base 1: mod_base = OTHER; note = 2'-O-methyluridine-3'-phosphorothioate
  modified_base 2: mod_base = OTHER; note = 2'-deoxy-2'-fluoroguanosine-3'-phosphorothioate
  modified_base 3: mod_base = OTHER; note = 2'-O-methyluridine-3'-phosphate
  modified_base 4: mod_base = OTHER; note = 2'-O-methylguanosine-3'-phosphate
  modified_base 5: mod_base = OTHER; note = 2'-O-methyladenosine-3'-phosphate
  modified_base 6: mod_base = OTHER; note = 2'-deoxy-2'-fluoroadenosine-3'-phosphate
  modified_base 7: mod_base = OTHER; note = 2'-O-methyluridine-3'-phosphate
  modified_base 8: mod_base = OTHER; note = 2'-deoxy-2'-fluorocytidine-3'-phosphate
  modified_base 9: mod_base = OTHER; note = 2'-deoxy-2'-fluoroadenosine-3'-phosphate
  modified_base 10: mod_base = OTHER; note = 2'-O-methylguanosine-3'-phosphate
  modified_base 11: mod_base = OTHER; note = 2'-O-methylguanosine-3'-phosphate
  modified_base 12: mod_base = OTHER; note = 2'-O-methylcytidine-3'-phosphate
  modified_base 13: mod_base = OTHER; note = 2'-O-methyladenosine-3'-phosphate
  modified_base 14: mod_base = OTHER; note = 2'-deoxy-2'-fluorouridine-3'-phosphate
  modified_base 15: mod_base = OTHER; note = 2'-O-methyluridine-3'-phosphate
  modified_base 16: mod_base = OTHER; note = 2'-deoxy-2'-fluoroadenosine-3'-phosphate
  modified_base 17: mod_base = OTHER; note = 2'-O-methylcytidine-3'-phosphate
  modified_base 18: mod_base = OTHER; note = 2'-O-methylcytidine-3'-phosphate
  modified_base 19: mod_base = OTHER; note = 2'-O-methyladenosine-3'-phosphate
  modified_base 20: mod_base = OTHER; note = 2'-O-methyladenosine-3'-phosphate
  modified_base 21: mod_base = OTHER; note = 2'-O-methylcytidine-3'-phosphorothioate
  modified_base 22: mod_base = OTHER; note = 2'-O-methyladenosine-3'-phosphorothioate
  modified_base 23: mod_base = OTHER; note = 2'-O-methylcytidine
tgtgaatcaggcattaccaacac

SEQ ID NO: 1938 - RNA, 21 nt, synthetic construct
  source 1..21: mol_type = other RNA
  modified_base 1: mod_base = OTHER; note = 2'-O-methyluridine-3'-phosphorothioate
  modified_base 2: mod_base = OTHER; note = 2'-O-methyladenosine-3'-phosphorothioate
  modified_base 3: mod_base = OTHER; note = 2'-O-methyluridine-3'-phosphate
  modified_base 4: mod_base = OTHER; note = 2'-O-methylcytidine-3'-phosphate
  modified_base 5: mod_base = OTHER; note = 2'-O-methyladenosine-3'-phosphate
  modified_base 6: mod_base = OTHER; note = 2'-O-methyladenosine-3'-phosphate
  modified_base 7: mod_base = OTHER; note = 2'-deoxy-2'-fluoroadenosine-3'-phosphate
  modified_base 8: mod_base = OTHER; note = 2'-O-methyluridine-3'-phosphate
  modified_base 9: mod_base = OTHER; note = 2'-deoxy-2'-fluoroguanosine-3'-phosphate
  modified_base 10: mod_base = OTHER; note = 2'-deoxy-2'-fluoroguanosine-3'-phosphate
  modified_base 11: mod_base = OTHER; note = 2'-deoxy-2'-fluorocytidine-3'-phosphate
  modified_base 12: mod_base = OTHER; note = 2'-O-methyluridine-3'-phosphate
  modified_base 13: mod_base = OTHER; note = 2'-O-methylguanosine-3'-phosphate
  modified_base 14: mod_base = OTHER; note = 2'-O-methyladenosine-3'-phosphate
  modified_base 15: mod_base = OTHER; note = 2'-O-methylguanosine-3'-phosphate
  modified_base 16: mod_base = OTHER; note = 2'-O-methyladenosine-3'-phosphate
  modified_base 17: mod_base = OTHER; note = 2'-O-methyladenosine-3'-phosphate
  modified_base 18: mod_base = OTHER; note = 2'-O-methylguanosine-3'-phosphate
  modified_base 19: mod_base = OTHER; note = 2'-O-methyladenosine-3'-phosphate
  modified_base 20: mod_base = OTHER; note = 2'-O-methylcytidine-3'-phosphate
  modified_base 21: mod_base = OTHER; note = 2'-O-methyluridine-3'-phosphate ((2S,4R)-1-[29-[[2-(acetylamino)-2-deoxy-beta-D-galactopyra nosyl]oxy]-14,14-bis[[3-[[3-[[5-[[2-(acetylamino)-2-deoxy-b eta-D-galactopyranosyl]oxy]-1-oxopentyl]amino]propyl]amino] -3-oxopropoxy]methyl]-1,12,19,25-tetraoxo-16-oxa-13,20,24-t riazanonacos-1-yl]-4-hydroxy-2-pyrrolidinyl)methyl ester
tatcaaatggctgagaagact

SEQ ID NO: 1939 - RNA, 23 nt, synthetic construct
  source 1..23: mol_type = other RNA
  modified_base 1: mod_base = OTHER; note = 2'-O-methyladenosine-3'-phosphorothioate
  modified_base 2: mod_base = OTHER; note = 2'-deoxy-2'-fluoroguanosine-3'-phosphorothioate
  modified_base 3: mod_base = OTHER; note = 2'-O-methyluridine-3'-phosphate
  modified_base 4: mod_base = OTHER; note = 2'-O-methylcytidine-3'-phosphate
  modified_base 5: mod_base = OTHER; note = 2'-O-methyluridine-3'-phosphate
  modified_base 6: mod_base = OTHER; note = 2'-deoxy-2'-fluorouridine-3'-phosphate
  modified_base 7: mod_base = OTHER; note = 2'-O-methylcytidine-3'-phosphate
  modified_base 8: mod_base = OTHER; note = 2'-deoxy-2'-fluorouridine-3'-phosphate
  modified_base 9: mod_base = OTHER; note = 2'-deoxy-2'-fluorocytidine-3'-phosphate
  modified_base 10: mod_base = OTHER; note = 2'-O-methyladenosine-3'-phosphate
  modified_base 11: mod_base = OTHER; note = 2'-O-methylguanosine-3'-phosphate
  modified_base 12: mod_base = OTHER; note = 2'-O-methylcytidine-3'-phosphate
  modified_base 13: mod_base = OTHER; note = 2'-O-methylcytidine-3'-phosphate
  modified_base 14: mod_base = OTHER; note = 2'-deoxy-2'-fluoroadenosine-3'-phosphate
  modified_base 15: mod_base = OTHER; note = 2'-O-methyluridine-3'-phosphate
  modified_base 16: mod_base = OTHER; note = 2'-deoxy-2'-fluorouridine-3'-phosphate
  modified_base 17: mod_base = OTHER; note = 2'-O-methyluridine-3'-phosphate
  modified_base 18: mod_base = OTHER; note = 2'-O-methylguanosine-3'-phosphate
  modified_base 19: mod_base = OTHER; note = 2'-O-methyladenosine-3'-phosphate
  modified_base 20: mod_base = OTHER; note = 2'-O-methyluridine-3'-phosphate
  modified_base 21: mod_base = OTHER; note = 2'-O-methyladenosine-3'-phosphorothioate
  modified_base 22: mod_base = OTHER; note = 2'-O-methyluridine-3'-phosphorothioate
  modified_base 23: mod_base = OTHER; note = 2'-O-methylcytidine
agtcttctcagccatttgatatc

SEQ ID NO: 1940 - RNA, 21 nt, synthetic construct
  source 1..21: mol_type = other RNA
  modified_base 1: mod_base = OTHER; note = 2'-O-methyladenosine-3'-phosphorothioate
  modified_base 2: mod_base = OTHER; note = 2'-O-methyluridine-3'-phosphorothioate
  modified_base 3: mod_base = OTHER; note = 2'-O-methylcytidine-3'-phosphate
  modified_base 4: mod_base = OTHER; note = 2'-O-methyladenosine-3'-phosphate
  modified_base 5: mod_base = OTHER; note = 2'-O-methyladenosine-3'-phosphate
  modified_base 6: mod_base = OTHER; note = 2'-O-methyladenosine-3'-phosphate
  modified_base 7: mod_base = OTHER; note = 2'-deoxy-2'-fluorouridine-3'-phosphate
  modified_base 8: mod_base = OTHER; note = 2'-O-methylguanosine-3'-phosphate
  modified_base 9: mod_base = OTHER; note = 2'-deoxy-2'-fluoroguanosine-3'-phosphate
  modified_base 10: mod_base = OTHER; note = 2'-deoxy-2'-fluorocytidine-3'-phosphate
  modified_base 11: mod_base = OTHER; note = 2'-deoxy-2'-fluorouridine-3'-phosphate
  modified_base 12: mod_base = OTHER; note = 2'-O-methylguanosine-3'-phosphate
  modified_base 13: mod_base = OTHER; note = 2'-O-methyladenosine-3'-phosphate
  modified_base 14: mod_base = OTHER; note = 2'-O-methylguanosine-3'-phosphate
  modified_base 15: mod_base = OTHER; note = 2'-O-methyladenosine-3'-phosphate
  modified_base 16: mod_base = OTHER; note = 2'-O-methyladenosine-3'-phosphate
  modified_base 17: mod_base = OTHER; note = 2'-O-methylguanosine-3'-phosphate
  modified_base 18: mod_base = OTHER; note = 2'-O-methyladenosine-3'-phosphate
  modified_base 19: mod_base = OTHER; note = 2'-O-methylcytidine-3'-phosphate
  modified_base 20: mod_base = OTHER; note = 2'-O-methyluridine-3'-phosphate
  modified_base 21: mod_base = OTHER; note = 2'-O-methylguanosine-3'-phosphate ((2S,4R)-1-[29-[[2-(acetylamino)-2-deoxy-beta-D-galactopyra nosyl]oxy]-14,14-bis[[3-[[3-[[5-[[2-(acetylamino)-2-deoxy-b eta-D-galactopyranosyl]oxy]-1-oxopentyl]amino]propyl]amino] -3-oxopropoxy]methyl]-1,12,19,25-tetraoxo-16-oxa-13,20,24-t riazanonacos-1-yl]-4-hydroxy-2-pyrrolidinyl)methyl ester
atcaaatggctgagaagactg

SEQ ID NO: 1941 - RNA, 23 nt, synthetic construct
  source 1..23: mol_type = other RNA
  modified_base 1: mod_base = OTHER; note = 2'-O-methylcytidine-3'-phosphorothioate
  modified_base 2: mod_base = OTHER; note = 2'-deoxy-2'-fluoroadenosine-3'-phosphorothioate
  modified_base 3: mod_base = OTHER; note = 2'-O-methylguanosine-3'-phosphate
  modified_base 4: mod_base = OTHER; note = 2'-O-methyluridine-3'-phosphate
  modified_base 5: mod_base = OTHER; note = 2'-O-methylcytidine-3'-phosphate
  modified_base 6: mod_base = OTHER; note = 2'-deoxy-2'-fluorouridine-3'-phosphate
  modified_base 7: mod_base = OTHER; note = 2'-O-methyluridine-3'-phosphate
  modified_base 8: mod_base = OTHER; note = 2'-deoxy-2'-fluorocytidine-3'-phosphate
  modified_base 9: mod_base = OTHER; note = 2'-deoxy-2'-fluorouridine-3'-phosphate
  modified_base 10: mod_base = OTHER; note = 2'-O-methylcytidine-3'-phosphate
  modified_base 11: mod_base = OTHER; note = 2'-O-methyladenosine-3'-phosphate
  modified_base 12: mod_base = OTHER; note = 2'-O-methylguanosine-3'-phosphate
  modified_base 13: mod_base = OTHER; note = 2'-O-methylcytidine-3'-phosphate
  modified_base 14: mod_base = OTHER; note = 2'-deoxy-2'-fluorocytidine-3'-phosphate
  modified_base 15: mod_base = OTHER; note = 2'-O-methyladenosine-3'-phosphate
  modified_base 16: mod_base = OTHER; note = 2'-deoxy-2'-fluorouridine-3'-phosphate
  modified_base 17: mod_base = OTHER; note = 2'-O-methyluridine-3'-phosphate
  modified_base 18: mod_base = OTHER; note = 2'-O-methyluridine-3'-phosphate
  modified_base 19: mod_base = OTHER; note = 2'-O-methylguanosine-3'-phosphate
  modified_base 20: mod_base = OTHER; note = 2'-O-methyladenosine-3'-phosphate
  modified_base 21: mod_base = OTHER; note = 2'-O-methyluridine-3'-phosphorothioate
  modified_base 22: mod_base = OTHER; note = 2'-O-methyladenosine-3'-phosphorothioate
  modified_base 23: mod_base = OTHER; note = 2'-O-methyluridine
cagtcttctcagccatttgatat

SEQ ID NO: 1942 - RNA, 21 nt, synthetic construct
  source 1..21: mol_type = other RNA
  modified_base 1: mod_base = OTHER; note = 2'-O-methyladenosine-3'-phosphorothioate
  modified_base 2: mod_base = OTHER; note = 2'-O-methyladenosine-3'-phosphorothioate
  modified_base 3: mod_base = OTHER; note = 2'-O-methylguanosine-3'-phosphate
  modified_base 4: mod_base = OTHER; note = 2'-O-methyladenosine-3'-phosphate
  modified_base 5: mod_base = OTHER; note = 2'-O-methyluridine-3'-phosphate
  modified_base 6: mod_base = OTHER; note = 2'-O-methyladenosine-3'-phosphate
  modified_base 7: mod_base = OTHER; note = 2'-deoxy-2'-fluorouridine-3'-phosphate
  modified_base 8: mod_base = OTHER; note = 2'-O-methylcytidine-3'-phosphate
  modified_base 9: mod_base = OTHER; note = 2'-deoxy-2'-fluoroadenosine-3'-phosphate
  modified_base 10: mod_base = OTHER; note = 2'-deoxy-2'-fluoroadenosine-3'-phosphate
  modified_base 11: mod_base = OTHER; note = 2'-deoxy-2'-fluoroadenosine-3'-phosphate
  modified_base 12: mod_base = OTHER; note = 2'-O-methyluridine-3'-phosphate
  modified_base 13: mod_base = OTHER; note = 2'-O-methylguanosine-3'-phosphate
  modified_base 14: mod_base = OTHER; note = 2'-O-methylguanosine-3'-phosphate
  modified_base 15: mod_base = OTHER; note = 2'-O-methylcytidine-3'-phosphate
  modified_base 16: mod_base = OTHER; note = 2'-O-methyluridine-3'-phosphate
  modified_base 17: mod_base = OTHER; note = 2'-O-methylguanosine-3'-phosphate
  modified_base 18: mod_base = OTHER; note = 2'-O-methyladenosine-3'-phosphate
  modified_base 19: mod_base = OTHER; note = 2'-O-methylguanosine-3'-phosphate
  modified_base 20: mod_base = OTHER; note = 2'-O-methyladenosine-3'-phosphate
  modified_base 21: mod_base = OTHER; note = 2'-O-methyladenosine-3'-phosphate ((2S,4R)-1-[29-[[2-(acetylamino)-2-deoxy-beta-D-galactopyra nosyl]oxy]-14,14-bis[[3-[[3-[[5-[[2-(acetylamino)-2-deoxy-b eta-D-galactopyranosyl]oxy]-1-oxopentyl]amino]propyl]amino] -3-oxopropoxy]methyl]-1,12,19,25-tetraoxo-16-oxa-13,20,24-t riazanonacos-1-yl]-4-hydroxy-2-pyrrolidinyl)methyl ester
aagatatcaaatggctgagaa

SEQ ID NO: 1943 - RNA, 23 nt, synthetic construct
  source 1..23: mol_type = other RNA
  modified_base 1: mod_base = OTHER; note = 2'-O-methyluridine-3'-phosphorothioate
  modified_base 2: mod_base = OTHER; note = 2'-deoxy-2'-fluorouridine-3'-phosphorothioate
  modified_base 3: mod_base = OTHER; note = 2'-O-methylcytidine-3'-phosphate
  modified_base 4: mod_base = OTHER; note = 2'-O-methyluridine-3'-phosphate
  modified_base 5: mod_base = OTHER; note = 2'-O-methylcytidine-3'-phosphate
  modified_base 6: mod_base = OTHER; note = 2'-deoxy-2'-fluoroadenosine-3'-phosphate
  modified_base 7: mod_base = OTHER; note = 2'-O-methylguanosine-3'-phosphate
  modified_base 8: mod_base = OTHER; note = 2'-deoxy-2'-fluorocytidine-3'-phosphate
  modified_base 9: mod_base = OTHER; note = 2'-deoxy-2'-fluorocytidine-3'-phosphate
  modified_base 10: mod_base = OTHER; note = 2'-O-methyladenosine-3'-phosphate
  modified_base 11: mod_base = OTHER; note = 2'-O-methyluridine-3'-phosphate
  modified_base 12: mod_base = OTHER; note = 2'-O-methyluridine-3'-phosphate
  modified_base 13: mod_base = OTHER; note = 2'-O-methyluridine-3'-phosphate
  modified_base 14: mod_base = OTHER; note = 2'-deoxy-2'-fluoroguanosine-3'-phosphate
  modified_base 15: mod_base = OTHER; note = 2'-O-methyladenosine-3'-phosphate
  modified_base 16: mod_base = OTHER; note = 2'-deoxy-2'-fluorouridine-3'-phosphate
  modified_base 17: mod_base = OTHER; note = 2'-O-methyladenosine-3'-phosphate
  modified_base 18: mod_base = OTHER; note = 2'-O-methyluridine-3'-phosphate
  modified_base 19: mod_base = OTHER; note = 2'-O-methylcytidine-3'-phosphate
  modified_base 20: mod_base = OTHER; note = 2'-O-methyluridine-3'-phosphate
  modified_base 21: mod_base = OTHER; note = 2'-O-methyluridine-3'-phosphorothioate
  modified_base 22: mod_base = OTHER; note = 2'-O-methylcytidine-3'-phosphorothioate
  modified_base 23: mod_base = OTHER; note = 2'-O-methylcytidine
ttctcagccatttgatatcttcc

SEQ ID NO: 1944 - RNA, 21 nt, synthetic construct
  source 1..21: mol_type = other RNA
  modified_base 1: mod_base = OTHER; note = 2'-O-methylguanosine-3'-phosphorothioate
  modified_base 2: mod_base = OTHER; note = 2'-O-methyladenosine-3'-phosphorothioate
  modified_base 3: mod_base = OTHER; note = 2'-O-methyladenosine-3'-phosphate
  modified_base 4: mod_base = OTHER; note = 2'-O-methylguanosine-3'-phosphate
  modified_base 5: mod_base = OTHER; note = 2'-O-methyladenosine-3'-phosphate
  modified_base 6: mod_base = OTHER; note = 2'-O-methyluridine-3'-phosphate
  modified_base 7: mod_base = OTHER; note = 2'-deoxy-2'-fluoroadenosine-3'-phosphate
  modified_base 8: mod_base = OTHER; note = 2'-O-methyluridine-3'-phosphate
  modified_base 9: mod_base = OTHER; note = 2'-deoxy-2'-fluorocytidine-3'-phosphate
  modified_base 10: mod_base = OTHER; note = 2'-deoxy-2'-fluoroadenosine-3'-phosphate
  modified_base 11: mod_base = OTHER; note = 2'-deoxy-2'-fluoroadenosine-3'-phosphate
  modified_base 12: mod_base = OTHER; note = 2'-O-methyladenosine-3'-phosphate
  modified_base 13: mod_base = OTHER; note = 2'-O-methyluridine-3'-phosphate
  modified_base 14: mod_base = OTHER; note = 2'-O-methylguanosine-3'-phosphate
  modified_base 15: mod_base = OTHER; note = 2'-O-methylguanosine-3'-phosphate
  modified_base 16: mod_base = OTHER; note = 2'-O-methylcytidine-3'-phosphate
  modified_base 17: mod_base = OTHER; note = 2'-O-methyluridine-3'-phosphate
  modified_base 18: mod_base = OTHER; note = 2'-O-methylguanosine-3'-phosphate
  modified_base 19: mod_base = OTHER; note = 2'-O-methyladenosine-3'-phosphate
  modified_base 20: mod_base = OTHER; note = 2'-O-methylguanosine-3'-phosphate
  modified_base 21: mod_base = OTHER; note = 2'-O-methyladenosine-3'-phosphate ((2S,4R)-1-[29-[[2-(acetylamino)-2-deoxy-beta-D-galactopyra nosyl]oxy]-14,14-bis[[3-[[3-[[5-[[2-(acetylamino)-2-deoxy-b eta-D-galactopyranosyl]oxy]-1-oxopentyl]amino]propyl]amino] -3-oxopropoxy]methyl]-1,12,19,25-tetraoxo-16-oxa-13,20,24-t riazanonacos-1-yl]-4-hydroxy-2-pyrrolidinyl)methyl ester
gaagatatcaaatggctgaga

SEQ ID NO: 1945 - RNA, 23 nt, synthetic construct
  source 1..23: mol_type = other RNA
  modified_base 1: mod_base = OTHER; note = 2'-O-methyluridine-3'-phosphorothioate
  modified_base 2: mod_base = OTHER; note = 2'-deoxy-2'-fluorocytidine-3'-phosphorothioate
  modified_base 3: mod_base = OTHER; note = 2'-O-methyluridine-3'-phosphate
  modified_base 4: mod_base = OTHER; note = 2'-O-methylcytidine-3'-phosphate
  modified_base 5: mod_base = OTHER; note = 2'-O-methyladenosine-3'-phosphate
  modified_base 6: mod_base = OTHER; note = 2'-deoxy-2'-fluoroguanosine-3'-phosphate
  modified_base 7: mod_base = OTHER; note = 2'-O-methylcytidine-3'-phosphate
  modified_base 8: mod_base = OTHER; note = 2'-deoxy-2'-fluorocytidine-3'-phosphate
  modified_base 9: mod_base = OTHER; note = 2'-deoxy-2'-fluoroadenosine-3'-phosphate
  modified_base 10: mod_base = OTHER; note = 2'-O-methyluridine-3'-phosphate
  modified_base 11: mod_base = OTHER; note = 2'-O-methyluridine-3'-phosphate
  modified_base 12: mod_base = OTHER; note = 2'-O-methyluridine-3'-phosphate
  modified_base 13: mod_base = OTHER; note = 2'-O-methylguanosine-3'-phosphate
  modified_base 14: mod_base = OTHER; note = 2'-deoxy-2'-fluoroadenosine-3'-phosphate
  modified_base 15: mod_base = OTHER; note = 2'-O-methyluridine-3'-phosphate
  modified_base 16: mod_base = OTHER; note = 2'-deoxy-2'-fluoroadenosine-3'-phosphate
  modified_base 17: mod_base = OTHER; note = 2'-O-methyluridine-3'-phosphate
  modified_base 18: mod_base = OTHER; note = 2'-O-methylcytidine-3'-phosphate
  modified_base 19: mod_base = OTHER; note = 2'-O-methyluridine-3'-phosphate
  modified_base 20: mod_base = OTHER; note = 2'-O-methyluridine-3'-phosphate
  modified_base 21: mod_base = OTHER; note = 2'-O-methylcytidine-3'-phosphorothioate
  modified_base 22: mod_base = OTHER; note = 2'-O-methylcytidine-3'-phosphorothioate
  modified_base 23: mod_base = OTHER; note = 2'-O-methylcytidine
tctcagccatttgatatcttccc

SEQ ID NO: 1946 - RNA, 21 nt, synthetic construct
  source 1..21: mol_type = other RNA
  modified_base 1: mod_base = OTHER; note = 2'-O-methyluridine-3'-phosphorothioate
  modified_base 2: mod_base = OTHER; note = 2'-O-methylcytidine-3'-phosphorothioate
  modified_base 3: mod_base = OTHER; note = 2'-O-methyluridine-3'-phosphate
  modified_base 4: mod_base = OTHER; note = 2'-O-methylguanosine-3'-phosphate
  modified_base 5: mod_base = OTHER; note = 2'-O-methyladenosine-3'-phosphate
  modified_base 6: mod_base = OTHER; note = 2'-O-methylcytidine-3'-phosphate
  modified_base 7: mod_base = OTHER; note = 2'-deoxy-2'-fluoroadenosine-3'-phosphate
  modified_base 8: mod_base = OTHER; note = 2'-O-methylguanosine-3'-phosphate
  modified_base 9: mod_base = OTHER; note = 2'-deoxy-2'-fluorouridine-3'-phosphate
  modified_base 10: mod_base = OTHER; note = 2'-deoxy-2'-fluoroguanosine-3'-phosphate
  modified_base 11: mod_base = OTHER; note = 2'-deoxy-2'-fluorocytidine-3'-phosphate
  modified_base 12: mod_base = OTHER; note = 2'-O-methyladenosine-3'-phosphate
  modified_base 13: mod_base = OTHER; note = 2'-O-methylcytidine-3'-phosphate
  modified_base 14: mod_base = OTHER; note = 2'-O-methyladenosine-3'-phosphate
  modified_base 15: mod_base = OTHER; note = 2'-O-methyladenosine-3'-phosphate
  modified_base 16: mod_base = OTHER; note = 2'-O-methyluridine-3'-phosphate
  modified_base 17: mod_base = OTHER; note = 2'-O-methyladenosine-3'-phosphate
  modified_base 18: mod_base = OTHER; note = 2'-O-methyluridine-3'-phosphate
  modified_base 19: mod_base = OTHER; note = 2'-O-methyluridine-3'-phosphate
  modified_base 20: mod_base = OTHER; note = 2'-O-methyluridine-3'-phosphate
  modified_base 21: mod_base = OTHER; note = 2'-O-methyluridine-3'-phosphate ((2S,4R)-1-[29-[[2-(acetylamino)-2-deoxy-beta-D-galactopyra nosyl]oxy]-14,14-bis[[3-[[3-[[5-[[2-(acetylamino)-2-deoxy-b eta-D-galactopyranosyl]oxy]-1-oxopentyl]amino]propyl]amino] -3-oxopropoxy]methyl]-1,12,19,25-tetraoxo-16-oxa-13,20,24-t riazanonacos-1-yl]-4-hydroxy-2-pyrrolidinyl)methyl ester
tctgacagtgcacaatatttt

SEQ ID NO: 1947 - RNA, 23 nt, synthetic construct
  source 1..23: mol_type = other RNA
  modified_base 1: mod_base = OTHER; note = 2'-O-methyladenosine-3'-phosphorothioate
  modified_base 2: mod_base = OTHER; note = 2'-deoxy-2'-fluoroadenosine-3'-phosphorothioate
  modified_base 3: mod_base = OTHER; note = 2'-O-methyladenosine-3'-phosphate
  modified_base 4: mod_base = OTHER; note = 2'-O-methyladenosine-3'-phosphate
  modified_base 5: mod_base = OTHER; note = 2'-O-methyluridine-3'-phosphate
  modified_base 6: mod_base = OTHER; note = 2'-deoxy-2'-fluoroadenosine-3'-phosphate
  modified_base 7: mod_base = OTHER; note = 2'-O-methyluridine-3'-phosphate
  modified_base 8: mod_base = OTHER; note = 2'-deoxy-2'-fluorouridine-3'-phosphate
  modified_base 9: mod_base = OTHER; note = 2'-deoxy-2'-fluoroguanosine-3'-phosphate
  modified_base 10: mod_base = OTHER; note = 2'-O-methyluridine-3'-phosphate
  modified_base 11: mod_base = OTHER; note = 2'-O-methylguanosine-3'-phosphate
  modified_base 12: mod_base = OTHER; note = 2'-O-methylcytidine-3'-phosphate
  modified_base 13: mod_base = OTHER; note = 2'-O-methyladenosine-3'-phosphate
  modified_base 14: mod_base = OTHER; note = 2'-deoxy-2'-fluorocytidine-3'-phosphate
  modified_base 15: mod_base = OTHER; note = 2'-O-methyluridine-3'-phosphate
  modified_base 16: mod_base = OTHER; note = 2'-deoxy-2'-fluoroguanosine-3'-phosphate
  modified_base 17: mod_base = OTHER; note = 2'-O-methyluridine-3'-phosphate
  modified_base 18: mod_base = OTHER; note = 2'-O-methylcytidine-3'-phosphate
  modified_base 19: mod_base = OTHER; note = 2'-O-methyladenosine-3'-phosphate
  modified_base 20: mod_base = OTHER; note = 2'-O-methylguanosine-3'-phosphate
  modified_base 21: mod_base = OTHER; note = 2'-O-methyladenosine-3'-phosphorothioate
  modified_base 22: mod_base = OTHER; note = 2'-O-methyluridine-3'-phosphorothioate
  modified_base 23: mod_base = OTHER; note = 2'-O-methylcytidine
aaaatattgtgcactgtcagatc

SEQ ID NO: 1948 - RNA, 21 nt, synthetic construct
  source 1..21: mol_type = other RNA
  modified_base 1: mod_base = OTHER; note = 2'-O-methylcytidine-3'-phosphorothioate
  modified_base 2: mod_base = OTHER; note = 2'-O-methyluridine-3'-phosphorothioate
  modified_base 3: mod_base = OTHER; note = 2'-O-methylguanosine-3'-phosphate
  modified_base 4: mod_base = OTHER; note = 2'-O-methyladenosine-3'-phosphate
  modified_base 5: mod_base = OTHER; note = 2'-O-methylcytidine-3'-phosphate
  modified_base 6: mod_base = OTHER; note = 2'-O-methyladenosine-3'-phosphate
  modified_base 7: mod_base = OTHER; note = 2'-deoxy-2'-fluoroguanosine-3'-phosphate
  modified_base 8: mod_base = OTHER; note = 2'-O-methyluridine-3'-phosphate
  modified_base 9: mod_base = OTHER; note = 2'-deoxy-2'-fluoroguanosine-3'-phosphate
  modified_base 10: mod_base = OTHER; note = 2'-deoxy-2'-fluorocytidine-3'-phosphate
  modified_base 11: mod_base = OTHER; note = 2'-deoxy-2'-fluoroadenosine-3'-phosphate
  modified_base 12: mod_base = OTHER; note = 2'-O-methylcytidine-3'-phosphate
  modified_base 13: mod_base = OTHER; note = 2'-O-methyladenosine-3'-phosphate
  modified_base 14: mod_base = OTHER; note = 2'-O-methyladenosine-3'-phosphate
  modified_base 15: mod_base = OTHER; note = 2'-O-methyluridine-3'-phosphate
  modified_base 16: mod_base = OTHER; note = 2'-O-methyladenosine-3'-phosphate
  modified_base 17: mod_base = OTHER; note = 2'-O-methyluridine-3'-phosphate
  modified_base 18: mod_base = OTHER; note = 2'-O-methyluridine-3'-phosphate
  modified_base 19: mod_base = OTHER; note = 2'-O-methyluridine-3'-phosphate
  modified_base 20: mod_base = OTHER; note = 2'-O-methyluridine-3'-phosphate
  modified_base 21: mod_base = OTHER; note = 2'-O-methylcytidine-3'-phosphate ((2S,4R)-1-[29-[[2-(acetylamino)-2-deoxy-beta-D-galactopyra nosyl]oxy]-14,14-bis[[3-[[3-[[5-[[2-(acetylamino)-2-deoxy-b eta-D-galactopyranosyl]oxy]-1-oxopentyl]amino]propyl]amino] -3-oxopropoxy]methyl]-1,12,19,25-tetraoxo-16-oxa-13,20,24-t riazanonacos-1-yl]-4-hydroxy-2-pyrrolidinyl)methyl ester
ctgacagtgcacaatattttc

SEQ ID NO: 1949 - RNA, 23 nt, synthetic construct
  source 1..23: mol_type = other RNA
  modified_base 1: mod_base = OTHER; note = 2'-O-methylguanosine-3'-phosphorothioate
  modified_base 2: mod_base = OTHER; note = 2'-deoxy-2'-fluoroadenosine-3'-phosphorothioate
  modified_base 3: mod_base = OTHER; note = 2'-O-methyladenosine-3'-phosphate
  modified_base 4: mod_base = OTHER; note = 2'-O-methyladenosine-3'-phosphate
  modified_base 5: mod_base = OTHER; note = 2'-O-methyladenosine-3'-phosphate
  modified_base 6: mod_base = OTHER; note = 2'-deoxy-2'-fluorouridine-3'-phosphate
  modified_base 7: mod_base = OTHER; note = 2'-O-methyladenosine-3'-phosphate
  modified_base 8: mod_base = OTHER; note = 2'-deoxy-2'-fluorouridine-3'-phosphate
  modified_base 9: mod_base = OTHER; note = 2'-deoxy-2'-fluorouridine-3'-phosphate
  modified_base 10: mod_base = OTHER; note = 2'-O-methylguanosine-3'-phosphate
  modified_base 11: mod_base = OTHER; note = 2'-O-methyluridine-3'-phosphate
  modified_base 12: mod_base = OTHER; note = 2'-O-methylguanosine-3'-phosphate
  modified_base 13: mod_base = OTHER; note = 2'-O-methylcytidine-3'-phosphate
  modified_base 14: mod_base = OTHER; note = 2'-deoxy-2'-fluoroadenosine-3'-phosphate
  modified_base 15: mod_base = OTHER; note = 2'-O-methylcytidine-3'-phosphate
  modified_base 16: mod_base = OTHER; note = 2'-deoxy-2'-fluorouridine-3'-phosphate
  modified_base 17: mod_base = OTHER; note = 2'-O-methylguanosine-3'-phosphate
  modified_base 18: mod_base = OTHER; note = 2'-O-methyluridine-3'-phosphate
  modified_base 19: mod_base = OTHER; note = 2'-O-methylcytidine-3'-phosphate
  modified_base 20: mod_base = OTHER; note = 2'-O-methyladenosine-3'-phosphate
  modified_base 21: mod_base = OTHER; note = 2'-O-methylguanosine-3'-phosphorothioate
  modified_base 22: mod_base = OTHER; note = 2'-O-methyladenosine-3'-phosphorothioate
  modified_base 23: mod_base = OTHER; note = 2'-O-methyluridine
gaaaatattgtgcactgtcagat

SEQ ID NO: 1950 - RNA, 21 nt, synthetic construct
  source 1..21: mol_type = other RNA
  modified_base 1: mod_base = OTHER; note = 2'-O-methyladenosine-3'-phosphorothioate
  modified_base 2: mod_base = OTHER; note = 2'-O-methyladenosine-3'-phosphorothioate
  modified_base 3: mod_base = OTHER; note = 2'-O-methylguanosine-3'-phosphate
  modified_base 4: mod_base = OTHER; note = 2'-O-methyladenosine-3'-phosphate
  modified_base 5: mod_base = OTHER; note = 2'-O-methyluridine-3'-phosphate
  modified_base 6: mod_base = OTHER; note = 2'-O-methylcytidine-3'-phosphate
  modified_base 7: mod_base = OTHER; note = 2'-deoxy-2'-fluorouridine-3'-phosphate
  modified_base 8: mod_base = OTHER; note = 2'-O-methylguanosine-3'-phosphate
  modified_base 9: mod_base = OTHER; note = 2'-deoxy-2'-fluoroadenosine-3'-phosphate
  modified_base 10: mod_base = OTHER; note = 2'-deoxy-2'-fluorocytidine-3'-phosphate
  modified_base 11: mod_base = OTHER; note = 2'-deoxy-2'-fluoroadenosine-3'-phosphate
  modified_base 12: mod_base = OTHER; note = 2'-O-methylguanosine-3'-phosphate
  modified_base 13: mod_base = OTHER; note = 2'-O-methyluridine-3'-phosphate
  modified_base 14: mod_base = OTHER; note = 2'-O-methylguanosine-3'-phosphate
  modified_base 15: mod_base = OTHER; note = 2'-O-methylcytidine-3'-phosphate
  modified_base 16: mod_base = OTHER; note = 2'-O-methyladenosine-3'-phosphate
  modified_base 17: mod_base = OTHER; note = 2'-O-methylcytidine-3'-phosphate
  modified_base 18: mod_base = OTHER; note = 2'-O-methyladenosine-3'-phosphate
  modified_base 19: mod_base = OTHER; note = 2'-O-methyladenosine-3'-phosphate
  modified_base 20: mod_base = OTHER; note = 2'-O-methyluridine-3'-phosphate
  modified_base 21: mod_base = OTHER; note = 2'-O-methyladenosine-3'-phosphate ((2S,4R)-1-[29-[[2-(acetylamino)-2-deoxy-beta-D-galactopyra nosyl]oxy]-14,14-bis[[3-[[3-[[5-[[2-(acetylamino)-2-deoxy-b eta-D-galactopyranosyl]oxy]-1-oxopentyl]amino]propyl]amino] -3-oxopropoxy]methyl]-1,12,19,25-tetraoxo-16-oxa-13,20,24-t riazanonacos-1-yl]-4-hydroxy-2-pyrrolidinyl)methyl ester
aagatctgacagtgcacaata

SEQ ID NO: 1951 - RNA, 23 nt, synthetic construct
  source 1..23: mol_type = other RNA
  modified_base 1: mod_base = OTHER; note = 2'-O-methyluridine-3'-phosphorothioate
  modified_base 2: mod_base = OTHER; note = 2'-deoxy-2'-fluoroadenosine-3'-phosphorothioate
  modified_base 3: mod_base = OTHER; note = 2'-O-methyluridine-3'-phosphate
  modified_base 4: mod_base = OTHER; note = 2'-O-methyluridine-3'-phosphate
  modified_base 5: mod_base = OTHER; note = 2'-O-methylguanosine-3'-phosphate
  modified_base 6: mod_base = OTHER; note = 2'-deoxy-2'-fluorouridine-3'-phosphate
  modified_base 7: mod_base = OTHER; note = 2'-O-methylguanosine-3'-phosphate
  modified_base 8: mod_base = OTHER; note = 2'-deoxy-2'-fluorocytidine-3'-phosphate
  modified_base 9: mod_base = OTHER; note = 2'-deoxy-2'-fluoroadenosine-3'-phosphate
  modified_base 10: mod_base = OTHER; note = 2'-O-methylcytidine-3'-phosphate
  modified_base 11: mod_base = OTHER; note = 2'-O-methyluridine-3'-phosphate
  modified_base 12: mod_base = OTHER; note = 2'-O-methylguanosine-3'-phosphate
  modified_base 13: mod_base = OTHER; note = 2'-O-methyluridine-3'-phosphate
  modified_base 14: mod_base = OTHER; note = 2'-deoxy-2'-fluorocytidine-3'-phosphate
  modified_base 15: mod_base = OTHER; note = 2'-O-methyladenosine-3'-phosphate
  modified_base 16: mod_base = OTHER; note = 2'-deoxy-2'-fluoroguanosine-3'-phosphate
  modified_base 17: mod_base = OTHER; note = 2'-O-methyladenosine-3'-phosphate
  modified_base 18: mod_base = OTHER; note = 2'-O-methyluridine-3'-phosphate
  modified_base 19: mod_base = OTHER; note = 2'-O-methylcytidine-3'-phosphate
  modified_base 20: mod_base = OTHER; note = 2'-O-methyluridine-3'-phosphate
  modified_base 21: mod_base = OTHER; note = 2'-O-methyluridine-3'-phosphorothioate
  modified_base 22: mod_base = OTHER; note = 2'-O-methylguanosine-3'-phosphorothioate
  modified_base 23: mod_base = OTHER; note = 2'-O-methylguanosine
tattgtgcactgtcagatcttgg

SEQ ID NO: 1952 - RNA, 21 nt, synthetic construct
  source 1..21: mol_type = other RNA
  modified_base 1: mod_base = OTHER; note = 2'-O-methylcytidine-3'-phosphorothioate
  modified_base 2: mod_base = OTHER; note = 2'-O-methyladenosine-3'-phosphorothioate
  modified_base 3: mod_base = OTHER; note = 2'-O-methyladenosine-3'-phosphate
  modified_base 4: mod_base = OTHER; note = 2'-O-methylguanosine-3'-phosphate
  modified_base 5: mod_base = OTHER; note = 2'-O-methyladenosine-3'-phosphate
  modified_base 6: mod_base = OTHER; note = 2'-O-methyluridine-3'-phosphate
  modified_base 7: mod_base = OTHER; note = 2'-deoxy-2'-fluorocytidine-3'-phosphate
  modified_base 8: mod_base = OTHER; note = 2'-O-methyluridine-3'-phosphate
  modified_base 9: mod_base = OTHER; note = 2'-deoxy-2'-fluoroguanosine-3'-phosphate
  modified_base 10: mod_base = OTHER; note = 2'-deoxy-2'-fluoroadenosine-3'-phosphate
  modified_base 11: mod_base = OTHER; note = 2'-deoxy-2'-fluorocytidine-3'-phosphate
  modified_base 12: mod_base = OTHER; note = 2'-O-methyladenosine-3'-phosphate
  modified_base 13: mod_base = OTHER; note = 2'-O-methylguanosine-3'-phosphate
  modified_base 14: mod_base = OTHER; note = 2'-O-methyluridine-3'-phosphate
  modified_base 15: mod_base = OTHER; note = 2'-O-methylguanosine-3'-phosphate
  modified_base 16: mod_base = OTHER; note = 2'-O-methylcytidine-3'-phosphate
  modified_base 17: mod_base = OTHER; note = 2'-O-methyladenosine-3'-phosphate
  modified_base 18: mod_base = OTHER; note = 2'-O-methylcytidine-3'-phosphate
  modified_base 19: mod_base = OTHER; note = 2'-O-methyladenosine-3'-phosphate
  modified_base 20: mod_base = OTHER; note = 2'-O-methyladenosine-3'-phosphate
  modified_base 21: mod_base = OTHER; note = 2'-O-methyluridine-3'-phosphate ((2S,4R)-1-[29-[[2-(acetylamino)-2-deoxy-beta-D-galactopyra nosyl]oxy]-14,14-bis[[3-[[3-[[5-[[2-(acetylamino)-2-deoxy-b eta-D-galactopyranosyl]oxy]-1-oxopentyl]amino]propyl]amino] -3-oxopropoxy]methyl]-1,12,19,25-tetraoxo-16-oxa-13,20,24-t riazanonacos-1-yl]-4-hydroxy-2-pyrrolidinyl)methyl ester
caagatctgacagtgcacaat

SEQ ID NO: 1953 - RNA, 23 nt, synthetic construct
  source 1..23: mol_type = other RNA
  modified_base 1: mod_base = OTHER; note = 2'-O-methyladenosine-3'-phosphorothioate
  modified_base 2: mod_base = OTHER; note = 2'-deoxy-2'-fluorouridine-3'-phosphorothioate
  modified_base 3: mod_base = OTHER; note = 2'-O-methyluridine-3'-phosphate
  modified_base 4: mod_base = OTHER; note = 2'-O-methylguanosine-3'-phosphate
  modified_base 5: mod_base = OTHER; note = 2'-O-methyluridine-3'-phosphate
  modified_base 6: mod_base = OTHER; note = 2'-deoxy-2'-fluoroguanosine-3'-phosphate
  modified_base 7: mod_base = OTHER; note = 2'-O-methylcytidine-3'-phosphate
  modified_base 8: mod_base = OTHER; note = 2'-deoxy-2'-fluoroadenosine-3'-phosphate
  modified_base 9: mod_base = OTHER; note = 2'-deoxy-2'-fluorocytidine-3'-phosphate
  modified_base 10: mod_base = OTHER; note = 2'-O-methyluridine-3'-phosphate
  modified_base 11: mod_base = OTHER; note = 2'-O-methylguanosine-3'-phosphate
  modified_base 12: mod_base = OTHER; note = 2'-O-methyluridine-3'-phosphate
  modified_base 13: mod_base = OTHER; note = 2'-O-methylcytidine-3'-phosphate
  modified_base 14: mod_base = OTHER; note = 2'-deoxy-2'-fluoroadenosine-3'-phosphate
  modified_base 15: mod_base = OTHER; note = 2'-O-methylguanosine-3'-phosphate
  modified_base 16: mod_base = OTHER; note = 2'-deoxy-2'-fluoroadenosine-3'-phosphate
  modified_base 17: mod_base = OTHER; note = 2'-O-methyluridine-3'-phosphate
  modified_base 18: mod_base = OTHER; note = 2'-O-methylcytidine-3'-phosphate
  modified_base 19: mod_base = OTHER; note = 2'-O-methyluridine-3'-phosphate
  modified_base 20: mod_base = OTHER; note = 2'-O-methyluridine-3'-phosphate
  modified_base 21: mod_base = OTHER; note = 2'-O-methylguanosine-3'-phosphorothioate
  modified_base 22: mod_base = OTHER; note = 2'-O-methylguanosine-3'-phosphorothioate
  modified_base 23: mod_base = OTHER; note = 2'-O-methyladenosine
attgtgcactgtcagatcttgga

SEQ ID NO: 1954 - RNA, 21 nt, synthetic construct
  source 1..21: mol_type = other RNA
  modified_base 1: mod_base = OTHER; note = 2'-O-methyladenosine-3'-phosphorothioate
  modified_base 2: mod_base = OTHER; note = 2'-O-methylcytidine-3'-phosphorothioate
  modified_base 3: mod_base = OTHER; note = 2'-O-methyluridine-3'-phosphate
  modified_base 4: mod_base = OTHER; note = 2'-O-methylguanosine-3'-phosphate
  modified_base 5: mod_base = OTHER; note = 2'-O-methyladenosine-3'-phosphate
  modified_base 6: mod_base = OTHER; note = 2'-O-methyluridine-3'-phosphate
  modified_base 7: mod_base = OTHER; note = 2'-deoxy-2'-fluoroguanosine-3'-phosphate
  modified_base 8: mod_base = OTHER; note = 2'-O-methyluridine-3'-phosphate
  modified_base 9: mod_base = OTHER; note = 2'-deoxy-2'-fluorouridine-3'-phosphate
  modified_base 10: mod_base = OTHER; note = 2'-deoxy-2'-fluorocytidine-3'-phosphate
  modified_base 11: mod_base = OTHER; note = 2'-deoxy-2'-fluorouridine-3'-phosphate
  modified_base 12: mod_base = OTHER; note = 2'-O-methylguanosine-3'-phosphate
  modified_base 13: mod_base = OTHER; note = 2'-O-methyladenosine-3'-phosphate
  modified_base 14: mod_base = OTHER; note = 2'-O-methyladenosine-3'-phosphate
  modified_base 15: mod_base = OTHER; note = 2'-O-methyladenosine-3'-phosphate
  modified_base 16: mod_base = OTHER; note = 2'-O-methylguanosine-3'-phosphate
  modified_base 17: mod_base = OTHER; note = 2'-O-methylcytidine-3'-phosphate
  modified_base 18: mod_base = OTHER; note = 2'-O-methyluridine-3'-phosphate
  modified_base 19: mod_base = OTHER; note = 2'-O-methylcytidine-3'-phosphate
  modified_base 20: mod_base = OTHER; note = 2'-O-methyluridine-3'-phosphate
  modified_base 21: mod_base = OTHER; note = 2'-O-methylguanosine-3'-phosphate ((2S,4R)-1-[29-[[2-(acetylamino)-2-deoxy-beta-D-galactopyra nosyl]oxy]-14,14-bis[[3-[[3-[[5-[[2-(acetylamino)-2-deoxy-b eta-D-galactopyranosyl]oxy]-1-oxopentyl]amino]propyl]amino] -3-oxopropoxy]methyl]-1,12,19,25-tetraoxo-16-oxa-13,20,24-t riazanonacos-1-yl]-4-hydroxy-2-pyrrolidinyl)methyl ester
actgatgttctgaaagctctg

SEQ ID NO: 1955 - RNA, 23 nt, synthetic construct
  source 1..23: mol_type = other RNA
  modified_base 1: mod_base = OTHER; note = 2'-O-methylcytidine-3'-phosphorothioate
  modified_base 2: mod_base = OTHER; note = 2'-deoxy-2'-fluoroadenosine-3'-phosphorothioate
  modified_base 3: mod_base = OTHER; note = 2'-O-methylguanosine-3'-phosphate
  modified_base 4: mod_base = OTHER; note = 2'-O-methyladenosine-3'-phosphate
  modified_base 5: mod_base = OTHER; note = 2'-O-methylguanosine-3'-phosphate
  modified_base 6: mod_base = OTHER; note = 2'-deoxy-2'-fluorocytidine-3'-phosphate
  modified_base 7: mod_base = OTHER; note = 2'-O-methyluridine-3'-phosphate
  modified_base 8: mod_base = OTHER; note = 2'-deoxy-2'-fluorouridine-3'-phosphate
  modified_base 9: mod_base = OTHER; note = 2'-deoxy-2'-fluorouridine-3'-phosphate
  modified_base 10: mod_base = OTHER; note = 2'-O-methylcytidine-3'-phosphate
  modified_base 11: mod_base = OTHER; note = 2'-O-methyladenosine-3'-phosphate
  modified_base 12: mod_base = OTHER; note = 2'-O-methylguanosine-3'-phosphate
  modified_base 13: mod_base = OTHER; note = 2'-O-methyladenosine-3'-phosphate
  modified_base 14: mod_base = OTHER; note = 2'-deoxy-2'-fluoroadenosine-3'-phosphate
  modified_base 15: mod_base = OTHER; note = 2'-O-methylcytidine-3'-phosphate
  modified_base 16: mod_base = OTHER; note = 2'-deoxy-2'-fluoroadenosine-3'-phosphate
  modified_base 17: mod_base = OTHER; note = 2'-O-methyluridine-3'-phosphate
  modified_base 18: mod_base = OTHER; note = 2'-O-methylcytidine-3'-phosphate
  modified_base 19: mod_base = OTHER; note = 2'-O-methyladenosine-3'-phosphate
  modified_base 20: mod_base = OTHER; note = 2'-O-methylguanosine-3'-phosphate
  modified_base 21: mod_base = OTHER; note = 2'-O-methyluridine-3'-phosphorothioate
  modified_base 22: mod_base = OTHER; note = 2'-O-methylguanosine-3'-phosphorothioate
  modified_base 23: mod_base = OTHER; note = 2'-O-methylcytidine
cagagctttcagaacatcagtgc

SEQ ID NO: 1956 - RNA, 21 nt, synthetic construct
  source 1..21: mol_type = other RNA
  modified_base 1: mod_base = OTHER; note = 2'-O-methylcytidine-3'-phosphorothioate
  modified_base 2: mod_base = OTHER; note = 2'-O-methyluridine-3'-phosphorothioate
  modified_base 3: mod_base = OTHER; note = 2'-O-methylguanosine-3'-phosphate
  modified_base 4: mod_base = OTHER; note = 2'-O-methyladenosine-3'-phosphate
  modified_base 5: mod_base = OTHER; note = 2'-O-methyluridine-3'-phosphate
  modified_base 6: mod_base = OTHER; note = 2'-O-methylguanosine-3'-phosphate
  modified_base 7: mod_base = OTHER; note = 2'-deoxy-2'-fluorouridine-3'-phosphate
  modified_base 8: mod_base = OTHER; note = 2'-O-methyluridine-3'-phosphate
  modified_base 9: mod_base = OTHER; note = 2'-deoxy-2'-fluorocytidine-3'-phosphate
  modified_base 10: mod_base = OTHER; note = 2'-deoxy-2'-fluorouridine-3'-phosphate
  modified_base 11: mod_base = OTHER; note = 2'-deoxy-2'-fluoroguanosine-3'-phosphate
  modified_base 12: mod_base = OTHER; note = 2'-O-methyladenosine-3'-phosphate
  modified_base 13: mod_base = OTHER; note = 2'-O-methyladenosine-3'-phosphate
  modified_base 14: mod_base = OTHER; note = 2'-O-methyladenosine-3'-phosphate
  modified_base 15: mod_base = OTHER; note = 2'-O-methylguanosine-3'-phosphate
  modified_base 16: mod_base = OTHER; note = 2'-O-methylcytidine-3'-phosphate
  modified_base 17: mod_base = OTHER; note = 2'-O-methyluridine-3'-phosphate
  modified_base 18: mod_base = OTHER; note = 2'-O-methylcytidine-3'-phosphate
  modified_base 19: mod_base = OTHER; note = 2'-O-methyluridine-3'-phosphate
  modified_base 20: mod_base = OTHER; note = 2'-O-methylguanosine-3'-phosphate
  modified_base 21: mod_base = OTHER; note = 2'-O-methylguanosine-3'-phosphate ((2S,4R)-1-[29-[[2-(acetylamino)-2-deoxy-beta-D-galactopyra nosyl]oxy]-14,14-bis[[3-[[3-[[5-[[2-(acetylamino)-2-deoxy-b eta-D-galactopyranosyl]oxy]-1-oxopentyl]amino]propyl]amino] -3-oxopropoxy]methyl]-1,12,19,25-tetraoxo-16-oxa-13,20,24-t riazanonacos-1-yl]-4-hydroxy-2-pyrrolidinyl)methyl ester
ctgatgttctgaaagctctgg

SEQ ID NO: 1957 - RNA, 23 nt, synthetic construct
  source 1..23: mol_type = other RNA
  modified_base 1: mod_base = OTHER; note = 2'-O-methylcytidine-3'-phosphorothioate
  modified_base 2: mod_base = OTHER; note = 2'-deoxy-2'-fluorocytidine-3'-phosphorothioate
  modified_base 3: mod_base = OTHER; note = 2'-O-methyladenosine-3'-phosphate
  modified_base 4: mod_base = OTHER; note = 2'-O-methylguanosine-3'-phosphate
  modified_base 5: mod_base = OTHER; note = 2'-O-methyladenosine-3'-phosphate
  modified_base 6: mod_base = OTHER; note = 2'-deoxy-2'-fluoroguanosine-3'-phosphate
  modified_base 7: mod_base = OTHER; note = 2'-O-methylcytidine-3'-phosphate
  modified_base 8: mod_base = OTHER; note = 2'-deoxy-2'-fluorouridine-3'-phosphate
  modified_base 9: mod_base = OTHER; note = 2'-deoxy-2'-fluorouridine-3'-phosphate
  modified_base 10: mod_base = OTHER; note = 2'-O-methyluridine-3'-phosphate
  modified_base 11: mod_base = OTHER; note = 2'-O-methylcytidine-3'-phosphate
  modified_base 12: mod_base = OTHER; note = 2'-O-methyladenosine-3'-phosphate
  modified_base 13: mod_base = OTHER; note = 2'-O-methylguanosine-3'-phosphate
  modified_base 14: mod_base = OTHER; note = 2'-deoxy-2'-fluoroadenosine-3'-phosphate
  modified_base 15: mod_base = OTHER; note = 2'-O-methyladenosine-3'-phosphate
  modified_base 16: mod_base = OTHER; note = 2'-deoxy-2'-fluorocytidine-3'-phosphate
  modified_base 17: mod_base = OTHER; note = 2'-O-methyladenosine-3'-phosphate
  modified_base 18: mod_base = OTHER; note = 2'-O-methyluridine-3'-phosphate
  modified_base 19: mod_base = OTHER; note = 2'-O-methylcytidine-3'-phosphate
  modified_base 20: mod_base = OTHER; note = 2'-O-methyladenosine-3'-phosphate
  modified_base 21: mod_base = OTHER; note = 2'-O-methylguanosine-3'-phosphorothioate
  modified_base 22: mod_base = OTHER; note = 2'-O-methyluridine-3'-phosphorothioate
  modified_base 23: mod_base = OTHER; note = 2'-O-methylguanosine
ccagagctttcagaacatcagtg

SEQ ID NO: 1958 - RNA, 21 nt, synthetic construct
  source 1..21: mol_type = other RNA
  modified_base 1: mod_base = OTHER; note = 2'-O-methyladenosine-3'-phosphorothioate
  modified_base 2: mod_base = OTHER; note = 2'-O-methylguanosine-3'-phosphorothioate
  modified_base 3: mod_base = OTHER; note = 2'-O-methylguanosine-3'-phosphate
  modified_base 4: mod_base = OTHER; note = 2'-O-methylcytidine-3'-phosphate
  modified_base 5: mod_base = OTHER; note = 2'-O-methyladenosine-3'-phosphate
  modified_base 6: mod_base = OTHER; note = 2'-O-methylcytidine-3'-phosphate
  modified_base 7: mod_base = OTHER; note = 2'-deoxy-2'-fluorouridine-3'-phosphate
  modified_base 8: mod_base = OTHER; note = 2'-O-methylguanosine-3'-phosphate
  modified_base 9: mod_base = OTHER; note = 2'-deoxy-2'-fluoroadenosine-3'-phosphate
  modified_base 10: mod_base = OTHER; note = 2'-deoxy-2'-fluorouridine-3'-phosphate
  modified_base 11: mod_base = OTHER; note = 2'-deoxy-2'-fluoroguanosine-3'-phosphate
  modified_base 12: mod_base = OTHER; note = 2'-O-methyluridine-3'-phosphate
  modified_base 13: mod_base = OTHER; note = 2'-O-methyluridine-3'-phosphate
  modified_base 14: mod_base = OTHER; note = 2'-O-methylcytidine-3'-phosphate
  modified_base 15: mod_base = OTHER; note = 2'-O-methyluridine-3'-phosphate
  modified_base 16: mod_base = OTHER; note = 2'-O-methylguanosine-3'-phosphate
  modified_base 17: mod_base = OTHER; note = 2'-O-methyladenosine-3'-phosphate
  modified_base 18: mod_base = OTHER; note = 2'-O-methyladenosine-3'-phosphate
  modified_base 19: mod_base = OTHER; note = 2'-O-methyladenosine-3'-phosphate
  modified_base 20: mod_base = OTHER; note = 2'-O-methylguanosine-3'-phosphate
  modified_base 21: mod_base = OTHER; note = 2'-O-methylcytidine-3'-phosphate ((2S,4R)-1-[29-[[2-(acetylamino)-2-deoxy-beta-D-galactopyra nosyl]oxy]-14,14-bis[[3-[[3-[[5-[[2-(acetylamino)-2-deoxy-b eta-D-galactopyranosyl]oxy]-1-oxopentyl]amino]propyl]amino] -3-oxopropoxy]methyl]-1,12,19,25-tetraoxo-16-oxa-13,20,24-t riazanonacos-1-yl]-4-hydroxy-2-pyrrolidinyl)methyl ester
aggcactgatgttctgaaagc

SEQ ID NO: 1959 - RNA, 23 nt, synthetic construct
  source 1..23: mol_type = other RNA
  modified_base 1: mod_base = OTHER; note = 2'-O-methylguanosine-3'-phosphorothioate
  modified_base 2: mod_base = OTHER; note = 2'-deoxy-2'-fluorocytidine-3'-phosphorothioate
  modified_base 3: mod_base = OTHER; note = 2'-O-methyluridine-3'-phosphate
  modified_base 4: mod_base = OTHER; note = 2'-O-methyluridine-3'-phosphate
  modified_base 5: mod_base = OTHER; note = 2'-O-methyluridine-3'-phosphate
  modified_base 6: mod_base = OTHER; note = 2'-deoxy-2'-fluorocytidine-3'-phosphate
  modified_base 7: mod_base = OTHER; note = 2'-O-methyladenosine-3'-phosphate
  modified_base 8: mod_base = OTHER; note = 2'-deoxy-2'-fluoroguanosine-3'-phosphate
  modified_base 9: mod_base = OTHER; note = 2'-deoxy-2'-fluoroadenosine-3'-phosphate
  modified_base 10: mod_base = OTHER; note = 2'-O-methyladenosine-3'-phosphate
  modified_base 11: mod_base = OTHER; note = 2'-O-methylcytidine-3'-phosphate
  modified_base 12: mod_base = OTHER; note = 2'-O-methyladenosine-3'-phosphate
  modified_base 13: mod_base = OTHER; note = 2'-O-methyluridine-3'-phosphate
  modified_base 14: mod_base = OTHER; note = 2'-deoxy-2'-fluorocytidine-3'-phosphate
  modified_base 15: mod_base = OTHER; note = 2'-O-methyladenosine-3'-phosphate
  modified_base 16: mod_base = OTHER; note = 2'-deoxy-2'-fluoroguanosine-3'-phosphate
  modified_base 17: mod_base = OTHER; note = 2'-O-methyluridine-3'-phosphate
  modified_base 18: mod_base = OTHER; note = 2'-O-methylguanosine-3'-phosphate
  modified_base 19: mod_base = OTHER; note = 2'-O-methylcytidine-3'-phosphate
  modified_base 20: mod_base = OTHER; note = 2'-O-methylcytidine-3'-phosphate
  modified_base 21: mod_base = OTHER; note = 2'-O-methyluridine-3'-phosphorothioate
  modified_base 22: mod_base = OTHER; note = 2'-O-methyluridine-3'-phosphorothioate
  modified_base 23: mod_base = OTHER; note = 2'-O-methyluridine
gctttcagaacatcagtgccttt

SEQ ID NO: 1960 - RNA, 21 nt, synthetic construct
  source 1..21: mol_type = other RNA
  modified_base 1: mod_base = OTHER; note = 2'-O-methyladenosine-3'-phosphorothioate
  modified_base 2: mod_base = OTHER; note = 2'-O-methyladenosine-3'-phosphorothioate
  modified_base 3: mod_base = OTHER; note = 2'-O-methylguanosine-3'-phosphate
  modified_base 4: mod_base = OTHER; note = 2'-O-methylguanosine-3'-phosphate
  modified_base 5: mod_base = OTHER; note = 2'-O-methylcytidine-3'-phosphate
  modified_base 6: mod_base = OTHER; note = 2'-O-methyladenosine-3'-phosphate
  modified_base 7: mod_base = OTHER; note = 2'-deoxy-2'-fluorocytidine-3'-phosphate
  modified_base 8: mod_base = OTHER; note = 2'-O-methyluridine-3'-phosphate
  modified_base 9: mod_base = OTHER; note = 2'-deoxy-2'-fluoroguanosine-3'-phosphate
  modified_base 10: mod_base = OTHER; note = 2'-deoxy-2'-fluoroadenosine-3'-phosphate
  modified_base 11: mod_base = OTHER; note = 2'-deoxy-2'-fluorouridine-3'-phosphate
  modified_base 12: mod_base = OTHER; note = 2'-O-methylguanosine-3'-phosphate
  modified_base 13: mod_base = OTHER; note = 2'-O-methyluridine-3'-phosphate
  modified_base 14: mod_base = OTHER; note = 2'-O-methyluridine-3'-phosphate
  modified_base 15: mod_base = OTHER; note = 2'-O-methylcytidine-3'-phosphate
  modified_base 16: mod_base = OTHER; note = 2'-O-methyluridine-3'-phosphate
  modified_base 17: mod_base = OTHER; note = 2'-O-methylguanosine-3'-phosphate
  modified_base 18: mod_base = OTHER; note = 2'-O-methyladenosine-3'-phosphate
  modified_base 19: mod_base = OTHER; note = 2'-O-methyladenosine-3'-phosphate
  modified_base 20: mod_base = OTHER; note = 2'-O-methyladenosine-3'-phosphate
  modified_base 21: mod_base = OTHER; note = 2'-O-methylguanosine-3'-phosphate ((2S,4R)-1-[29-[[2-(acetylamino)-2-deoxy-beta-D-galactopyra nosyl]oxy]-14,14-bis[[3-[[3-[[5-[[2-(acetylamino)-2-deoxy-b eta-D-galactopyranosyl]oxy]-1-oxopentyl]amino]propyl]amino] -3-oxopropoxy]methyl]-1,12,19,25-tetraoxo-16-oxa-13,20,24-t riazanonacos-1-yl]-4-hydroxy-2-pyrrolidinyl)methyl ester
aaggcactgatgttctgaaag

SEQ ID NO: 1961 - RNA, 23 nt, synthetic construct
  source 1..23: mol_type = other RNA
  modified_base 1: mod_base = OTHER; note = 2'-O-methylcytidine-3'-phosphorothioate
  modified_base 2: mod_base = OTHER; note = 2'-deoxy-2'-fluorouridine-3'-phosphorothioate
  modified_base 3: mod_base = OTHER; note = 2'-O-methyluridine-3'-phosphate
  modified_base 4: mod_base = OTHER; note = 2'-O-methyluridine-3'-phosphate
  modified_base 5: mod_base = OTHER; note = 2'-O-methylcytidine-3'-phosphate
  modified_base 6: mod_base = OTHER; note = 2'-deoxy-2'-fluoroadenosine-3'-phosphate
  modified_base 7: mod_base = OTHER; note = 2'-O-methylguanosine-3'-phosphate
  modified_base 8: mod_base = OTHER; note = 2'-deoxy-2'-fluoroadenosine-3'-phosphate
  modified_base 9: mod_base = OTHER; note = 2'-deoxy-2'-fluoroadenosine-3'-phosphate
  modified_base 10: mod_base = OTHER; note = 2'-O-methylcytidine-3'-phosphate
  modified_base 11: mod_base = OTHER; note = 2'-O-methyladenosine-3'-phosphate
  modified_base 12: mod_base = OTHER; note = 2'-O-methyluridine-3'-phosphate
  modified_base 13: mod_base = OTHER; note = 2'-O-methylcytidine-3'-phosphate
  modified_base 14: mod_base = OTHER; note = 2'-deoxy-2'-fluoroadenosine-3'-phosphate
  modified_base 15: mod_base = OTHER; note = 2'-O-methylguanosine-3'-phosphate
  modified_base 16: mod_base = OTHER; note = 2'-deoxy-2'-fluorouridine-3'-phosphate
  modified_base 17: mod_base = OTHER; note = 2'-O-methylguanosine-3'-phosphate
  modified_base 18: mod_base = OTHER; note = 2'-O-methylcytidine-3'-phosphate
  modified_base 19: mod_base = OTHER; note = 2'-O-methylcytidine-3'-phosphate
  modified_base 20: mod_base = OTHER; note = 2'-O-methyluridine-3'-phosphate
  modified_base 21: mod_base = OTHER; note = 2'-O-methyluridine-3'-phosphorothioate
  modified_base 22: mod_base = OTHER; note = 2'-O-methyluridine-3'-phosphorothioate
  modified_base 23: mod_base = OTHER; note = 2'-O-methylcytidine
ctttcagaacatcagtgcctttc

SEQ ID NO: 1962 - RNA, 21 nt, synthetic construct
  source 1..21: mol_type = other RNA
  modified_base 1: mod_base = OTHER; note = 2'-O-methyladenosine-3'-phosphorothioate
  modified_base 2: mod_base = OTHER; note = 2'-O-methyladenosine-3'-phosphorothioate
  modified_base 3: mod_base = OTHER; note = 2'-O-methylcytidine-3'-phosphate
  modified_base 4: mod_base = OTHER; note = 2'-O-methyladenosine-3'-phosphate
  modified_base 5: mod_base = OTHER; note = 2'-O-methyladenosine-3'-phosphate
  modified_base 6: mod_base = OTHER; note = 2'-O-methylcytidine-3'-phosphate
  modified_base 7: mod_base = OTHER; note = 2'-deoxy-2'-fluoroadenosine-3'-phosphate
  modified_base 8: mod_base = OTHER; note = 2'-O-methyluridine-3'-phosphate
  modified_base 9: mod_base = OTHER; note = 2'-deoxy-2'-fluoroguanosine-3'-phosphate
  modified_base 10: mod_base = OTHER; note = 2'-deoxy-2'-fluorocytidine-3'-phosphate
  modified_base 11: mod_base = OTHER; note = 2'-deoxy-2'-fluorouridine-3'-phosphate
  modified_base 12: mod_base = OTHER; note = 2'-O-methyladenosine-3'-phosphate
  modified_base 13: mod_base = OTHER; note = 2'-O-methyladenosine-3'-phosphate
  modified_base 14: mod_base = OTHER; note = 2'-O-methyladenosine-3'-phosphate
  modified_base 15: mod_base = OTHER; note = 2'-O-methyluridine-3'-phosphate
  modified_base 16: mod_base = OTHER; note = 2'-O-methylcytidine-3'-phosphate
  modified_base 17: mod_base = OTHER; note = 2'-O-methyladenosine-3'-phosphate
  modified_base 18: mod_base = OTHER; note = 2'-O-methylguanosine-3'-phosphate
  modified_base 19: mod_base = OTHER; note = 2'-O-methyluridine-3'-phosphate
  modified_base 20: mod_base = OTHER; note = 2'-O-methyladenosine-3'-phosphate
  modified_base 21: mod_base = OTHER; note = 2'-O-methylcytidine-3'-phosphate ((2S,4R)-1-[29-[[2-(acetylamino)-2-deoxy-beta-D-galactopyra nosyl]oxy]-14,14-bis[[3-[[3-[[5-[[2-(acetylamino)-2-deoxy-b eta-D-galactopyranosyl]oxy]-1-oxopentyl]amino]propyl]amino] -3-oxopropoxy]methyl]-1,12,19,25-tetraoxo-16-oxa-13,20,24-t riazanonacos-1-yl]-4-hydroxy-2-pyrrolidinyl)methyl ester
aacaacatgctaaatcagtac

SEQ ID NO: 1963 - RNA, 23 nt, synthetic construct
  source 1..23: mol_type = other RNA
  modified_base 1: mod_base = OTHER; note = 2'-O-methylguanosine-3'-phosphorothioate
  modified_base 2: mod_base = OTHER; note = 2'-deoxy-2'-fluorouridine-3'-phosphorothioate
  modified_base 3: mod_base = OTHER; note = 2'-O-methyladenosine-3'-phosphate
  modified_base 4: mod_base = OTHER; note = 2'-O-methylcytidine-3'-phosphate
  modified_base 5: mod_base = OTHER; note = 2'-O-methyluridine-3'-phosphate
  modified_base 6: mod_base = OTHER; note = 2'-deoxy-2'-fluoroguanosine-3'-phosphate
  modified_base 7: mod_base = OTHER; note = 2'-O-methyladenosine-3'-phosphate
  modified_base 8: mod_base = OTHER; note = 2'-deoxy-2'-fluorouridine-3'-phosphate
  modified_base 9: mod_base = OTHER; note = 2'-deoxy-2'-fluorouridine-3'-phosphate
  modified_base 10: mod_base = OTHER; note = 2'-O-methyluridine-3'-phosphate
  modified_base 11: mod_base = OTHER; note = 2'-O-methyladenosine-3'-phosphate
  modified_base 12: mod_base = OTHER; note = 2'-O-methylguanosine-3'-phosphate
  modified_base 13: mod_base = OTHER; note = 2'-O-methylcytidine-3'-phosphate
  modified_base 14: mod_base = OTHER; note = 2'-deoxy-2'-fluoroadenosine-3'-phosphate
  modified_base 15: mod_base = OTHER; note = 2'-O-methyluridine-3'-phosphate
  modified_base 16: mod_base = OTHER; note = 2'-deoxy-2'-fluoroguanosine-3'-phosphate
  modified_base 17: mod_base = OTHER; note = 2'-O-methyluridine-3'-phosphate
  modified_base 18: mod_base = OTHER; note = 2'-O-methyluridine-3'-phosphate
  modified_base 19: mod_base = OTHER; note = 2'-O-methylguanosine-3'-phosphate
  modified_base 20: mod_base = OTHER; note = 2'-O-methyluridine-3'-phosphate
  modified_base 21: mod_base = OTHER; note = 2'-O-methyluridine-3'-phosphorothioate
  modified_base 22: mod_base = OTHER; note = 2'-O-methylcytidine-3'-phosphorothioate
  modified_base 23: mod_base = OTHER; note = 2'-O-methyladenosine
gtactgatttagcatgttgttca

SEQ ID NO: 1964 - RNA, 21 nt, synthetic construct
  source 1..21: mol_type = other RNA
  modified_base 1: mod_base = OTHER; note = 2'-O-methyladenosine-3'-phosphorothioate
  modified_base 2: mod_base = OTHER; note = 2'-O-methylcytidine-3'-phosphorothioate
  modified_base 3: mod_base = OTHER; note = 2'-O-methyladenosine-3'-phosphate
  modified_base 4: mod_base = OTHER; note = 2'-O-methyladenosine-3'-phosphate
  modified_base 5: mod_base = OTHER; note = 2'-O-methylcytidine-3'-phosphate
  modified_base 6: mod_base = OTHER; note = 2'-O-methyladenosine-3'-phosphate
  modified_base 7: mod_base = OTHER; note = 2'-deoxy-2'-fluorouridine-3'-phosphate
  modified_base 8: mod_base = OTHER; note = 2'-O-methylguanosine-3'-phosphate
  modified_base 9: mod_base = OTHER; note = 2'-deoxy-2'-fluorocytidine-3'-phosphate
  modified_base 10: mod_base = OTHER; note = 2'-deoxy-2'-fluorouridine-3'-phosphate
  modified_base 11: mod_base = OTHER; note = 2'-deoxy-2'-fluoroadenosine-3'-phosphate
  modified_base 12: mod_base = OTHER; note = 2'-O-methyladenosine-3'-phosphate
  modified_base 13: mod_base = OTHER; note = 2'-O-methyladenosine-3'-phosphate
  modified_base 14: mod_base = OTHER; note = 2'-O-methyluridine-3'-phosphate
  modified_base 15: mod_base = OTHER; note = 2'-O-methylcytidine-3'-phosphate
  modified_base 16: mod_base = OTHER; note = 2'-O-methyladenosine-3'-phosphate
  modified_base 17: mod_base = OTHER; note = 2'-O-methylguanosine-3'-phosphate
  modified_base 18: mod_base = OTHER; note = 2'-O-methyluridine-3'-phosphate
  modified_base 19: mod_base = OTHER; note = 2'-O-methyladenosine-3'-phosphate
  modified_base 20: mod_base = OTHER; note = 2'-O-methylcytidine-3'-phosphate
  modified_base 21: mod_base = OTHER; note = 2'-O-methyluridine-3'-phosphate ((2S,4R)-1-[29-[[2-(acetylamino)-2-deoxy-beta-D-galactopyra nosyl]oxy]-14,14-bis[[3-[[3-[[5-[[2-(acetylamino)-2-deoxy-b eta-D-galactopyranosyl]oxy]-1-oxopentyl]amino]propyl]amino] -3-oxopropoxy]methyl]-1,12,19,25-tetraoxo-16-oxa-13,20,24-t riazanonacos-1-yl]-4-hydroxy-2-pyrrolidinyl)methyl ester
acaacatgctaaatcagtact

SEQ ID NO: 1965 - RNA, 23 nt, synthetic construct
  source 1..23: mol_type = other RNA
  modified_base 1: mod_base = OTHER; note = 2'-O-methyladenosine-3'-phosphorothioate
  modified_base 2: mod_base = OTHER; note = 2'-deoxy-2'-fluoroguanosine-3'-phosphorothioate
  modified_base 3: mod_base = OTHER; note = 2'-O-methyluridine-3'-phosphate
  modified_base 4: mod_base = OTHER; note = 2'-O-methyladenosine-3'-phosphate
  modified_base 5: mod_base = OTHER; note = 2'-O-methylcytidine-3'-phosphate
  modified_base 6: mod_base = OTHER; note = 2'-deoxy-2'-fluorouridine-3'-phosphate
  modified_base 7: mod_base = OTHER; note = 2'-O-methylguanosine-3'-phosphate
  modified_base 8: mod_base = OTHER; note = 2'-deoxy-2'-fluoroadenosine-3'-phosphate
  modified_base 9: mod_base = OTHER; note = 2'-deoxy-2'-fluorouridine-3'-phosphate
  modified_base 10: mod_base = OTHER; note = 2'-O-methyluridine-3'-phosphate
  modified_base 11: mod_base = OTHER; note = 2'-O-methyluridine-3'-phosphate
  modified_base 12: mod_base = OTHER; note = 2'-O-methyladenosine-3'-phosphate
  modified_base 13: mod_base = OTHER; note = 2'-O-methylguanosine-3'-phosphate
  modified_base 14: mod_base = OTHER; note = 2'-deoxy-2'-fluorocytidine-3'-phosphate
  modified_base 15: mod_base = OTHER; note = 2'-O-methyladenosine-3'-phosphate
  modified_base 16: mod_base = OTHER; note = 2'-deoxy-2'-fluorouridine-3'-phosphate
  modified_base 17: mod_base = OTHER; note = 2'-O-methylguanosine-3'-phosphate
  modified_base 18: mod_base = OTHER; note = 2'-O-methyluridine-3'-phosphate
  modified_base 19: mod_base = OTHER; note = 2'-O-methyluridine-3'-phosphate
  modified_base 20: mod_base = OTHER; note = 2'-O-methylguanosine-3'-phosphate
  modified_base 21: mod_base = OTHER; note = 2'-O-methyluridine-3'-phosphorothioate
  modified_base 22: mod_base = OTHER; note = 2'-O-methyluridine-3'-phosphorothioate
  modified_base 23: mod_base = OTHER; note = 2'-O-methylcytidine
agtactgatttagcatgttgttc

SEQ ID NO: 1966 - RNA, 21 nt, synthetic construct
  source 1..21: mol_type = other RNA
  modified_base 1: mod_base = OTHER; note = 2'-O-methyluridine-3'-phosphorothioate
  modified_base 2: mod_base = OTHER; note = 2'-O-methyladenosine-3'-phosphorothioate
  modified_base 3: mod_base = OTHER; note = 2'-O-methyluridine-3'-phosphate
  modified_base 4: mod_base = OTHER; note = 2'-O-methylguanosine-3'-phosphate
  modified_base 5: mod_base = OTHER; note = 2'-O-methyladenosine-3'-phosphate
  modified_base 6: mod_base = OTHER; note = 2'-O-methyladenosine-3'-phosphate
  modified_base 7: mod_base = OTHER; note = 2'-deoxy-2'-fluorocytidine-3'-phosphate
  modified_base 8: mod_base = OTHER; note = 2'-O-methyladenosine-3'-phosphate
  modified_base 9: mod_base = OTHER; note = 2'-deoxy-2'-fluoroadenosine-3'-phosphate
  modified_base 10: mod_base = OTHER; note = 2'-deoxy-2'-fluorocytidine-3'-phosphate
  modified_base 11: mod_base = OTHER; note = 2'-deoxy-2'-fluoroadenosine-3'-phosphate
  modified_base 12: mod_base = OTHER; note = 2'-O-methyluridine-3'-phosphate
  modified_base 13: mod_base = OTHER; note = 2'-O-methylguanosine-3'-phosphate
  modified_base 14: mod_base = OTHER; note = 2'-O-methylcytidine-3'-phosphate
  modified_base 15: mod_base = OTHER; note = 2'-O-methyluridine-3'-phosphate
  modified_base 16: mod_base = OTHER; note = 2'-O-methyladenosine-3'-phosphate
  modified_base 17: mod_base = OTHER; note = 2'-O-methyladenosine-3'-phosphate
  modified_base 18: mod_base = OTHER; note = 2'-O-methyladenosine-3'-phosphate
  modified_base 19: mod_base = OTHER; note = 2'-O-methyluridine-3'-phosphate
  modified_base 20: mod_base = OTHER; note = 2'-O-methylcytidine-3'-phosphate
  modified_base 21: mod_base = OTHER; note = 2'-O-methyladenosine-3'-phosphate ((2S,4R)-1-[29-[[2-(acetylamino)-2-deoxy-beta-D-galactopyra nosyl]oxy]-14,14-bis[[3-[[3-[[5-[[2-(acetylamino)-2-deoxy-b eta-D-galactopyranosyl]oxy]-1-oxopentyl]amino]propyl]amino] -3-oxopropoxy]methyl]-1,12,19,25-tetraoxo-16-oxa-13,20,24-t riazanonacos-1-yl]-4-hydroxy-2-pyrrolidinyl)methyl ester
tatgaacaacatgctaaatca

SEQ ID NO: 1967 - RNA, 23 nt, synthetic construct
  source 1..23: mol_type = other RNA
  modified_base 1: mod_base = OTHER; note = 2'-O-methyluridine-3'-phosphorothioate
  modified_base 2: mod_base = OTHER; note = 2'-deoxy-2'-fluoroguanosine-3'-phosphorothioate
  modified_base 3: mod_base = OTHER; note = 2'-O-methyladenosine-3'-phosphate
  modified_base 4: mod_base = OTHER; note = 2'-O-methyluridine-3'-phosphate
  modified_base 5: mod_base = OTHER; note = 2'-O-methyluridine-3'-phosphate
  modified_base 6: mod_base = OTHER; note = 2'-deoxy-2'-fluorouridine-3'-phosphate
  modified_base 7: mod_base = OTHER; note = 2'-O-methyladenosine-3'-phosphate
  modified_base 8: mod_base = OTHER; note = 2'-deoxy-2'-fluoroguanosine-3'-phosphate
  modified_base 9: mod_base = OTHER; note = 2'-deoxy-2'-fluorocytidine-3'-phosphate
  modified_base 10: mod_base = OTHER; note = 2'-O-methyladenosine-3'-phosphate
  modified_base 11: mod_base = OTHER; note = 2'-O-methyluridine-3'-phosphate
  modified_base 12: mod_base = OTHER; note = 2'-O-methylguanosine-3'-phosphate
  modified_base 13: mod_base = OTHER; note = 2'-O-methyluridine-3'-phosphate
  modified_base 14: mod_base = OTHER; note = 2'-deoxy-2'-fluorouridine-3'-phosphate
  modified_base 15: mod_base = OTHER; note = 2'-O-methylguanosine-3'-phosphate
  modified_base 16: mod_base = OTHER; note = 2'-deoxy-2'-fluorouridine-3'-phosphate
  modified_base 17: mod_base = OTHER; note = 2'-O-methyluridine-3'-phosphate
  modified_base 18: mod_base = OTHER; note = 2'-O-methylcytidine-3'-phosphate
  modified_base 19: mod_base = OTHER; note = 2'-O-methyladenosine-3'-phosphate
  modified_base 20: mod_base = OTHER; note = 2'-O-methyluridine-3'-phosphate
  modified_base 21: mod_base = OTHER; note = 2'-O-methyladenosine-3'-phosphorothioate
  modified_base 22: mod_base = OTHER; note = 2'-O-methyladenosine-3'-phosphorothioate
  modified_base 23: mod_base = OTHER; note = 2'-O-methyluridine
tgatttagcatgttgttcataat

SEQ ID NO: 1968 - RNA, 21 nt, synthetic construct
  source 1..21: mol_type = other RNA
  modified_base 1: mod_base = OTHER; note = 2'-O-methyluridine-3'-phosphorothioate
  modified_base 2: mod_base = OTHER; note = 2'-O-methyluridine-3'-phosphorothioate
  modified_base 3: mod_base = OTHER; note = 2'-O-methyladenosine-3'-phosphate
  modified_base 4: mod_base = OTHER; note = 2'-O-methyluridine-3'-phosphate
  modified_base 5: mod_base = OTHER; note = 2'-O-methylguanosine-3'-phosphate
  modified_base 6: mod_base = OTHER; note = 2'-O-methyladenosine-3'-phosphate
  modified_base 7: mod_base = OTHER; note = 2'-deoxy-2'-fluoroadenosine-3'-phosphate
  modified_base 8: mod_base = OTHER; note = 2'-O-methylcytidine-3'-phosphate
  modified_base 9: mod_base = OTHER; note = 2'-deoxy-2'-fluoroadenosine-3'-phosphate
  modified_base 10: mod_base = OTHER; note = 2'-deoxy-2'-fluoroadenosine-3'-phosphate
  modified_base 11: mod_base = OTHER; note = 2'-deoxy-2'-fluorocytidine-3'-phosphate
  modified_base 12: mod_base = OTHER; note = 2'-O-methyladenosine-3'-phosphate
  modified_base 13: mod_base = OTHER; note = 2'-O-methyluridine-3'-phosphate
  modified_base 14: mod_base = OTHER; note = 2'-O-methylguanosine-3'-phosphate
  modified_base 15: mod_base = OTHER; note = 2'-O-methylcytidine-3'-phosphate
  modified_base 16: mod_base = OTHER; note = 2'-O-methyluridine-3'-phosphate
  modified_base 17: mod_base = OTHER; note = 2'-O-methyladenosine-3'-phosphate
  modified_base 18: mod_base = OTHER; note = 2'-O-methyladenosine-3'-phosphate
  modified_base 19: mod_base = OTHER; note = 2'-O-methyladenosine-3'-phosphate
  modified_base 20: mod_base = OTHER; note = 2'-O-methyluridine-3'-phosphate
  modified_base 21: mod_base = OTHER; note = 2'-O-methylcytidine-3'-phosphate ((2S,4R)-1-[29-[[2-(acetylamino)-2-deoxy-beta-D-galactopyra nosyl]oxy]-14,14-bis[[3-[[3-[[5-[[2-(acetylamino)-2-deoxy-b eta-D-galactopyranosyl]oxy]-1-oxopentyl]amino]propyl]amino] -3-oxopropoxy]methyl]-1,12,19,25-tetraoxo-16-oxa-13,20,24-t riazanonacos-1-yl]-4-hydroxy-2-pyrrolidinyl)methyl ester
ttatgaacaacatgctaaatc

SEQ ID NO: 1969 - RNA, 23 nt, synthetic construct
  source 1..23: mol_type = other RNA
  modified_base 1: mod_base = OTHER; note = 2'-O-methylguanosine-3'-phosphorothioate
  modified_base 2: mod_base = OTHER; note = 2'-deoxy-2'-fluoroadenosine-3'-phosphorothioate
  modified_base 3: mod_base = OTHER; note = 2'-O-methyluridine-3'-phosphate
  modified_base 4: mod_base = OTHER; note = 2'-O-methyluridine-3'-phosphate
  modified_base 5: mod_base = OTHER; note = 2'-O-methyluridine-3'-phosphate
  modified_base 6: mod_base = OTHER; note = 2'-deoxy-2'-fluoroadenosine-3'-phosphate
  modified_base 7: mod_base = OTHER; note = 2'-O-methylguanosine-3'-phosphate
  modified_base 8: mod_base = OTHER; note = 2'-deoxy-2'-fluorocytidine-3'-phosphate
  modified_base 9: mod_base = OTHER; note = 2'-deoxy-2'-fluoroadenosine-3'-phosphate
  modified_base 10: mod_base = OTHER; note = 2'-O-methyluridine-3'-phosphate
  modified_base 11: mod_base = OTHER; note = 2'-O-methylguanosine-3'-phosphate
  modified_base 12: mod_base = OTHER; note = 2'-O-methyluridine-3'-phosphate
  modified_base 13: mod_base = OTHER; note = 2'-O-methyluridine-3'-phosphate
  modified_base 14: mod_base = OTHER; note = 2'-deoxy-2'-fluoroguanosine-3'-phosphate
  modified_base 15: mod_base = OTHER; note = 2'-O-methyluridine-3'-phosphate
  modified_base 16: mod_base = OTHER; note = 2'-deoxy-2'-fluorouridine-3'-phosphate
  modified_base 17: mod_base = OTHER; note = 2'-O-methylcytidine-3'-phosphate
  modified_base 18: mod_base = OTHER; note = 2'-O-methyladenosine-3'-phosphate
  modified_base 19: mod_base = OTHER; note = 2'-O-methyluridine-3'-phosphate
  modified_base 20: mod_base = OTHER; note = 2'-O-methyladenosine-3'-phosphate
  modified_base 21: mod_base = OTHER; note = 2'-O-methyladenosine-3'-phosphorothioate
  modified_base 22: mod_base = OTHER; note = 2'-O-methyluridine-3'-phosphorothioate
  modified_base 23: mod_base = OTHER; note = 2'-O-methylcytidine
gatttagcatgttgttcataatc

SEQ ID NO: 1970 - RNA, 21 nt, synthetic construct
  source 1..21: mol_type = other RNA
  modified_base 1: mod_base = OTHER; note = 2'-O-methyluridine-3'-phosphorothioate
  modified_base 2: mod_base = OTHER; note = 2'-O-methylcytidine-3'-phosphorothioate
  modified_base 3: mod_base = OTHER; note = 2'-O-methyluridine-3'-phosphate
  modified_base 4: mod_base = OTHER; note = 2'-O-methyluridine-3'-phosphate
  modified_base 5: mod_base = OTHER; note = 2'-O-methyluridine-3'-phosphate
  modified_base 6: mod_base = OTHER; note = 2'-O-methyladenosine-3'-phosphate
  modified_base 7: mod_base = OTHER; note = 2'-deoxy-2'-fluoroguanosine-3'-phosphate
  modified_base 8: mod_base = OTHER; note = 2'-O-methyluridine-3'-phosphate
  modified_base 9: mod_base = OTHER; note = 2'-deoxy-2'-fluoroguanosine-3'-phosphate
  modified_base 10: mod_base = OTHER; note = 2'-deoxy-2'-fluorouridine-3'-phosphate
  modified_base 11: mod_base = OTHER; note = 2'-deoxy-2'-fluorocytidine-3'-phosphate
  modified_base 12: mod_base = OTHER; note = 2'-O-methyluridine-3'-phosphate
  modified_base 13: mod_base = OTHER; note = 2'-O-methylguanosine-3'-phosphate
  modified_base 14: mod_base = OTHER; note = 2'-O-methyladenosine-3'-phosphate
  modified_base 15: mod_base = OTHER; note = 2'-O-methyladenosine-3'-phosphate
  modified_base 16: mod_base = OTHER; note = 2'-O-methyluridine-3'-phosphate
  modified_base 17: mod_base = OTHER; note = 2'-O-methyladenosine-3'-phosphate
  modified_base 18: mod_base = OTHER; note = 2'-O-methyluridine-3'-phosphate
  modified_base 19: mod_base = OTHER; note = 2'-O-methyladenosine-3'-phosphate
  modified_base 20: mod_base = OTHER; note = 2'-O-methyluridine-3'-phosphate
  modified_base 21: mod_base = OTHER; note = 2'-O-methylcytidine-3'-phosphate ((2S,4R)-1-[29-[[2-(acetylamino)-2-deoxy-beta-D-galactopyra nosyl]oxy]-14,14-bis[[3-[[3-[[5-[[2-(acetylamino)-2-deoxy-b eta-D-galactopyranosyl]oxy]-1-oxopentyl]amino]propyl]amino] -3-oxopropoxy]methyl]-1,12,19,25-tetraoxo-16-oxa-13,20,24-t riazanonacos-1-yl]-4-hydroxy-2-pyrrolidinyl)methyl ester
tctttagtgtctgaatatatc

SEQ ID NO: 1971 - RNA, 23 nt, synthetic construct
  source 1..23: mol_type = other RNA
  modified_base 1: mod_base = OTHER; note = 2'-O-methylguanosine-3'-phosphorothioate
  modified_base 2: mod_base = OTHER; note = 2'-deoxy-2'-fluoroadenosine-3'-phosphorothioate
  modified_base 3: mod_base = OTHER; note = 2'-O-methyluridine-3'-phosphate
  modified_base 4: mod_base = OTHER; note = 2'-O-methyladenosine-3'-phosphate
  modified_base 5: mod_base = OTHER; note = 2'-O-methyluridine-3'-phosphate
  modified_base 6: mod_base = OTHER; note = 2'-deoxy-2'-fluoroadenosine-3'-phosphate
  modified_base 7: mod_base = OTHER; note = 2'-O-methyluridine-3'-phosphate
  modified_base 8: mod_base = OTHER; note = 2'-deoxy-2'-fluorouridine-3'-phosphate
  modified_base 9: mod_base = OTHER; note = 2'-deoxy-2'-fluorocytidine-3'-phosphate
  modified_base 10: mod_base = OTHER; note = 2'-O-methyladenosine-3'-phosphate
  modified_base 11: mod_base = OTHER; note = 2'-O-methylguanosine-3'-phosphate
  modified_base 12: mod_base = OTHER; note = 2'-O-methyladenosine-3'-phosphate
  modified_base 13: mod_base = OTHER; note = 2'-O-methylcytidine-3'-phosphate
  modified_base 14: mod_base = OTHER; note = 2'-deoxy-2'-fluoroadenosine-3'-phosphate
  modified_base 15: mod_base = OTHER; note = 2'-O-methylcytidine-3'-phosphate
  modified_base 16: mod_base = OTHER; note = 2'-deoxy-2'-fluorouridine-3'-phosphate
  modified_base 17: mod_base = OTHER; note = 2'-O-methyladenosine-3'-phosphate
  modified_base 18: mod_base = OTHER; note = 2'-O-methyladenosine-3'-phosphate
  modified_base 19: mod_base = OTHER; note = 2'-O-methyladenosine-3'-phosphate
  modified_base 20: mod_base = OTHER; note = 2'-O-methylguanosine-3'-phosphate
  modified_base 21: mod_base = OTHER; note = 2'-O-methyladenosine-3'-phosphorothioate
  modified_base 22: mod_base = OTHER; note = 2'-O-methyluridine-3'-phosphorothioate
  modified_base 23: mod_base = OTHER; note = 2'-O-methylguanosine
gatatattcagacactaaagatg

SEQ ID NO: 1972 - RNA, 21 nt, synthetic construct
  source 1..21: mol_type = other RNA
  modified_base 1: mod_base = OTHER; note = 2'-O-methylcytidine-3'-phosphorothioate
  modified_base 2: mod_base = OTHER; note = 2'-O-methyluridine-3'-phosphorothioate
  modified_base 3: mod_base = OTHER; note = 2'-O-methyluridine-3'-phosphate
  modified_base 4: mod_base = OTHER; note = 2'-O-methyluridine-3'-phosphate
  modified_base 5: mod_base = OTHER; note = 2'-O-methyladenosine-3'-phosphate
  modified_base 6: mod_base = OTHER; note = 2'-O-methylguanosine-3'-phosphate
  modified_base 7: mod_base = OTHER; note = 2'-deoxy-2'-fluorouridine-3'-phosphate
  modified_base 8: mod_base = OTHER; note = 2'-O-methylguanosine-3'-phosphate
  modified_base 9: mod_base = OTHER; note = 2'-deoxy-2'-fluorouridine-3'-phosphate
  modified_base 10: mod_base = OTHER; note = 2'-deoxy-2'-fluorocytidine-3'-phosphate
  modified_base 11: mod_base = OTHER; note = 2'-deoxy-2'-fluorouridine-3'-phosphate
  modified_base 12: mod_base = OTHER; note = 2'-O-methylguanosine-3'-phosphate
  modified_base 13: mod_base = OTHER; note = 2'-O-methyladenosine-3'-phosphate
  modified_base 14: mod_base = OTHER; note = 2'-O-methyladenosine-3'-phosphate
  modified_base 15: mod_base = OTHER; note = 2'-O-methyluridine-3'-phosphate
  modified_base 16: mod_base = OTHER; note = 2'-O-methyladenosine-3'-phosphate
  modified_base 17: mod_base = OTHER; note = 2'-O-methyluridine-3'-phosphate
  modified_base 18: mod_base = OTHER; note = 2'-O-methyladenosine-3'-phosphate
  modified_base 19: mod_base = OTHER; note = 2'-O-methyluridine-3'-phosphate
  modified_base 20: mod_base = OTHER; note = 2'-O-methylcytidine-3'-phosphate
  modified_base 21: mod_base = OTHER; note = 2'-O-methylcytidine-3'-phosphate ((2S,4R)-1-[29-[[2-(acetylamino)-2-deoxy-beta-D-galactopyra nosyl]oxy]-14,14-bis[[3-[[3-[[5-[[2-(acetylamino)-2-deoxy-b eta-D-galactopyranosyl]oxy]-1-oxopentyl]amino]propyl]amino] -3-oxopropoxy]methyl]-1,12,19,25-tetraoxo-16-oxa-13,20,24-t riazanonacos-1-yl]-4-hydroxy-2-pyrrolidinyl)methyl ester
ctttagtgtctgaatatatcc

SEQ ID NO: 1973 - RNA, 23 nt, synthetic construct
  source 1..23: mol_type = other RNA
  modified_base 1: mod_base = OTHER; note = 2'-O-methylguanosine-3'-phosphorothioate
  modified_base 2: mod_base = OTHER; note = 2'-deoxy-2'-fluoroguanosine-3'-phosphorothioate
  modified_base 3: mod_base = OTHER; note = 2'-O-methyladenosine-3'-phosphate
  modified_base 4: mod_base = OTHER; note = 2'-O-methyluridine-3'-phosphate
  modified_base 5: mod_base = OTHER; note = 2'-O-methyladenosine-3'-phosphate
  modified_base 6: mod_base = OTHER; note = 2'-deoxy-2'-fluorouridine-3'-phosphate
  modified_base 7: mod_base = OTHER; note = 2'-O-methyladenosine-3'-phosphate
  modified_base 8: mod_base = OTHER; note = 2'-deoxy-2'-fluorouridine-3'-phosphate
  modified_base 9: mod_base = OTHER; note = 2'-deoxy-2'-fluorouridine-3'-phosphate
  modified_base 10: mod_base = OTHER; note = 2'-O-methylcytidine-3'-phosphate
  modified_base 11: mod_base = OTHER; note = 2'-O-methyladenosine-3'-phosphate
  modified_base 12: mod_base = OTHER; note = 2'-O-methylguanosine-3'-phosphate
  modified_base 13: mod_base = OTHER; note = 2'-O-methyladenosine-3'-phosphate
  modified_base 14: mod_base = OTHER; note = 2'-deoxy-2'-fluorocytidine-3'-phosphate
  modified_base 15: mod_base = OTHER; note = 2'-O-methyladenosine-3'-phosphate
  modified_base 16: mod_base = OTHER; note = 2'-deoxy-2'-fluorocytidine-3'-phosphate
  modified_base 17: mod_base = OTHER; note = 2'-O-methyluridine-3'-phosphate
  modified_base 18: mod_base = OTHER; note = 2'-O-methyladenosine-3'-phosphate
  modified_base 19: mod_base = OTHER; note = 2'-O-methyladenosine-3'-phosphate
  modified_base 20: mod_base = OTHER; note = 2'-O-methyladenosine-3'-phosphate
  modified_base 21: mod_base = OTHER; note = 2'-O-methylguanosine-3'-phosphorothioate
  modified_base 22: mod_base = OTHER; note = 2'-O-methyladenosine-3'-phosphorothioate
  modified_base 23: mod_base = OTHER; note = 2'-O-methyluridine
ggatatattcagacactaaagat

SEQ ID NO: 1974 - RNA, 21 nt, synthetic construct
  source 1..21: mol_type = other RNA
  modified_base 1: mod_base = OTHER; note = 2'-O-methylcytidine-3'-phosphorothioate
  modified_base 2: mod_base = OTHER; note = 2'-O-methyladenosine-3'-phosphorothioate
  modified_base 3: mod_base = OTHER; note = 2'-O-methylcytidine-3'-phosphate
  modified_base 4: mod_base = OTHER; note = 2'-O-methyladenosine-3'-phosphate
  modified_base 5: mod_base = OTHER; note = 2'-O-methyluridine-3'-phosphate
  modified_base 6: mod_base = OTHER; note = 2'-O-methylcytidine-3'-phosphate
  modified_base 7: mod_base = OTHER; note = 2'-deoxy-2'-fluorouridine-3'-phosphate
  modified_base 8: mod_base = OTHER; note = 2'-O-methyluridine-3'-phosphate
  modified_base 9: mod_base = OTHER; note = 2'-deoxy-2'-fluorouridine-3'-phosphate
  modified_base 10: mod_base = OTHER; note = 2'-deoxy-2'-fluoroadenosine-3'-phosphate
  modified_base 11: mod_base = OTHER; note = 2'-deoxy-2'-fluoroguanosine-3'-phosphate
  modified_base 12: mod_base = OTHER; note = 2'-O-methyluridine-3'-phosphate
  modified_base 13: mod_base = OTHER; note = 2'-O-methylguanosine-3'-phosphate
  modified_base 14: mod_base = OTHER; note = 2'-O-methyluridine-3'-phosphate
  modified_base 15: mod_base = OTHER; note = 2'-O-methylcytidine-3'-phosphate
  modified_base 16: mod_base = OTHER; note = 2'-O-methyluridine-3'-phosphate
  modified_base 17: mod_base = OTHER; note = 2'-O-methylguanosine-3'-phosphate
  modified_base 18: mod_base = OTHER; note = 2'-O-methyladenosine-3'-phosphate
  modified_base 19: mod_base = OTHER; note = 2'-O-methyladenosine-3'-phosphate
  modified_base 20: mod_base = OTHER; note = 2'-O-methyluridine-3'-phosphate
  modified_base 21: mod_base = OTHER; note = 2'-O-methyladenosine-3'-phosphate ((2S,4R)-1-[29-[[2-(acetylamino)-2-deoxy-beta-D-galactopyra nosyl]oxy]-14,14-bis[[3-[[3-[[5-[[2-(acetylamino)-2-deoxy-b eta-D-galactopyranosyl]oxy]-1-oxopentyl]amino]propyl]amino] -3-oxopropoxy]methyl]-1,12,19,25-tetraoxo-16-oxa-13,20,24-t riazanonacos-1-yl]-4-hydroxy-2-pyrrolidinyl)methyl ester
cacatctttagtgtctgaata

SEQ ID NO: 1975 - RNA, 23 nt, synthetic construct
  source 1..23: mol_type = other RNA
  modified_base 1: mod_base = OTHER; note = 2'-O-methyluridine-3'-phosphorothioate
  modified_base 2: mod_base = OTHER; note = 2'-deoxy-2'-fluoroadenosine-3'-phosphorothioate
  modified_base 3: mod_base = OTHER; note = 2'-O-methyluridine-3'-phosphate
  modified_base 4: mod_base = OTHER; note = 2'-O-methyluridine-3'-phosphate
  modified_base 5: mod_base = OTHER; note = 2'-O-methylcytidine-3'-phosphate
  modified_base 6: mod_base = OTHER; note = 2'-deoxy-2'-fluoroadenosine-3'-phosphate
  modified_base 7: mod_base = OTHER; note = 2'-O-methylguanosine-3'-phosphate
  modified_base 8: mod_base = OTHER; note = 2'-deoxy-2'-fluoroadenosine-3'-phosphate
  modified_base 9: mod_base = OTHER; note = 2'-deoxy-2'-fluorocytidine-3'-phosphate
  modified_base 10: mod_base = OTHER; note = 2'-O-methyladenosine-3'-phosphate
  modified_base 11: mod_base = OTHER; note = 2'-O-methylcytidine-3'-phosphate
  modified_base 12: mod_base = OTHER; note = 2'-O-methyluridine-3'-phosphate
  modified_base 13: mod_base = OTHER; note = 2'-O-methyladenosine-3'-phosphate
  modified_base 14: mod_base = OTHER; note = 2'-deoxy-2'-fluoroadenosine-3'-phosphate
  modified_base 15: mod_base = OTHER; note = 2'-O-methyladenosine-3'-phosphate
  modified_base 16: mod_base = OTHER; note = 2'-deoxy-2'-fluoroguanosine-3'-phosphate
  modified_base 17: mod_base = OTHER; note = 2'-O-methyladenosine-3'-phosphate
  modified_base 18: mod_base = OTHER; note = 2'-O-methyluridine-3'-phosphate
  modified_base 19: mod_base = OTHER; note = 2'-O-methylguanosine-3'-phosphate
  modified_base 20: mod_base = OTHER; note = 2'-O-methyluridine-3'-phosphate
  modified_base 21: mod_base = OTHER; note = 2'-O-methylguanosine-3'-phosphorothioate
  modified_base 22: mod_base = OTHER; note = 2'-O-methyladenosine-3'-phosphorothioate
  modified_base 23: mod_base = OTHER; note = 2'-O-methyluridine
tattcagacactaaagatgtgat

SEQ ID NO: 1976 - RNA, 21 nt, synthetic construct
  source 1..21: mol_type = other RNA
  modified_base 1: mod_base = OTHER; note = 2'-O-methyluridine-3'-phosphorothioate
  modified_base 2: mod_base = OTHER; note = 2'-O-methylcytidine-3'-phosphorothioate
  modified_base 3: mod_base = OTHER; note = 2'-O-methyladenosine-3'-phosphate
  modified_base 4: mod_base = OTHER; note = 2'-O-methylcytidine-3'-phosphate
  modified_base 5: mod_base = OTHER; note = 2'-O-methyladenosine-3'-phosphate
  modified_base 6: mod_base = OTHER; note = 2'-O-methyluridine-3'-phosphate
  modified_base 7: mod_base = OTHER; note = 2'-deoxy-2'-fluorocytidine-3'-phosphate
  modified_base 8: mod_base = OTHER; note = 2'-O-methyluridine-3'-phosphate
  modified_base 9: mod_base = OTHER; note = 2'-deoxy-2'-fluorouridine-3'-phosphate
  modified_base 10: mod_base = OTHER; note = 2'-deoxy-2'-fluorouridine-3'-phosphate
  modified_base 11: mod_base = OTHER; note = 2'-deoxy-2'-fluoroadenosine-3'-phosphate
  modified_base 12: mod_base = OTHER; note = 2'-O-methylguanosine-3'-phosphate
  modified_base 13: mod_base = OTHER; note = 2'-O-methyluridine-3'-phosphate
  modified_base 14: mod_base = OTHER; note = 2'-O-methylguanosine-3'-phosphate
  modified_base 15: mod_base = OTHER; note = 2'-O-methyluridine-3'-phosphate
  modified_base 16: mod_base = OTHER; note = 2'-O-methylcytidine-3'-phosphate
  modified_base 17: mod_base = OTHER; note = 2'-O-methyluridine-3'-phosphate
  modified_base 18: mod_base = OTHER; note = 2'-O-methylguanosine-3'-phosphate
  modified_base 19: mod_base = OTHER; note = 2'-O-methyladenosine-3'-phosphate
  modified_base 20: mod_base = OTHER; note = 2'-O-methyladenosine-3'-phosphate
  modified_base 21: mod_base = OTHER; note = 2'-O-methyluridine-3'-phosphate ((2S,4R)-1-[29-[[2-(acetylamino)-2-deoxy-beta-D-galactopyra nosyl]oxy]-14,14-bis[[3-[[3-[[5-[[2-(acetylamino)-2-deoxy-b eta-D-galactopyranosyl]oxy]-1-oxopentyl]amino]propyl]amino] -3-oxopropoxy]methyl]-1,12,19,25-tetraoxo-16-oxa-13,20,24-t riazanonacos-1-yl]-4-hydroxy-2-pyrrolidinyl)methyl ester
tcacatctttagtgtctgaat

SEQ ID NO: 1977 - RNA, 23 nt, synthetic construct
  source 1..23: mol_type = other RNA
  modified_base 1: mod_base = OTHER; note = 2'-O-methyladenosine-3'-phosphorothioate
  modified_base 2: mod_base = OTHER; note = 2'-deoxy-2'-fluorouridine-3'-phosphorothioate
  modified_base 3: mod_base = OTHER; note = 2'-O-methyluridine-3'-phosphate
  modified_base 4: mod_base = OTHER; note = 2'-O-methylcytidine-3'-phosphate
  modified_base 5: mod_base = OTHER; note = 2'-O-methyladenosine-3'-phosphate
  modified_base 6: mod_base = OTHER; note = 2'-deoxy-2'-fluoroguanosine-3'-phosphate
  modified_base 7: mod_base = OTHER; note = 2'-O-methyladenosine-3'-phosphate
  modified_base 8: mod_base = OTHER; note = 2'-deoxy-2'-fluorocytidine-3'-phosphate
  modified_base 9: mod_base = OTHER; note = 2'-deoxy-2'-fluoroadenosine-3'-phosphate
  modified_base 10: mod_base = OTHER; note = 2'-O-methylcytidine-3'-phosphate
  modified_base 11: mod_base = OTHER; note = 2'-O-methyluridine-3'-phosphate
  modified_base 12: mod_base = OTHER; note = 2'-O-methyladenosine-3'-phosphate
  modified_base 13: mod_base = OTHER; note = 2'-O-methyladenosine-3'-phosphate
  modified_base 14: mod_base = OTHER; note = 2'-deoxy-2'-fluoroadenosine-3'-phosphate
  modified_base 15: mod_base = OTHER; note = 2'-O-methylguanosine-3'-phosphate
  modified_base 16: mod_base = OTHER; note = 2'-deoxy-2'-fluoroadenosine-3'-phosphate
  modified_base 17: mod_base = OTHER; note = 2'-O-methyluridine-3'-phosphate
  modified_base 18: mod_base = OTHER; note = 2'-O-methylguanosine-3'-phosphate
  modified_base 19: mod_base = OTHER; note = 2'-O-methyluridine-3'-phosphate
  modified_base 20: mod_base = OTHER; note = 2'-O-methylguanosine-3'-phosphate
  modified_base 21: mod_base = OTHER; note = 2'-O-methyladenosine-3'-phosphorothioate
  modified_base 22: mod_base = OTHER; note = 2'-O-methyluridine-3'-phosphorothioate
  modified_base 23: mod_base = OTHER; note = 2'-O-methyluridine
attcagacactaaagatgtgatt

SEQ ID NO: 1978 - RNA, 21 nt, synthetic construct
  source 1..21: mol_type = other RNA
  modified_base 1: mod_base = OTHER; note = 2'-O-methyluridine-3'-phosphorothioate
  modified_base 2: mod_base = OTHER; note = 2'-O-methylguanosine-3'-phosphorothioate
  modified_base 3: mod_base = OTHER; note = 2'-O-methyladenosine-3'-phosphate
  modified_base 4: mod_base = OTHER; note = 2'-O-methyluridine-3'-phosphate
  modified_base 5: mod_base = OTHER; note = 2'-O-methyladenosine-3'-phosphate
  modified_base 6: mod_base = OTHER; note = 2'-O-methylcytidine-3'-phosphate
  modified_base 7: mod_base = OTHER; note = 2'-deoxy-2'-fluorouridine-3'-phosphate
  modified_base 8: mod_base = OTHER; note = 2'-O-methyluridine-3'-phosphate
  modified_base 9: mod_base = OTHER; note = 2'-deoxy-2'-fluorocytidine-3'-phosphate
  modified_base 10: mod_base = OTHER; note = 2'-deoxy-2'-fluorouridine-3'-phosphate
  modified_base 11: mod_base = OTHER; note = 2'-deoxy-2'-fluorouridine-3'-phosphate
  modified_base 12: mod_base = OTHER; note = 2'-O-methyluridine-3'-phosphate
  modified_base 13: mod_base = OTHER; note = 2'-O-methylguanosine-3'-phosphate
  modified_base 14: mod_base = OTHER; note = 2'-O-methyladenosine-3'-phosphate
  modified_base 15: mod_base = OTHER; note = 2'-O-methyladenosine-3'-phosphate
  modified_base 16: mod_base = OTHER; note = 2'-O-methyluridine-3'-phosphate
  modified_base 17: mod_base = OTHER; note = 2'-O-methylguanosine-3'-phosphate
  modified_base 18: mod_base = OTHER; note = 2'-O-methyluridine-3'-phosphate
  modified_base 19: mod_base = OTHER; note = 2'-O-methyladenosine-3'-phosphate
  modified_base 20: mod_base = OTHER; note = 2'-O-methylguanosine-3'-phosphate
  modified_base 21: mod_base = OTHER; note = 2'-O-methyladenosine-3'-phosphate ((2S,4R)-1-[29-[[2-(acetylamino)-2-deoxy-beta-D-galactopyra nosyl]oxy]-14,14-bis[[3-[[3-[[5-[[2-(acetylamino)-2-deoxy-b eta-D-galactopyranosyl]oxy]-1-oxopentyl]amino]propyl]amino] -3-oxopropoxy]methyl]-1,12,19,25-tetraoxo-16-oxa-13,20,24-t riazanonacos-1-yl]-4-hydroxy-2-pyrrolidinyl)methyl ester
tgatacttctttgaatgtaga

SEQ ID NO: 1979 - RNA, 23 nt, synthetic construct
  source 1..23: mol_type = other RNA
  modified_base 1: mod_base = OTHER; note = 2'-O-methyluridine-3'-phosphorothioate
  modified_base 2: mod_base = OTHER; note = 2'-deoxy-2'-fluorocytidine-3'-phosphorothioate
  modified_base 3: mod_base = OTHER; note = 2'-O-methyluridine-3'-phosphate
  modified_base 4: mod_base = OTHER; note = 2'-O-methyladenosine-3'-phosphate
  modified_base 5: mod_base = OTHER; note = 2'-O-methylcytidine-3'-phosphate
  modified_base 6: mod_base = OTHER; note = 2'-deoxy-2'-fluoroadenosine-3'-phosphate
  modified_base 7: mod_base = OTHER; note = 2'-O-methyluridine-3'-phosphate
  modified_base 8: mod_base = OTHER; note = 2'-deoxy-2'-fluorouridine-3'-phosphate
  modified_base 9: mod_base = OTHER; note = 2'-deoxy-2'-fluorocytidine-3'-phosphate
  modified_base 10: mod_base = OTHER; note = 2'-O-methyladenosine-3'-phosphate
  modified_base 11: mod_base = OTHER; note = 2'-O-methyladenosine-3'-phosphate
  modified_base 12: mod_base = OTHER; note = 2'-O-methyladenosine-3'-phosphate
  modified_base 13: mod_base = OTHER; note = 2'-O-methylguanosine-3'-phosphate
  modified_base 14: mod_base = OTHER; note = 2'-deoxy-2'-fluoroadenosine-3'-phosphate
  modified_base 15: mod_base = OTHER; note = 2'-O-methyladenosine-3'-phosphate
  modified_base 16: mod_base = OTHER; note = 2'-deoxy-2'-fluoroguanosine-3'-phosphate
  modified_base 17: mod_base = OTHER; note = 2'-O-methyluridine-3'-phosphate
  modified_base 18: mod_base = OTHER; note = 2'-O-methyladenosine-3'-phosphate
  modified_base 19: mod_base = OTHER; note = 2'-O-methyluridine-3'-phosphate
  modified_base 20: mod_base = OTHER; note = 2'-O-methylcytidine-3'-phosphate
  modified_base 21: mod_base = OTHER; note = 2'-O-methyladenosine-3'-phosphorothioate
  modified_base 22: mod_base = OTHER; note = 2'-O-methylcytidine-3'-phosphorothioate
  modified_base 23: mod_base = OTHER; note = 2'-O-methylcytidine
tctacattcaaagaagtatcacc

SEQ ID NO: 1980 - RNA, 21 nt, synthetic construct
  source 1..21: mol_type = other RNA
  modified_base 1: mod_base = OTHER; note = 2'-O-methylguanosine-3'-phosphorothioate
  modified_base 2: mod_base = OTHER; note = 2'-O-methyladenosine-3'-phosphorothioate
  modified_base 3: mod_base = OTHER; note = 2'-O-methyluridine-3'-phosphate
  modified_base 4: mod_base = OTHER; note = 2'-O-methyladenosine-3'-phosphate
  modified_base 5: mod_base = OTHER; note = 2'-O-methylcytidine-3'-phosphate
  modified_base 6: mod_base = OTHER; note = 2'-O-methyluridine-3'-phosphate
  modified_base 7: mod_base = OTHER; note = 2'-deoxy-2'-fluorouridine-3'-phosphate
  modified_base 8: mod_base = OTHER; note = 2'-O-methylcytidine-3'-phosphate
  modified_base 9: mod_base = OTHER; note = 2'-deoxy-2'-fluorouridine-3'-phosphate
  modified_base 10: mod_base = OTHER; note = 2'-deoxy-2'-fluorouridine-3'-phosphate
  modified_base 11: mod_base = OTHER; note = 2'-deoxy-2'-fluorouridine-3'-phosphate
  modified_base 12: mod_base = OTHER; note = 2'-O-methylguanosine-3'-phosphate
  modified_base 13: mod_base = OTHER; note = 2'-O-methyladenosine-3'-phosphate
  modified_base 14: mod_base = OTHER; note = 2'-O-methyladenosine-3'-phosphate
  modified_base 15: mod_base = OTHER; note = 2'-O-methyluridine-3'-phosphate
  modified_base 16: mod_base = OTHER; note = 2'-O-methylguanosine-3'-phosphate
  modified_base 17: mod_base = OTHER; note = 2'-O-methyluridine-3'-phosphate
  modified_base 18: mod_base = OTHER; note = 2'-O-methyladenosine-3'-phosphate
  modified_base 19: mod_base = OTHER; note = 2'-O-methylguanosine-3'-phosphate
  modified_base 20: mod_base = OTHER; note = 2'-O-methyladenosine-3'-phosphate
  modified_base 21: mod_base = OTHER; note = 2'-O-methyluridine-3'-phosphate ((2S,4R)-1-[29-[[2-(acetylamino)-2-deoxy-beta-D-galactopyra nosyl]oxy]-14,14-bis[[3-[[3-[[5-[[2-(acetylamino)-2-deoxy-b eta-D-galactopyranosyl]oxy]-1-oxopentyl]amino]propyl]amino] -3-oxopropoxy]methyl]-1,12,19,25-tetraoxo-16-oxa-13,20,24-t riazanonacos-1-yl]-4-hydroxy-2-pyrrolidinyl)methyl ester
gatacttctttgaatgtagat

SEQ ID NO: 1981 - RNA, 23 nt, synthetic construct
  source 1..23: mol_type = other RNA
  modified_base 1: mod_base = OTHER; note = 2'-O-methyladenosine-3'-phosphorothioate
  modified_base 2: mod_base = OTHER; note = 2'-deoxy-2'-fluorouridine-3'-phosphorothioate
  modified_base 3: mod_base = OTHER; note = 2'-O-methylcytidine-3'-phosphate
  modified_base 4: mod_base = OTHER; note = 2'-O-methyluridine-3'-phosphate
  modified_base 5: mod_base = OTHER; note = 2'-O-methyladenosine-3'-phosphate
  modified_base 6: mod_base = OTHER; note = 2'-deoxy-2'-fluorocytidine-3'-phosphate
  modified_base 7: mod_base = OTHER; note = 2'-O-methyladenosine-3'-phosphate
  modified_base 8: mod_base = OTHER; note = 2'-deoxy-2'-fluorouridine-3'-phosphate
  modified_base 9: mod_base = OTHER; note = 2'-deoxy-2'-fluorouridine-3'-phosphate
  modified_base 10: mod_base = OTHER; note = 2'-O-methylcytidine-3'-phosphate
  modified_base 11: mod_base = OTHER; note = 2'-O-methyladenosine-3'-phosphate
  modified_base 12: mod_base = OTHER; note = 2'-O-methyladenosine-3'-phosphate
  modified_base 13: mod_base = OTHER; note = 2'-O-methyladenosine-3'-phosphate
  modified_base 14: mod_base = OTHER; note = 2'-deoxy-2'-fluoroguanosine-3'-phosphate
  modified_base 15: mod_base = OTHER; note = 2'-O-methyladenosine-3'-phosphate
  modified_base 16: mod_base = OTHER; note = 2'-deoxy-2'-fluoroadenosine-3'-phosphate
  modified_base 17: mod_base = OTHER; note = 2'-O-methylguanosine-3'-phosphate
  modified_base 18: mod_base = OTHER; note = 2'-O-methyluridine-3'-phosphate
  modified_base 19: mod_base = OTHER; note = 2'-O-methyladenosine-3'-phosphate
  modified_base 20: mod_base = OTHER; note = 2'-O-methyluridine-3'-phosphate
  modified_base 21: mod_base = OTHER; note = 2'-O-methylcytidine-3'-phosphorothioate
  modified_base 22: mod_base = OTHER; note = 2'-O-methyladenosine-3'-phosphorothioate
  modified_base 23: mod_base = OTHER; note = 2'-O-methylcytidine
atctacattcaaagaagtatcac

SEQ ID NO: 1982 - RNA, 21 nt, synthetic construct
  source 1..21: mol_type = other RNA
  modified_base 1: mod_base = OTHER; note = 2'-O-methyluridine-3'-phosphorothioate
  modified_base 2: mod_base = OTHER; note = 2'-O-methyluridine-3'-phosphorothioate
  modified_base 3: mod_base = OTHER; note = 2'-O-methylguanosine-3'-phosphate
  modified_base 4: mod_base = OTHER; note = 2'-O-methylguanosine-3'-phosphate
  modified_base 5: mod_base = OTHER; note = 2'-O-methyluridine-3'-phosphate
  modified_base 6: mod_base = OTHER; note = 2'-O-methylguanosine-3'-phosphate
  modified_base 7: mod_base = OTHER; note = 2'-deoxy-2'-fluoroadenosine-3'-phosphate
  modified_base 8: mod_base = OTHER; note = 2'-O-methyluridine-3'-phosphate
  modified_base 9: mod_base = OTHER; note = 2'-deoxy-2'-fluoroadenosine-3'-phosphate
  modified_base 10: mod_base = OTHER; note = 2'-deoxy-2'-fluorocytidine-3'-phosphate
  modified_base 11: mod_base = OTHER; note = 2'-deoxy-2'-fluorouridine-3'-phosphate
  modified_base 12: mod_base = OTHER; note = 2'-O-methyluridine-3'-phosphate
  modified_base 13: mod_base = OTHER; note = 2'-O-methylcytidine-3'-phosphate
  modified_base 14: mod_base = OTHER; note = 2'-O-methyluridine-3'-phosphate
  modified_base 15: mod_base = OTHER; note = 2'-O-methyluridine-3'-phosphate
  modified_base 16: mod_base = OTHER; note = 2'-O-methyluridine-3'-phosphate
  modified_base 17: mod_base = OTHER; note = 2'-O-methylguanosine-3'-phosphate
  modified_base 18: mod_base = OTHER; note = 2'-O-methyladenosine-3'-phosphate
  modified_base 19: mod_base = OTHER; note = 2'-O-methyladenosine-3'-phosphate
  modified_base 20: mod_base = OTHER; note = 2'-O-methyluridine-3'-phosphate
  modified_base 21: mod_base = OTHER; note = 2'-O-methylguanosine-3'-phosphate ((2S,4R)-1-[29-[[2-(acetylamino)-2-deoxy-beta-D-galactopyra nosyl]oxy]-14,14-bis[[3-[[3-[[5-[[2-(acetylamino)-2-deoxy-b eta-D-galactopyranosyl]oxy]-1-oxopentyl]amino]propyl]amino] -3-oxopropoxy]methyl]-1,12,19,25-tetraoxo-16-oxa-13,20,24-t riazanonacos-1-yl]-4-hydroxy-2-pyrrolidinyl)methyl ester
ttggtgatacttctttgaatg

SEQ ID NO: 1983 - RNA, 23 nt, synthetic construct
  source 1..23: mol_type = other RNA
  modified_base 1: mod_base = OTHER; note = 2'-O-methylcytidine-3'-phosphorothioate
  modified_base 2: mod_base = OTHER; note = 2'-deoxy-2'-fluoroadenosine-3'-phosphorothioate
  modified_base 3: mod_base = OTHER; note = 2'-O-methyluridine-3'-phosphate
  modified_base 4: mod_base = OTHER; note = 2'-O-methyluridine-3'-phosphate
  modified_base 5: mod_base = OTHER; note = 2'-O-methylcytidine-3'-phosphate
  modified_base 6: mod_base = OTHER; note = 2'-deoxy-2'-fluoroadenosine-3'-phosphate
  modified_base 7: mod_base = OTHER; note = 2'-O-methyladenosine-3'-phosphate
  modified_base 8: mod_base = OTHER; note = 2'-deoxy-2'-fluoroadenosine-3'-phosphate
  modified_base 9: mod_base = OTHER; note = 2'-deoxy-2'-fluoroguanosine-3'-phosphate
  modified_base 10: mod_base = OTHER; note = 2'-O-methyladenosine-3'-phosphate
  modified_base 11: mod_base = OTHER; note = 2'-O-methyladenosine-3'-phosphate
  modified_base 12: mod_base = OTHER; note = 2'-O-methylguanosine-3'-phosphate
  modified_base 13: mod_base = OTHER; note = 2'-O-methyluridine-3'-phosphate
  modified_base 14: mod_base = OTHER; note = 2'-deoxy-2'-fluoroadenosine-3'-phosphate
  modified_base 15: mod_base = OTHER; note = 2'-O-methyluridine-3'-phosphate
  modified_base 16: mod_base = OTHER; note = 2'-deoxy-2'-fluorocytidine-3'-phosphate
  modified_base 17: mod_base = OTHER; note = 2'-O-methyladenosine-3'-phosphate
  modified_base 18: mod_base = OTHER; note = 2'-O-methylcytidine-3'-phosphate
  modified_base 19: mod_base = OTHER; note = 2'-O-methylcytidine-3'-phosphate
  modified_base 20: mod_base = OTHER; note = 2'-O-methyladenosine-3'-phosphate
  modified_base 21: mod_base = OTHER; note = 2'-O-methyladenosine-3'-phosphorothioate
  modified_base 22: mod_base = OTHER; note = 2'-O-methyluridine-3'-phosphorothioate
  modified_base 23: mod_base = OTHER; note = 2'-O-methyluridine
cattcaaagaagtatcaccaatt

SEQ ID NO: 1984 - RNA, 21 nt, synthetic construct
  source 1..21: mol_type = other RNA
  modified_base 1: mod_base = OTHER; note = 2'-O-methyladenosine-3'-phosphorothioate
  modified_base 2: mod_base = OTHER; note = 2'-O-methyluridine-3'-phosphorothioate
  modified_base 3: mod_base = OTHER; note = 2'-O-methyluridine-3'-phosphate
  modified_base 4: mod_base = OTHER; note = 2'-O-methylguanosine-3'-phosphate
  modified_base 5: mod_base = OTHER; note = 2'-O-methylguanosine-3'-phosphate
  modified_base 6: mod_base = OTHER; note = 2'-O-methyluridine-3'-phosphate
  modified_base 7: mod_base = OTHER; note = 2'-deoxy-2'-fluoroguanosine-3'-phosphate
  modified_base 8: mod_base = OTHER; note = 2'-O-methyladenosine-3'-phosphate
  modified_base 9: mod_base = OTHER; note = 2'-deoxy-2'-fluorouridine-3'-phosphate
  modified_base 10: mod_base = OTHER; note = 2'-deoxy-2'-fluoroadenosine-3'-phosphate
  modified_base 11: mod_base = OTHER; note = 2'-deoxy-2'-fluorocytidine-3'-phosphate
  modified_base 12: mod_base = OTHER; note = 2'-O-methyluridine-3'-phosphate
  modified_base 13: mod_base = OTHER; note = 2'-O-methyluridine-3'-phosphate
  modified_base 14: mod_base = OTHER; note = 2'-O-methylcytidine-3'-phosphate
  modified_base 15: mod_base = OTHER; note = 2'-O-methyluridine-3'-phosphate
  modified_base 16: mod_base = OTHER; note = 2'-O-methyluridine-3'-phosphate
  modified_base 17: mod_base = OTHER; note = 2'-O-methyluridine-3'-phosphate
  modified_base 18: mod_base = OTHER; note = 2'-O-methylguanosine-3'-phosphate
  modified_base 19: mod_base = OTHER; note = 2'-O-methyladenosine-3'-phosphate
  modified_base 20: mod_base = OTHER; note = 2'-O-methyladenosine-3'-phosphate
  modified_base 21: mod_base = OTHER; note = 2'-O-methyluridine-3'-phosphate ((2S,4R)-1-[29-[[2-(acetylamino)-2-deoxy-beta-D-galactopyra nosyl]oxy]-14,14-bis[[3-[[3-[[5-[[2-(acetylamino)-2-deoxy-b eta-D-galactopyranosyl]oxy]-1-oxopentyl]amino]propyl]amino] -3-oxopropoxy]methyl]-1,12,19,25-tetraoxo-16-oxa-13,20,24-t riazanonacos-1-yl]-4-hydroxy-2-pyrrolidinyl)methyl ester
attggtgatacttctttgaat

SEQ ID NO: 1985 - RNA, 23 nt, synthetic construct
  source 1..23: mol_type = other RNA
  modified_base 1: mod_base = OTHER; note = 2'-O-methyladenosine-3'-phosphorothioate
  modified_base 2: mod_base = OTHER; note = 2'-deoxy-2'-fluorouridine-3'-phosphorothioate
  modified_base 3: mod_base = OTHER; note = 2'-O-methyluridine-3'-phosphate
  modified_base 4: mod_base = OTHER; note = 2'-O-methylcytidine-3'-phosphate
  modified_base 5: mod_base = OTHER; note = 2'-O-methyladenosine-3'-phosphate
  modified_base 6: mod_base = OTHER; note = 2'-deoxy-2'-fluoroadenosine-3'-phosphate
  modified_base 7: mod_base = OTHER; note = 2'-O-methyladenosine-3'-phosphate
  modified_base 8: mod_base = OTHER; note = 2'-deoxy-2'-fluoroguanosine-3'-phosphate
  modified_base 9: mod_base = OTHER; note = 2'-deoxy-2'-fluoroadenosine-3'-phosphate
  modified_base 10: mod_base = OTHER; note = 2'-O-methyladenosine-3'-phosphate
  modified_base 11: mod_base = OTHER; note = 2'-O-methylguanosine-3'-phosphate
  modified_base 12: mod_base = OTHER; note = 2'-O-methyluridine-3'-phosphate
  modified_base 13: mod_base = OTHER; note = 2'-O-methyladenosine-3'-phosphate
  modified_base 14: mod_base = OTHER; note = 2'-deoxy-2'-fluorouridine-3'-phosphate
  modified_base 15: mod_base = OTHER; note = 2'-O-methylcytidine-3'-phosphate
  modified_base 16: mod_base = OTHER; note = 2'-deoxy-2'-fluoroadenosine-3'-phosphate
  modified_base 17: mod_base = OTHER; note = 2'-O-methylcytidine-3'-phosphate
  modified_base 18: mod_base = OTHER; note = 2'-O-methylcytidine-3'-phosphate
  modified_base 19: mod_base = OTHER; note = 2'-O-methyladenosine-3'-phosphate
  modified_base 20: mod_base = OTHER; note = 2'-O-methyladenosine-3'-phosphate
  modified_base 21: mod_base = OTHER; note = 2'-O-methyluridine-3'-phosphorothioate
  modified_base 22: mod_base = OTHER; note = 2'-O-methyluridine-3'-phosphorothioate
  modified_base 23: mod_base = OTHER; note = 2'-O-methyladenosine
attcaaagaagtatcaccaatta

SEQ ID NO: 1986 - RNA, 21 nt, synthetic construct
  source 1..21: mol_type = other RNA
  modified_base 1: mod_base = OTHER; note = 2'-O-methyladenosine-3'-phosphorothioate
  modified_base 2: mod_base = OTHER; note = 2'-O-methyladenosine-3'-phosphorothioate
  modified_base 3: mod_base = OTHER; note = 2'-O-methyluridine-3'-phosphate
  modified_base 4: mod_base = OTHER; note = 2'-O-methyladenosine-3'-phosphate
  modified_base 5: mod_base = OTHER; note = 2'-O-methyladenosine-3'-phosphate
  modified_base 6: mod_base = OTHER; note = 2'-O-methylcytidine-3'-phosphate
  modified_base 7: mod_base = OTHER; note = 2'-deoxy-2'-fluorocytidine-3'-phosphate
  modified_base 8: mod_base = OTHER; note = 2'-O-methyluridine-3'-phosphate
  modified_base 9: mod_base = OTHER; note = 2'-deoxy-2'-fluoroguanosine-3'-phosphate
  modified_base 10: mod_base = OTHER; note = 2'-deoxy-2'-fluorouridine-3'-phosphate
  modified_base 11: mod_base = OTHER; note = 2'-deoxy-2'-fluoroguanosine-3'-phosphate
  modified_base 12: mod_base = OTHER; note = 2'-O-methyladenosine-3'-phosphate
  modified_base 13: mod_base = OTHER; note = 2'-O-methyladenosine-3'-phosphate
  modified_base 14: mod_base = OTHER; note = 2'-O-methyladenosine-3'-phosphate
  modified_base 15: mod_base = OTHER; note = 2'-O-methyladenosine-3'-phosphate
  modified_base 16: mod_base = OTHER; note = 2'-O-methyluridine-3'-phosphate
  modified_base 17: mod_base = OTHER; note = 2'-O-methylguanosine-3'-phosphate
  modified_base 18: mod_base = OTHER; note = 2'-O-methylcytidine-3'-phosphate
  modified_base 19: mod_base = OTHER; note = 2'-O-methyluridine-3'-phosphate
  modified_base 20: mod_base = OTHER; note = 2'-O-methylcytidine-3'-phosphate
  modified_base 21: mod_base = OTHER; note = 2'-O-methylcytidine-3'-phosphate ((2S,4R)-1-[29-[[2-(acetylamino)-2-deoxy-beta-D-galactopyra nosyl]oxy]-14,14-bis[[3-[[3-[[5-[[2-(acetylamino)-2-deoxy-b eta-D-galactopyranosyl]oxy]-1-oxopentyl]amino]propyl]amino] -3-oxopropoxy]methyl]-1,12,19,25-tetraoxo-16-oxa-13,20,24-t riazanonacos-1-yl]-4-hydroxy-2-pyrrolidinyl)methyl ester
aataacctgtgaaaatgctcc

SEQ ID NO: 1987 - RNA, 23 nt, synthetic construct
  source 1..23: mol_type = other RNA
  modified_base 1: mod_base = OTHER; note = 2'-O-methylguanosine-3'-phosphorothioate
  modified_base 2: mod_base = OTHER; note = 2'-deoxy-2'-fluoroguanosine-3'-phosphorothioate
  modified_base 3: mod_base = OTHER; note = 2'-O-methyladenosine-3'-phosphate
  modified_base 4: mod_base = OTHER; note = 2'-O-methylguanosine-3'-phosphate
  modified_base 5: mod_base = OTHER; note = 2'-O-methylcytidine-3'-phosphate
  modified_base 6: mod_base = OTHER; note = 2'-deoxy-2'-fluoroadenosine-3'-phosphate
  modified_base 7: mod_base = OTHER; note = 2'-O-methyluridine-3'-phosphate
  modified_base 8: mod_base = OTHER; note = 2'-deoxy-2'-fluorouridine-3'-phosphate
  modified_base 9: mod_base = OTHER; note = 2'-deoxy-2'-fluorouridine-3'-phosphate
  modified_base 10: mod_base = OTHER; note = 2'-O-methyluridine-3'-phosphate
  modified_base 11: mod_base = OTHER; note = 2'-O-methylcytidine-3'-phosphate
  modified_base 12: mod_base = OTHER; note = 2'-O-methyladenosine-3'-phosphate
  modified_base 13: mod_base = OTHER; note = 2'-O-methylcytidine-3'-phosphate
  modified_base 14: mod_base = OTHER; note = 2'-deoxy-2'-fluoroadenosine-3'-phosphate
  modified_base 15: mod_base = OTHER; note = 2'-O-methylguanosine-3'-phosphate
  modified_base 16: mod_base = OTHER; note = 2'-deoxy-2'-fluoroguanosine-3'-phosphate
  modified_base 17: mod_base = OTHER; note = 2'-O-methyluridine-3'-phosphate
  modified_base 18: mod_base = OTHER; note = 2'-O-methyluridine-3'-phosphate
  modified_base 19: mod_base = OTHER; note = 2'-O-methyladenosine-3'-phosphate
  modified_base 20: mod_base = OTHER; note = 2'-O-methyluridine-3'-phosphate
  modified_base 21: mod_base = OTHER; note = 2'-O-methyluridine-3'-phosphorothioate
  modified_base 22: mod_base = OTHER; note = 2'-O-methylguanosine-3'-phosphorothioate
  modified_base 23: mod_base = OTHER; note = 2'-O-methylcytidine
ggagcattttcacaggttattgc

SEQ ID NO: 1988 - RNA, 21 nt, synthetic construct
  source 1..21: mol_type = other RNA
  modified_base 1: mod_base = OTHER; note = 2'-O-methyladenosine-3'-phosphorothioate
  modified_base 2: mod_base = OTHER; note = 2'-O-methyluridine-3'-phosphorothioate
  modified_base 3: mod_base = OTHER; note = 2'-O-methyladenosine-3'-phosphate
  modified_base 4: mod_base = OTHER; note = 2'-O-methyladenosine-3'-phosphate
  modified_base 5: mod_base = OTHER; note = 2'-O-methylcytidine-3'-phosphate
  modified_base 6: mod_base = OTHER; note = 2'-O-methylcytidine-3'-phosphate
  modified_base 7: mod_base = OTHER; note = 2'-deoxy-2'-fluorouridine-3'-phosphate
  modified_base 8: mod_base = OTHER; note = 2'-O-methylguanosine-3'-phosphate
  modified_base 9: mod_base = OTHER; note = 2'-deoxy-2'-fluorouridine-3'-phosphate
  modified_base 10: mod_base = OTHER; note = 2'-deoxy-2'-fluoroguanosine-3'-phosphate
  modified_base 11: mod_base = OTHER; note = 2'-deoxy-2'-fluoroadenosine-3'-phosphate
  modified_base 12: mod_base = OTHER; note = 2'-O-methyladenosine-3'-phosphate
  modified_base 13: mod_base = OTHER; note = 2'-O-methyladenosine-3'-phosphate
  modified_base 14: mod_base = OTHER; note = 2'-O-methyladenosine-3'-phosphate
  modified_base 15: mod_base = OTHER; note = 2'-O-methyluridine-3'-phosphate
  modified_base 16: mod_base = OTHER; note = 2'-O-methylguanosine-3'-phosphate
  modified_base 17: mod_base = OTHER; note = 2'-O-methylcytidine-3'-phosphate
  modified_base 18: mod_base = OTHER; note = 2'-O-methyluridine-3'-phosphate
  modified_base 19: mod_base = OTHER; note = 2'-O-methylcytidine-3'-phosphate
  modified_base 20: mod_base = OTHER; note = 2'-O-methylcytidine-3'-phosphate
  modified_base 21: mod_base = OTHER; note = 2'-O-methylcytidine-3'-phosphate ((2S,4R)-1-[29-[[2-(acetylamino)-2-deoxy-beta-D-galactopyra nosyl]oxy]-14,14-bis[[3-[[3-[[5-[[2-(acetylamino)-2-deoxy-b eta-D-galactopyranosyl]oxy]-1-oxopentyl]amino]propyl]amino] -3-oxopropoxy]methyl]-1,12,19,25-tetraoxo-16-oxa-13,20,24-t riazanonacos-1-yl]-4-hydroxy-2-pyrrolidinyl)methyl ester
ataacctgtgaaaatgctccc

SEQ ID NO: 1989 - RNA, 23 nt, synthetic construct
  source 1..23: mol_type = other RNA
  modified_base 1: mod_base = OTHER; note = 2'-O-methylguanosine-3'-phosphorothioate
  modified_base 2: mod_base = OTHER; note = 2'-deoxy-2'-fluoroguanosine-3'-phosphorothioate
  modified_base 3: mod_base = OTHER; note = 2'-O-methylguanosine-3'-phosphate
  modified_base 4: mod_base = OTHER; note = 2'-O-methyladenosine-3'-phosphate
  modified_base 5: mod_base = OTHER; note = 2'-O-methylguanosine-3'-phosphate
  modified_base 6: mod_base = OTHER; note = 2'-deoxy-2'-fluorocytidine-3'-phosphate
  modified_base 7: mod_base = OTHER; note = 2'-O-methyladenosine-3'-phosphate
  modified_base 8: mod_base = OTHER; note = 2'-deoxy-2'-fluorouridine-3'-phosphate
  modified_base 9: mod_base = OTHER; note = 2'-deoxy-2'-fluorouridine-3'-phosphate
  modified_base 10: mod_base = OTHER; note = 2'-O-methyluridine-3'-phosphate
  modified_base 11: mod_base = OTHER; note = 2'-O-methyluridine-3'-phosphate
  modified_base 12: mod_base = OTHER; note = 2'-O-methylcytidine-3'-phosphate
  modified_base 13: mod_base = OTHER; note = 2'-O-methyladenosine-3'-phosphate
  modified_base 14: mod_base = OTHER; note = 2'-deoxy-2'-fluorocytidine-3'-phosphate
  modified_base 15: mod_base = OTHER; note = 2'-O-methyladenosine-3'-phosphate
  modified_base 16: mod_base = OTHER; note = 2'-deoxy-2'-fluoroguanosine-3'-phosphate
  modified_base 17: mod_base = OTHER; note = 2'-O-methylguanosine-3'-phosphate
  modified_base 18: mod_base = OTHER; note = 2'-O-methyluridine-3'-phosphate
  modified_base 19: mod_base = OTHER; note = 2'-O-methyluridine-3'-phosphate
  modified_base 20: mod_base = OTHER; note = 2'-O-methyladenosine-3'-phosphate
  modified_base 21: mod_base = OTHER; note = 2'-O-methyluridine-3'-phosphorothioate
  modified_base 22: mod_base = OTHER; note = 2'-O-methyluridine-3'-phosphorothioate
  modified_base 23: mod_base = OTHER; note = 2'-O-methylguanosine
gggagcattttcacaggttattg

SEQ ID NO: 1990 - RNA, 21 nt, synthetic construct
  source 1..21: mol_type = other RNA
  modified_base 1: mod_base = OTHER; note = 2'-O-methyluridine-3'-phosphorothioate
  modified_base 2: mod_base = OTHER; note = 2'-O-methyladenosine-3'-phosphorothioate
  modified_base 3: mod_base = OTHER; note = 2'-O-methylguanosine-3'-phosphate
  modified_base 4: mod_base = OTHER; note = 2'-O-methylcytidine-3'-phosphate
  modified_base 5: mod_base = OTHER; note = 2'-O-methyladenosine-3'-phosphate
  modified_base 6: mod_base = OTHER; note = 2'-O-methyladenosine-3'-phosphate
  modified_base 7: mod_base = OTHER; note = 2'-deoxy-2'-fluorouridine-3'-phosphate
  modified_base 8: mod_base = OTHER; note = 2'-O-methyladenosine-3'-phosphate
  modified_base 9: mod_base = OTHER; note = 2'-deoxy-2'-fluoroadenosine-3'-phosphate
  modified_base 10: mod_base = OTHER; note = 2'-deoxy-2'-fluorocytidine-3'-phosphate
  modified_base 11: mod_base = OTHER; note = 2'-deoxy-2'-fluorocytidine-3'-phosphate
  modified_base 12: mod_base = OTHER; note = 2'-O-methyluridine-3'-phosphate
  modified_base 13: mod_base = OTHER; note = 2'-O-methylguanosine-3'-phosphate
  modified_base 14: mod_base = OTHER; note = 2'-O-methyluridine-3'-phosphate
  modified_base 15: mod_base = OTHER; note = 2'-O-methylguanosine-3'-phosphate
  modified_base 16: mod_base = OTHER; note = 2'-O-methyladenosine-3'-phosphate
  modified_base 17: mod_base = OTHER; note = 2'-O-methyladenosine-3'-phosphate
  modified_base 18: mod_base = OTHER; note = 2'-O-methyladenosine-3'-phosphate
  modified_base 19: mod_base = OTHER; note = 2'-O-methyladenosine-3'-phosphate
  modified_base 20: mod_base = OTHER; note = 2'-O-methyluridine-3'-phosphate
  modified_base 21: mod_base = OTHER; note = 2'-O-methylguanosine-3'-phosphate ((2S,4R)-1-[29-[[2-(acetylamino)-2-deoxy-beta-D-galactopyra nosyl]oxy]-14,14-bis[[3-[[3-[[5-[[2-(acetylamino)-2-deoxy-b eta-D-galactopyranosyl]oxy]-1-oxopentyl]amino]propyl]amino] -3-oxopropoxy]methyl]-1,12,19,25-tetraoxo-16-oxa-13,20,24-t riazanonacos-1-yl]-4-hydroxy-2-pyrrolidinyl)methyl ester
tagcaataacctgtgaaaatg

SEQ ID NO: 1991 - RNA, 23 nt, synthetic construct
  source 1..23: mol_type = other RNA
  modified_base 1: mod_base = OTHER; note = 2'-O-methylcytidine-3'-phosphorothioate
  modified_base 2: mod_base = OTHER; note = 2'-deoxy-2'-fluoroadenosine-3'-phosphorothioate
  modified_base 3: mod_base = OTHER; note = 2'-O-methyluridine-3'-phosphate
  modified_base 4: mod_base = OTHER; note = 2'-O-methyluridine-3'-phosphate
  modified_base 5: mod_base = OTHER; note = 2'-O-methyluridine-3'-phosphate
  modified_base 6: mod_base = OTHER; note = 2'-deoxy-2'-fluorouridine-3'-phosphate
  modified_base 7: mod_base = OTHER; note = 2'-O-methylcytidine-3'-phosphate
  modified_base 8: mod_base = OTHER; note = 2'-deoxy-2'-fluoroadenosine-3'-phosphate
  modified_base 9: mod_base = OTHER; note = 2'-deoxy-2'-fluorocytidine-3'-phosphate
  modified_base 10: mod_base = OTHER; note = 2'-O-methyladenosine-3'-phosphate
  modified_base 11: mod_base = OTHER; note = 2'-O-methylguanosine-3'-phosphate
  modified_base 12: mod_base = OTHER; note = 2'-O-methylguanosine-3'-phosphate
  modified_base 13: mod_base = OTHER; note = 2'-O-methyluridine-3'-phosphate
  modified_base 14: mod_base = OTHER; note = 2'-deoxy-2'-fluorouridine-3'-phosphate
  modified_base 15: mod_base = OTHER; note = 2'-O-methyladenosine-3'-phosphate
  modified_base 16: mod_base = OTHER; note = 2'-deoxy-2'-fluorouridine-3'-phosphate
  modified_base 17: mod_base = OTHER; note = 2'-O-methyluridine-3'-phosphate
  modified_base 18: mod_base = OTHER; note = 2'-O-methylguanosine-3'-phosphate
  modified_base 19: mod_base = OTHER; note = 2'-O-methylcytidine-3'-phosphate
  modified_base 20: mod_base = OTHER; note = 2'-O-methyluridine-3'-phosphate
  modified_base 21: mod_base = OTHER; note = 2'-O-methyladenosine-3'-phosphorothioate
  modified_base 22: mod_base = OTHER; note = 2'-O-methyluridine-3'-phosphorothioate
  modified_base 23: mod_base = OTHER; note = 2'-O-methylcytidine
cattttcacaggttattgctatc

SEQ ID NO: 1992 - RNA, 21 nt, synthetic construct
  source 1..21: mol_type = other RNA
  modified_base 1: mod_base = OTHER; note = 2'-O-methyladenosine-3'-phosphorothioate
  modified_base 2: mod_base = OTHER; note = 2'-O-methyluridine-3'-phosphorothioate
  modified_base 3: mod_base = OTHER; note = 2'-O-methyladenosine-3'-phosphate
  modified_base 4: mod_base = OTHER; note = 2'-O-methylguanosine-3'-phosphate
  modified_base 5: mod_base = OTHER; note = 2'-O-methylcytidine-3'-phosphate
  modified_base 6: mod_base = OTHER; note = 2'-O-methyladenosine-3'-phosphate
  modified_base 7: mod_base = OTHER; note = 2'-deoxy-2'-fluoroadenosine-3'-phosphate
  modified_base 8: mod_base = OTHER; note = 2'-O-methyluridine-3'-phosphate
  modified_base 9: mod_base = OTHER; note = 2'-deoxy-2'-fluoroadenosine-3'-phosphate
  modified_base 10: mod_base = OTHER; note = 2'-deoxy-2'-fluoroadenosine-3'-phosphate
  modified_base 11: mod_base = OTHER; note = 2'-deoxy-2'-fluorocytidine-3'-phosphate
  modified_base 12: mod_base = OTHER; note = 2'-O-methylcytidine-3'-phosphate
  modified_base 13: mod_base = OTHER; note = 2'-O-methyluridine-3'-phosphate
  modified_base 14: mod_base = OTHER; note = 2'-O-methylguanosine-3'-phosphate
  modified_base 15: mod_base = OTHER; note = 2'-O-methyluridine-3'-phosphate
  modified_base 16: mod_base = OTHER; note = 2'-O-methylguanosine-3'-phosphate
  modified_base 17: mod_base = OTHER; note = 2'-O-methyladenosine-3'-phosphate
  modified_base 18: mod_base = OTHER; note = 2'-O-methyladenosine-3'-phosphate
  modified_base 19: mod_base = OTHER; note = 2'-O-methyladenosine-3'-phosphate
  modified_base 20: mod_base = OTHER; note = 2'-O-methyladenosine-3'-phosphate
  modified_base 21: mod_base = OTHER; note = 2'-O-methyluridine-3'-phosphate ((2S,4R)-1-[29-[[2-(acetylamino)-2-deoxy-beta-D-galactopyra nosyl]oxy]-14,14-bis[[3-[[3-[[5-[[2-(acetylamino)-2-deoxy-b eta-D-galactopyranosyl]oxy]-1-oxopentyl]amino]propyl]amino] -3-oxopropoxy]methyl]-1,12,19,25-tetraoxo-16-oxa-13,20,24-t riazanonacos-1-yl]-4-hydroxy-2-pyrrolidinyl)methyl ester
atagcaataacctgtgaaaat

SEQ ID NO: 1993 - RNA, 23 nt, synthetic construct
  source 1..23: mol_type = other RNA
  modified_base 1: mod_base = OTHER; note = 2'-O-methyladenosine-3'-phosphorothioate
  modified_base 2: mod_base = OTHER; note = 2'-deoxy-2'-fluorouridine-3'-phosphorothioate
  modified_base 3: mod_base = OTHER; note = 2'-O-methyluridine-3'-phosphate
  modified_base 4: mod_base = OTHER; note = 2'-O-methyluridine-3'-phosphate
  modified_base 5: mod_base = OTHER; note = 2'-O-methyluridine-3'-phosphate
  modified_base 6: mod_base = OTHER; note = 2'-deoxy-2'-fluorocytidine-3'-phosphate
  modified_base 7: mod_base = OTHER; note = 2'-O-methyladenosine-3'-phosphate
  modified_base 8: mod_base = OTHER; note = 2'-deoxy-2'-fluorocytidine-3'-phosphate
  modified_base 9: mod_base = OTHER; note = 2'-deoxy-2'-fluoroadenosine-3'-phosphate
  modified_base 10: mod_base = OTHER; note = 2'-O-methylguanosine-3'-phosphate
  modified_base 11: mod_base = OTHER; note = 2'-O-methylguanosine-3'-phosphate
  modified_base 12: mod_base = OTHER; note = 2'-O-methyluridine-3'-phosphate
  modified_base 13: mod_base = OTHER; note = 2'-O-methyluridine-3'-phosphate
  modified_base 14: mod_base = OTHER; note = 2'-deoxy-2'-fluoroadenosine-3'-phosphate
  modified_base 15: mod_base = OTHER; note = 2'-O-methyluridine-3'-phosphate
  modified_base 16: mod_base = OTHER; note = 2'-deoxy-2'-fluorouridine-3'-phosphate
  modified_base 17: mod_base = OTHER; note = 2'-O-methylguanosine-3'-phosphate
  modified_base 18: mod_base = OTHER; note = 2'-O-methylcytidine-3'-phosphate
  modified_base 19: mod_base = OTHER; note = 2'-O-methyluridine-3'-phosphate
  modified_base 20: mod_base = OTHER; note = 2'-O-methyladenosine-3'-phosphate
  modified_base 21: mod_base = OTHER; note = 2'-O-methyluridine-3'-phosphorothioate
  modified_base 22: mod_base = OTHER; note = 2'-O-methylcytidine-3'-phosphorothioate
  modified_base 23: mod_base = OTHER; note = 2'-O-methylcytidine
attttcacaggttattgctatcc

SEQ ID NO: 1994 - RNA, 21 nt, synthetic construct
  source 1..21: mol_type = other RNA
  modified_base 1: mod_base = OTHER; note = 2'-O-methyladenosine-3'-phosphorothioate
  modified_base 2: mod_base = OTHER; note = 2'-O-methyladenosine-3'-phosphorothioate
  modified_base 3: mod_base = OTHER; note = 2'-O-methyluridine-3'-phosphate
  modified_base 4: mod_base = OTHER; note = 2'-O-methylcytidine-3'-phosphate
  modified_base 5: mod_base = OTHER; note = 2'-O-methyladenosine-3'-phosphate
  modified_base 6: mod_base = OTHER; note = 2'-O-methylcytidine-3'-phosphate
  modified_base 7: mod_base = OTHER; note = 2'-deoxy-2'-fluoroadenosine-3'-phosphate
  modified_base 8: mod_base = OTHER; note = 2'-O-methyluridine-3'-phosphate
  modified_base 9: mod_base = OTHER; note = 2'-deoxy-2'-fluorocytidine-3'-phosphate
  modified_base 10: mod_base = OTHER; note = 2'-deoxy-2'-fluorouridine-3'-phosphate
  modified_base 11: mod_base = OTHER; note = 2'-deoxy-2'-fluorouridine-3'-phosphate
  modified_base 12: mod_base = OTHER; note = 2'-O-methyluridine-3'-phosphate
  modified_base 13: mod_base = OTHER; note = 2'-O-methyladenosine-3'-phosphate
  modified_base 14: mod_base = OTHER; note = 2'-O-methylguanosine-3'-phosphate
  modified_base 15: mod_base = OTHER; note = 2'-O-methyluridine-3'-phosphate
  modified_base 16: mod_base = OTHER; note = 2'-O-methylguanosine-3'-phosphate
  modified_base 17: mod_base = OTHER; note = 2'-O-methyluridine-3'-phosphate
  modified_base 18: mod_base = OTHER; note = 2'-O-methylcytidine-3'-phosphate
  modified_base 19: mod_base = OTHER; note = 2'-O-methyluridine-3'-phosphate
  modified_base 20: mod_base = OTHER; note = 2'-O-methylguanosine-3'-phosphate
  modified_base 21: mod_base = OTHER; note = 2'-O-methyladenosine-3'-phosphate ((2S,4R)-1-[29-[[2-(acetylamino)-2-deoxy-beta-D-galactopyra nosyl]oxy]-14,14-bis[[3-[[3-[[5-[[2-(acetylamino)-2-deoxy-b eta-D-galactopyranosyl]oxy]-1-oxopentyl]amino]propyl]amino] -3-oxopropoxy]methyl]-1,12,19,25-tetraoxo-16-oxa-13,20,24-t riazanonacos-1-yl]-4-hydroxy-2-pyrrolidinyl)methyl ester
aatcacatctttagtgtctga

SEQ ID NO: 1995 - RNA, 23 nt, synthetic construct
  source 1..23: mol_type = other RNA
  modified_base 1: mod_base = OTHER; note = 2'-O-methyluridine-3'-phosphorothioate
  modified_base 2: mod_base = OTHER; note = 2'-deoxy-2'-fluorocytidine-3'-phosphorothioate
  modified_base 3: mod_base = OTHER; note = 2'-O-methyladenosine-3'-phosphate
  modified_base 4: mod_base = OTHER; note = 2'-O-methylguanosine-3'-phosphate
  modified_base 5: mod_base = OTHER; note = 2'-O-methyladenosine-3'-phosphate
  modified_base 6: mod_base = OTHER; note = 2'-deoxy-2'-fluorocytidine-3'-phosphate
  modified_base 7: mod_base = OTHER; note = 2'-O-methyladenosine-3'-phosphate
  modified_base 8: mod_base = OTHER; note = 2'-deoxy-2'-fluorocytidine-3'-phosphate
  modified_base 9: mod_base = OTHER; note = 2'-deoxy-2'-fluorouridine-3'-phosphate
  modified_base 10: mod_base = OTHER; note = 2'-O-methyladenosine-3'-phosphate
  modified_base 11: mod_base = OTHER; note = 2'-O-methyladenosine-3'-phosphate
  modified_base 12: mod_base = OTHER; note = 2'-O-methyladenosine-3'-phosphate
  modified_base 13: mod_base = OTHER; note = 2'-O-methylguanosine-3'-phosphate
  modified_base 14: mod_base = OTHER; note = 2'-deoxy-2'-fluoroadenosine-3'-phosphate
  modified_base 15: mod_base = OTHER; note = 2'-O-methyluridine-3'-phosphate
  modified_base 16: mod_base = OTHER; note = 2'-deoxy-2'-fluoroguanosine-3'-phosphate
  modified_base 17: mod_base = OTHER; note = 2'-O-methyluridine-3'-phosphate
  modified_base 18: mod_base = OTHER; note = 2'-O-methylguanosine-3'-phosphate
  modified_base 19: mod_base = OTHER; note = 2'-O-methyladenosine-3'-phosphate
  modified_base 20: mod_base = OTHER; note = 2'-O-methyluridine-3'-phosphate
  modified_base 21: mod_base = OTHER; note = 2'-O-methyluridine-3'-phosphorothioate
  modified_base 22: mod_base = OTHER; note = 2'-O-methylguanosine-3'-phosphorothioate
  modified_base 23: mod_base = OTHER; note = 2'-O-methylguanosine
tcagacactaaagatgtgattgg

SEQ ID NO: 1996 - RNA, 21 nt, synthetic construct
  source 1..21: mol_type = other RNA
  modified_base 1: mod_base = OTHER; note = 2'-O-methyladenosine-3'-phosphorothioate
  modified_base 2: mod_base = OTHER; note = 2'-O-methyluridine-3'-phosphorothioate
  modified_base 3: mod_base = OTHER; note = 2'-O-methylcytidine-3'-phosphate
  modified_base 4: mod_base = OTHER; note = 2'-O-methyladenosine-3'-phosphate
  modified_base 5: mod_base = OTHER; note = 2'-O-methylcytidine-3'-phosphate
  modified_base 6: mod_base = OTHER; note = 2'-O-methyladenosine-3'-phosphate
  modified_base 7: mod_base = OTHER; note = 2'-deoxy-2'-fluorouridine-3'-phosphate
  modified_base 8: mod_base = OTHER; note = 2'-O-methylcytidine-3'-phosphate
  modified_base 9: mod_base = OTHER; note = 2'-deoxy-2'-fluorouridine-3'-phosphate
  modified_base 10: mod_base = OTHER; note = 2'-deoxy-2'-fluorouridine-3'-phosphate
  modified_base 11: mod_base = OTHER; note = 2'-deoxy-2'-fluorouridine-3'-phosphate
  modified_base 12: mod_base = OTHER; note = 2'-O-methyladenosine-3'-phosphate
  modified_base 13: mod_base = OTHER; note = 2'-O-methylguanosine-3'-phosphate
  modified_base 14: mod_base = OTHER; note = 2'-O-methyluridine-3'-phosphate
  modified_base 15: mod_base = OTHER; note = 2'-O-methylguanosine-3'-phosphate
  modified_base 16: mod_base = OTHER; note = 2'-O-methyluridine-3'-phosphate
  modified_base 17: mod_base = OTHER; note = 2'-O-methylcytidine-3'-phosphate
  modified_base 18: mod_base = OTHER; note = 2'-O-methyluridine-3'-phosphate
  modified_base 19: mod_base = OTHER; note = 2'-O-methylguanosine-3'-phosphate
  modified_base 20: mod_base = OTHER; note = 2'-O-methyladenosine-3'-phosphate
  modified_base 21: mod_base = OTHER; note = 2'-O-methyladenosine-3'-phosphate ((2S,4R)-1-[29-[[2-(acetylamino)-2-deoxy-beta-D-galactopyra nosyl]oxy]-14,14-bis[[3-[[3-[[5-[[2-(acetylamino)-2-deoxy-b eta-D-galactopyranosyl]oxy]-1-oxopentyl]amino]propyl]amino] -3-oxopropoxy]methyl]-1,12,19,25-tetraoxo-16-oxa-13,20,24-t riazanonacos-1-yl]-4-hydroxy-2-pyrrolidinyl)methyl ester
atcacatctttagtgtctgaa

SEQ ID NO: 1997 - RNA, 23 nt, synthetic construct
  source 1..23: mol_type = other RNA
  modified_base 1: mod_base = OTHER; note = 2'-O-methyluridine-3'-phosphorothioate
  modified_base 2: mod_base = OTHER; note = 2'-deoxy-2'-fluorouridine-3'-phosphorothioate
  modified_base 3: mod_base = OTHER; note = 2'-O-methylcytidine-3'-phosphate
  modified_base 4: mod_base = OTHER; note = 2'-O-methyladenosine-3'-phosphate
  modified_base 5: mod_base = OTHER; note = 2'-O-methylguanosine-3'-phosphate
  modified_base 6: mod_base = OTHER; note = 2'-deoxy-2'-fluoroadenosine-3'-phosphate
  modified_base 7: mod_base = OTHER; note = 2'-O-methylcytidine-3'-phosphate
  modified_base 8: mod_base = OTHER; note = 2'-deoxy-2'-fluoroadenosine-3'-phosphate
  modified_base 9: mod_base = OTHER; note = 2'-deoxy-2'-fluorocytidine-3'-phosphate
  modified_base 10: mod_base = OTHER; note = 2'-O-methyluridine-3'-phosphate
  modified_base 11: mod_base = OTHER; note = 2'-O-methyladenosine-3'-phosphate
  modified_base 12: mod_base = OTHER; note = 2'-O-methyladenosine-3'-phosphate
  modified_base 13: mod_base = OTHER; note = 2'-O-methyladenosine-3'-phosphate
  modified_base 14: mod_base = OTHER; note = 2'-deoxy-2'-fluoroguanosine-3'-phosphate
  modified_base 15: mod_base = OTHER; note = 2'-O-methyladenosine-3'-phosphate
  modified_base 16: mod_base = OTHER; note = 2'-deoxy-2'-fluorouridine-3'-phosphate
  modified_base 17: mod_base = OTHER; note = 2'-O-methylguanosine-3'-phosphate
  modified_base 18: mod_base = OTHER; note = 2'-O-methyluridine-3'-phosphate
  modified_base 19: mod_base = OTHER; note = 2'-O-methylguanosine-3'-phosphate
  modified_base 20: mod_base = OTHER; note = 2'-O-methyladenosine-3'-phosphate
  modified_base 21: mod_base = OTHER; note = 2'-O-methyluridine-3'-phosphorothioate
  modified_base 22: mod_base = OTHER; note = 2'-O-methyluridine-3'-phosphorothioate
  modified_base 23: mod_base = OTHER; note = 2'-O-methylguanosine
ttcagacactaaagatgtgattg

SEQ ID NO: 1998 - RNA, 21 nt, synthetic construct
  source 1..21: mol_type = other RNA
  modified_base 1: mod_base = OTHER; note = 2'-O-methyluridine-3'-phosphorothioate
  modified_base 2: mod_base = OTHER; note = 2'-O-methyluridine-3'-phosphorothioate
  modified_base 3: mod_base = OTHER; note = 2'-O-methylcytidine-3'-phosphate
  modified_base 4: mod_base = OTHER; note = 2'-O-methylcytidine-3'-phosphate
  modified_base 5: mod_base = OTHER; note = 2'-O-methyladenosine-3'-phosphate
  modified_base 6: mod_base = OTHER; note = 2'-O-methyladenosine-3'-phosphate
  modified_base 7: mod_base = OTHER; note = 2'-deoxy-2'-fluorouridine-3'-phosphate
  modified_base 8: mod_base = OTHER; note = 2'-O-methylcytidine-3'-phosphate
  modified_base 9: mod_base = OTHER; note = 2'-deoxy-2'-fluoroadenosine-3'-phosphate
  modified_base 10: mod_base = OTHER; note = 2'-deoxy-2'-fluorocytidine-3'-phosphate
  modified_base 11: mod_base = OTHER; note = 2'-deoxy-2'-fluoroadenosine-3'-phosphate
  modified_base 12: mod_base = OTHER; note = 2'-O-methyluridine-3'-phosphate
  modified_base 13: mod_base = OTHER; note = 2'-O-methylcytidine-3'-phosphate
  modified_base 14: mod_base = OTHER; note = 2'-O-methyluridine-3'-phosphate
  modified_base 15: mod_base = OTHER; note = 2'-O-methyluridine-3'-phosphate
  modified_base 16: mod_base = OTHER; note = 2'-O-methyluridine-3'-phosphate
  modified_base 17: mod_base = OTHER; note = 2'-O-methyladenosine-3'-phosphate
  modified_base 18: mod_base = OTHER; note = 2'-O-methylguanosine-3'-phosphate
  modified_base 19: mod_base = OTHER; note = 2'-O-methyluridine-3'-phosphate
  modified_base 20: mod_base = OTHER; note = 2'-O-methylguanosine-3'-phosphate
  modified_base 21: mod_base = OTHER; note = 2'-O-methyluridine-3'-phosphate ((2S,4R)-1-[29-[[2-(acetylamino)-2-deoxy-beta-D-galactopyra nosyl]oxy]-14,14-bis[[3-[[3-[[5-[[2-(acetylamino)-2-deoxy-b eta-D-galactopyranosyl]oxy]-1-oxopentyl]amino]propyl]amino] -3-oxopropoxy]methyl]-1,12,19,25-tetraoxo-16-oxa-13,20,24-t riazanonacos-1-yl]-4-hydroxy-2-pyrrolidinyl)methyl ester
ttccaatcacatctttagtgt

SEQ ID NO: 1999 - RNA, 23 nt, synthetic construct
  source 1..23: mol_type = other RNA
  modified_base 1: mod_base = OTHER; note = 2'-O-methyladenosine-3'-phosphorothioate
  modified_base 2: mod_base = OTHER; note = 2'-deoxy-2'-fluorocytidine-3'-phosphorothioate
  modified_base 3: mod_base = OTHER; note = 2'-O-methyladenosine-3'-phosphate
  modified_base 4: mod_base = OTHER; note = 2'-O-methylcytidine-3'-phosphate
  modified_base 5: mod_base = OTHER; note = 2'-O-methyluridine-3'-phosphate
  modified_base 6: mod_base = OTHER; note = 2'-deoxy-2'-fluoroadenosine-3'-phosphate
  modified_base 7: mod_base = OTHER; note = 2'-O-methyladenosine-3'-phosphate
  modified_base 8: mod_base = OTHER; note = 2'-deoxy-2'-fluoroadenosine-3'-phosphate
  modified_base 9: mod_base = OTHER; note = 2'-deoxy-2'-fluoroguanosine-3'-phosphate
  modified_base 10: mod_base = OTHER; note = 2'-O-methyladenosine-3'-phosphate
  modified_base 11: mod_base = OTHER; note = 2'-O-methyluridine-3'-phosphate
  modified_base 12: mod_base = OTHER; note = 2'-O-methylguanosine-3'-phosphate
  modified_base 13: mod_base = OTHER; note = 2'-O-methyluridine-3'-phosphate
  modified_base 14: mod_base = OTHER; note = 2'-deoxy-2'-fluoroguanosine-3'-phosphate
  modified_base 15: mod_base = OTHER; note = 2'-O-methyladenosine-3'-phosphate
  modified_base 16: mod_base = OTHER; note = 2'-deoxy-2'-fluorouridine-3'-phosphate
  modified_base 17: mod_base = OTHER; note = 2'-O-methyluridine-3'-phosphate
  modified_base 18: mod_base = OTHER; note = 2'-O-methylguanosine-3'-phosphate
  modified_base 19: mod_base = OTHER; note = 2'-O-methylguanosine-3'-phosphate
  modified_base 20: mod_base = OTHER; note = 2'-O-methyladenosine-3'-phosphate
  modified_base 21: mod_base = OTHER; note = 2'-O-methyladenosine-3'-phosphorothioate
  modified_base 22: mod_base = OTHER; note = 2'-O-methyladenosine-3'-phosphorothioate
  modified_base 23: mod_base = OTHER; note = 2'-O-methyluridine
acactaaagatgtgattggaaat

SEQ ID NO: 2000 - RNA, 21 nt, synthetic construct
  source 1..21: mol_type = other RNA
  modified_base 1: mod_base = OTHER; note = 2'-O-methyluridine-3'-phosphorothioate
  modified_base 2: mod_base = OTHER; note = 2'-O-methyluridine-3'-phosphorothioate
  modified_base 3: mod_base = OTHER; note = 2'-O-methyluridine-3'-phosphate
  modified_base 4: mod_base = OTHER; note = 2'-O-methylcytidine-3'-phosphate
  modified_base 5: mod_base = OTHER; note = 2'-O-methylcytidine-3'-phosphate
  modified_base 6: mod_base = OTHER; note = 2'-O-methyladenosine-3'-phosphate
  modified_base 7: mod_base = OTHER; note = 2'-deoxy-2'-fluoroadenosine-3'-phosphate
  modified_base 8: mod_base = OTHER; note = 2'-O-methyluridine-3'-phosphate
  modified_base 9: mod_base = OTHER; note = 2'-deoxy-2'-fluorocytidine-3'-phosphate
  modified_base 10: mod_base = OTHER; note = 2'-deoxy-2'-fluoroadenosine-3'-phosphate
  modified_base 11: mod_base = OTHER; note = 2'-deoxy-2'-fluorocytidine-3'-phosphate
  modified_base 12: mod_base = OTHER; note = 2'-O-methyladenosine-3'-phosphate
  modified_base 13: mod_base = OTHER; note = 2'-O-methyluridine-3'-phosphate
  modified_base 14: mod_base = OTHER; note = 2'-O-methylcytidine-3'-phosphate
  modified_base 15: mod_base = OTHER; note = 2'-O-methyluridine-3'-phosphate
  modified_base 16: mod_base = OTHER; note = 2'-O-methyluridine-3'-phosphate
  modified_base 17: mod_base = OTHER; note = 2'-O-methyluridine-3'-phosphate
  modified_base 18: mod_base = OTHER; note = 2'-O-methyladenosine-3'-phosphate
  modified_base 19: mod_base = OTHER; note = 2'-O-methylguanosine-3'-phosphate
  modified_base 20: mod_base = OTHER; note = 2'-O-methyluridine-3'-phosphate
  modified_base 21: mod_base = OTHER; note = 2'-O-methylguanosine-3'-phosphate ((2S,4R)-1-[29-[[2-(acetylamino)-2-deoxy-beta-D-galactopyra nosyl]oxy]-14,14-bis[[3-[[3-[[5-[[2-(acetylamino)-2-deoxy-b eta-D-galactopyranosyl]oxy]-1-oxopentyl]amino]propyl]amino] -3-oxopropoxy]methyl]-1,12,19,25-tetraoxo-16-oxa-13,20,24-t riazanonacos-1-yl]-4-hydroxy-2-pyrrolidinyl)methyl ester
tttccaatcacatctttagtg

SEQ ID NO: 2001 - RNA, 23 nt, synthetic construct
  source 1..23: mol_type = other RNA
  modified_base 1: mod_base = OTHER; note = 2'-O-methylcytidine-3'-phosphorothioate
  modified_base 2: mod_base = OTHER; note = 2'-deoxy-2'-fluoroadenosine-3'-phosphorothioate
  modified_base 3: mod_base = OTHER; note = 2'-O-methylcytidine-3'-phosphate
  modified_base 4: mod_base = OTHER; note = 2'-O-methyluridine-3'-phosphate
  modified_base 5: mod_base = OTHER; note = 2'-O-methyladenosine-3'-phosphate
  modified_base 6: mod_base = OTHER; note = 2'-deoxy-2'-fluoroadenosine-3'-phosphate
  modified_base 7: mod_base = OTHER; note = 2'-O-methyladenosine-3'-phosphate
  modified_base 8: mod_base = OTHER; note = 2'-deoxy-2'-fluoroguanosine-3'-phosphate
  modified_base 9: mod_base = OTHER; note = 2'-deoxy-2'-fluoroadenosine-3'-phosphate
  modified_base 10: mod_base = OTHER; note = 2'-O-methyluridine-3'-phosphate
  modified_base 11: mod_base = OTHER; note = 2'-O-methylguanosine-3'-phosphate
  modified_base 12: mod_base = OTHER; note = 2'-O-methyluridine-3'-phosphate
  modified_base 13: mod_base = OTHER; note = 2'-O-methylguanosine-3'-phosphate
  modified_base 14: mod_base = OTHER; note = 2'-deoxy-2'-fluoroadenosine-3'-phosphate
  modified_base 15: mod_base = OTHER; note = 2'-O-methyluridine-3'-phosphate
  modified_base 16: mod_base = OTHER; note = 2'-deoxy-2'-fluorouridine-3'-phosphate
  modified_base 17: mod_base = OTHER; note = 2'-O-methylguanosine-3'-phosphate
  modified_base 18: mod_base = OTHER; note = 2'-O-methylguanosine-3'-phosphate
  modified_base 19: mod_base = OTHER; note = 2'-O-methyladenosine-3'-phosphate
  modified_base 20: mod_base = OTHER; note = 2'-O-methyladenosine-3'-phosphate
  modified_base 21: mod_base = OTHER; note = 2'-O-methyladenosine-3'-phosphorothioate
  modified_base 22: mod_base = OTHER; note = 2'-O-methyluridine-3'-phosphorothioate
  modified_base 23: mod_base = OTHER; note = 2'-O-methylcytidine
cactaaagatgtgattggaaatc

SEQ ID NO: 2002 - RNA, 21 nt, synthetic construct
  source 1..21: mol_type = other RNA
  modified_base 1: mod_base = OTHER; note = 2'-O-methyladenosine-3'-phosphorothioate
  modified_base 2: mod_base = OTHER; note = 2'-O-methylcytidine-3'-phosphorothioate
  modified_base 3: mod_base = OTHER; note = 2'-O-methylguanosine-3'-phosphate
  modified_base 4: mod_base = OTHER; note = 2'-O-methylguanosine-3'-phosphate
  modified_base 5: mod_base = OTHER; note = 2'-O-methylguanosine-3'-phosphate
  modified_base 6: mod_base = OTHER; note = 2'-O-methylcytidine-3'-phosphate
  modified_base 7: mod_base = OTHER; note = 2'-deoxy-2'-fluoroadenosine-3'-phosphate
  modified_base 8: mod_base = OTHER; note = 2'-O-methyluridine-3'-phosphate
  modified_base 9: mod_base = OTHER; note = 2'-deoxy-2'-fluoroguanosine-3'-phosphate
  modified_base 10: mod_base = OTHER; note = 2'-deoxy-2'-fluoroadenosine-3'-phosphate
  modified_base 11: mod_base = OTHER; note = 2'-deoxy-2'-fluorouridine-3'-phosphate
  modified_base 12: mod_base = OTHER; note = 2'-O-methylguanosine-3'-phosphate
  modified_base 13: mod_base = OTHER; note = 2'-O-methyluridine-3'-phosphate
  modified_base 14: mod_base = OTHER; note = 2'-O-methyluridine-3'-phosphate
  modified_base 15: mod_base = OTHER; note = 2'-O-methylguanosine-3'-phosphate
  modified_base 16: mod_base = OTHER; note = 2'-O-methyladenosine-3'-phosphate
  modified_base 17: mod_base = OTHER; note = 2'-O-methylguanosine-3'-phosphate
  modified_base 18: mod_base = OTHER; note = 2'-O-methyluridine-3'-phosphate
  modified_base 19: mod_base = OTHER; note = 2'-O-methyluridine-3'-phosphate
  modified_base 20: mod_base = OTHER; note = 2'-O-methylcytidine-3'-phosphate
  modified_base 21: mod_base = OTHER; note = 2'-O-methylcytidine-3'-phosphate ((2S,4R)-1-[29-[[2-(acetylamino)-2-deoxy-beta-D-galactopyra nosyl]oxy]-14,14-bis[[3-[[3-[[5-[[2-(acetylamino)-2-deoxy-b eta-D-galactopyranosyl]oxy]-1-oxopentyl]amino]propyl]amino] -3-oxopropoxy]methyl]-1,12,19,25-tetraoxo-16-oxa-13,20,24-t riazanonacos-1-yl]-4-hydroxy-2-pyrrolidinyl)methyl ester
acgggcatgatgttgagttcc

SEQ ID NO: 2003 - RNA, 23 nt, synthetic construct
  source 1..23: mol_type = other RNA
  modified_base 1: mod_base = OTHER; note = 2'-O-methylguanosine-3'-phosphorothioate
  modified_base 2: mod_base = OTHER; note = 2'-deoxy-2'-fluoroguanosine-3'-phosphorothioate
  modified_base 3: mod_base = OTHER; note = 2'-O-methyladenosine-3'-phosphate
  modified_base 4: mod_base = OTHER; note = 2'-O-methyladenosine-3'-phosphate
  modified_base 5: mod_base = OTHER; note = 2'-O-methylcytidine-3'-phosphate
  modified_base 6: mod_base = OTHER; note = 2'-deoxy-2'-fluorouridine-3'-phosphate
  modified_base 7: mod_base = OTHER; note = 2'-O-methylcytidine-3'-phosphate
  modified_base 8: mod_base = OTHER; note = 2'-deoxy-2'-fluoroadenosine-3'-phosphate
  modified_base 9: mod_base = OTHER; note = 2'-deoxy-2'-fluoroadenosine-3'-phosphate
  modified_base 10: mod_base = OTHER; note = 2'-O-methylcytidine-3'-phosphate
  modified_base 11: mod_base = OTHER; note = 2'-O-methyladenosine-3'-phosphate
  modified_base 12: mod_base = OTHER; note = 2'-O-methyluridine-3'-phosphate
  modified_base 13: mod_base = OTHER; note = 2'-O-methylcytidine-3'-phosphate
  modified_base 14: mod_base = OTHER; note = 2'-deoxy-2'-fluoroadenosine-3'-phosphate
  modified_base 15: mod_base = OTHER; note = 2'-O-methyluridine-3'-phosphate
  modified_base 16: mod_base = OTHER; note = 2'-deoxy-2'-fluoroguanosine-3'-phosphate
  modified_base 17: mod_base = OTHER; note = 2'-O-methylcytidine-3'-phosphate
  modified_base 18: mod_base = OTHER; note = 2'-O-methylcytidine-3'-phosphate
  modified_base 19: mod_base = OTHER; note = 2'-O-methylcytidine-3'-phosphate
  modified_base 20: mod_base = OTHER; note = 2'-O-methylguanosine-3'-phosphate
  modified_base 21: mod_base = OTHER; note = 2'-O-methyluridine-3'-phosphorothioate
  modified_base 22: mod_base = OTHER; note = 2'-O-methyluridine-3'-phosphorothioate
  modified_base 23: mod_base = OTHER; note = 2'-O-methylcytidine
ggaactcaacatcatgcccgttc

SEQ ID NO: 2004 - RNA, 21 nt, synthetic construct
  source 1..21: mol_type = other RNA
  modified_base 1: mod_base = OTHER; note = 2'-O-methylcytidine-3'-phosphorothioate
  modified_base 2: mod_base = OTHER; note = 2'-O-methylguanosine-3'-phosphorothioate
  modified_base 3: mod_base = OTHER; note = 2'-O-methylguanosine-3'-phosphate
  modified_base 4: mod_base = OTHER; note = 2'-O-methylguanosine-3'-phosphate
  modified_base 5: mod_base = OTHER; note = 2'-O-methylcytidine-3'-phosphate
  modified_base 6: mod_base = OTHER; note = 2'-O-methyladenosine-3'-phosphate
  modified_base 7: mod_base = OTHER; note = 2'-deoxy-2'-fluorouridine-3'-phosphate
  modified_base 8: mod_base = OTHER; note = 2'-O-methylguanosine-3'-phosphate
  modified_base 9: mod_base = OTHER; note = 2'-deoxy-2'-fluoroadenosine-3'-phosphate
  modified_base 10: mod_base = OTHER; note = 2'-deoxy-2'-fluorouridine-3'-phosphate
  modified_base 11: mod_base = OTHER; note = 2'-deoxy-2'-fluoroguanosine-3'-phosphate
  modified_base 12: mod_base = OTHER; note = 2'-O-methyluridine-3'-phosphate
  modified_base 13: mod_base = OTHER; note = 2'-O-methyluridine-3'-phosphate
  modified_base 14: mod_base = OTHER; note = 2'-O-methylguanosine-3'-phosphate
  modified_base 15: mod_base = OTHER; note = 2'-O-methyladenosine-3'-phosphate
  modified_base 16: mod_base = OTHER; note = 2'-O-methylguanosine-3'-phosphate
  modified_base 17: mod_base = OTHER; note = 2'-O-methyluridine-3'-phosphate
  modified_base 18: mod_base = OTHER; note = 2'-O-methyluridine-3'-phosphate
  modified_base 19: mod_base = OTHER; note = 2'-O-methylcytidine-3'-phosphate
  modified_base 20: mod_base = OTHER; note = 2'-O-methylcytidine-3'-phosphate
  modified_base 21: mod_base = OTHER; note = 2'-O-methyluridine-3'-phosphate ((2S,4R)-1-[29-[[2-(acetylamino)-2-deoxy-beta-D-galactopyra nosyl]oxy]-14,14-bis[[3-[[3-[[5-[[2-(acetylamino)-2-deoxy-b eta-D-galactopyranosyl]oxy]-1-oxopentyl]amino]propyl]amino] -3-oxopropoxy]methyl]-1,12,19,25-tetraoxo-16-oxa-13,20,24-t riazanonacos-1-yl]-4-hydroxy-2-pyrrolidinyl)methyl ester
cgggcatgatgttgagttcct

SEQ ID NO: 2005 - RNA, 23 nt, synthetic construct
  source 1..23: mol_type = other RNA
  modified_base 1: mod_base = OTHER; note = 2'-O-methyladenosine-3'-phosphorothioate
  modified_base 2: mod_base = OTHER; note = 2'-deoxy-2'-fluoroguanosine-3'-phosphorothioate
  modified_base 3: mod_base = OTHER; note = 2'-O-methylguanosine-3'-phosphate
  modified_base 4: mod_base = OTHER; note = 2'-O-methyladenosine-3'-phosphate
  modified_base 5: mod_base = OTHER; note = 2'-O-methyladenosine-3'-phosphate
  modified_base 6: mod_base = OTHER; note = 2'-deoxy-2'-fluorocytidine-3'-phosphate
  modified_base 7: mod_base = OTHER; note = 2'-O-methyluridine-3'-phosphate
  modified_base 8: mod_base = OTHER; note = 2'-deoxy-2'-fluorocytidine-3'-phosphate
  modified_base 9: mod_base = OTHER; note = 2'-deoxy-2'-fluoroadenosine-3'-phosphate
  modified_base 10: mod_base = OTHER; note = 2'-O-methyladenosine-3'-phosphate
  modified_base 11: mod_base = OTHER; note = 2'-O-methylcytidine-3'-phosphate
  modified_base 12: mod_base = OTHER; note = 2'-O-methyladenosine-3'-phosphate
  modified_base 13: mod_base = OTHER; note = 2'-O-methyluridine-3'-phosphate
  modified_base 14: mod_base = OTHER; note = 2'-deoxy-2'-fluorocytidine-3'-phosphate
  modified_base 15: mod_base = OTHER; note = 2'-O-methyladenosine-3'-phosphate
  modified_base 16: mod_base = OTHER; note = 2'-deoxy-2'-fluorouridine-3'-phosphate
  modified_base 17: mod_base = OTHER; note = 2'-O-methylguanosine-3'-phosphate
  modified_base 18: mod_base = OTHER; note = 2'-O-methylcytidine-3'-phosphate
  modified_base 19: mod_base = OTHER; note = 2'-O-methylcytidine-3'-phosphate
  modified_base 20: mod_base = OTHER; note = 2'-O-methylcytidine-3'-phosphate
  modified_base 21: mod_base = OTHER; note = 2'-O-methylguanosine-3'-phosphorothioate
  modified_base 22: mod_base = OTHER; note = 2'-O-methyluridine-3'-phosphorothioate
  modified_base 23: mod_base = OTHER; note = 2'-O-methyluridine
aggaactcaacatcatgcccgtt

SEQ ID NO: 2006 - RNA, 21 nt, synthetic construct
  source 1..21: mol_type = other RNA
  modified_base 1: mod_base = OTHER; note = 2'-O-methylguanosine-3'-phosphorothioate
  modified_base 2: mod_base = OTHER; note = 2'-O-methylguanosine-3'-phosphorothioate
  modified_base 3: mod_base = OTHER; note = 2'-O-methylguanosine-3'-phosphate
  modified_base 4: mod_base = OTHER; note = 2'-O-methyladenosine-3'-phosphate
  modified_base 5: mod_base = OTHER; note = 2'-O-methyladenosine-3'-phosphate
  modified_base 6: mod_base = OTHER; note = 2'-O-methylcytidine-3'-phosphate
  modified_base 7: mod_base = OTHER; note = 2'-deoxy-2'-fluoroguanosine-3'-phosphate
  modified_base 8: mod_base = OTHER; note = 2'-O-methylguanosine-3'-phosphate
  modified_base 9: mod_base = OTHER; note = 2'-deoxy-2'-fluoroguanosine-3'-phosphate
  modified_base 10: mod_base = OTHER; note = 2'-deoxy-2'-fluorocytidine-3'-phosphate
  modified_base 11: mod_base = OTHER; note = 2'-deoxy-2'-fluoroadenosine-3'-phosphate
  modified_base 12: mod_base = OTHER; note = 2'-O-methyluridine-3'-phosphate
  modified_base 13: mod_base = OTHER; note = 2'-O-methylguanosine-3'-phosphate
  modified_base 14: mod_base = OTHER; note = 2'-O-methyladenosine-3'-phosphate
  modified_base 15: mod_base = OTHER; note = 2'-O-methyluridine-3'-phosphate
  modified_base 16: mod_base = OTHER; note = 2'-O-methylguanosine-3'-phosphate
  modified_base 17: mod_base = OTHER; note = 2'-O-methyluridine-3'-phosphate
  modified_base 18: mod_base = OTHER; note = 2'-O-methyluridine-3'-phosphate
  modified_base 19: mod_base = OTHER; note = 2'-O-methylguanosine-3'-phosphate
  modified_base 20: mod_base = OTHER; note = 2'-O-methyladenosine-3'-phosphate
  modified_base 21: mod_base = OTHER; note = 2'-O-methylguanosine-3'-phosphate ((2S,4R)-1-[29-[[2-(acetylamino)-2-deoxy-beta-D-galactopyra nosyl]oxy]-14,14-bis[[3-[[3-[[5-[[2-(acetylamino)-2-deoxy-b eta-D-galactopyranosyl]oxy]-1-oxopentyl]amino]propyl]amino] -3-oxopropoxy]methyl]-1,12,19,25-tetraoxo-16-oxa-13,20,24-t riazanonacos-1-yl]-4-hydroxy-2-pyrrolidinyl)methyl ester
gggaacgggcatgatgttgag

SEQ ID NO: 2007 - RNA, 23 nt, synthetic construct
  source 1..23: mol_type = other RNA
  modified_base 1: mod_base = OTHER; note = 2'-O-methylcytidine-3'-phosphorothioate
  modified_base 2: mod_base = OTHER; note = 2'-deoxy-2'-fluorouridine-3'-phosphorothioate
  modified_base 3: mod_base = OTHER; note = 2'-O-methylcytidine-3'-phosphate
  modified_base 4: mod_base = OTHER; note = 2'-O-methyladenosine-3'-phosphate
  modified_base 5: mod_base = OTHER; note = 2'-O-methyladenosine-3'-phosphate
  modified_base 6: mod_base = OTHER; note = 2'-deoxy-2'-fluorocytidine-3'-phosphate
  modified_base 7: mod_base = OTHER; note = 2'-O-methyladenosine-3'-phosphate
  modified_base 8: mod_base = OTHER; note = 2'-deoxy-2'-fluorouridine-3'-phosphate
  modified_base 9: mod_base = OTHER; note = 2'-deoxy-2'-fluorocytidine-3'-phosphate
  modified_base 10: mod_base = OTHER; note = 2'-O-methyladenosine-3'-phosphate
  modified_base 11: mod_base = OTHER; note = 2'-O-methyluridine-3'-phosphate
  modified_base 12: mod_base = OTHER; note = 2'-O-methylguanosine-3'-phosphate
  modified_base 13: mod_base = OTHER; note = 2'-O-methylcytidine-3'-phosphate
  modified_base 14: mod_base = OTHER; note = 2'-deoxy-2'-fluorocytidine-3'-phosphate
  modified_base 15: mod_base = OTHER; note = 2'-O-methylcytidine-3'-phosphate
  modified_base 16: mod_base = OTHER; note = 2'-deoxy-2'-fluoroguanosine-3'-phosphate
  modified_base 17: mod_base = OTHER; note = 2'-O-methyluridine-3'-phosphate
  modified_base 18: mod_base = OTHER; note = 2'-O-methyluridine-3'-phosphate
  modified_base 19: mod_base = OTHER; note = 2'-O-methylcytidine-3'-phosphate
  modified_base 20: mod_base = OTHER; note = 2'-O-methylcytidine-3'-phosphate
  modified_base 21: mod_base = OTHER; note = 2'-O-methylcytidine-3'-phosphorothioate
  modified_base 22: mod_base = OTHER; note = 2'-O-methyladenosine-3'-phosphorothioate
  modified_base 23: mod_base = OTHER; note = 2'-O-methylguanosine
ctcaacatcatgcccgttcccag

SEQ ID NO: 2008 - RNA, 21 nt, synthetic construct
  source 1..21: mol_type = other RNA
  modified_base 1: mod_base = OTHER; note = 2'-O-methyluridine-3'-phosphorothioate
  modified_base 2: mod_base = OTHER; note = 2'-O-methylguanosine-3'-phosphorothioate
  modified_base 3: mod_base = OTHER; note = 2'-O-methylguanosine-3'-phosphate
  modified_base 4: mod_base = OTHER; note = 2'-O-methylguanosine-3'-phosphate
  modified_base 5: mod_base = OTHER; note = 2'-O-methyladenosine-3'-phosphate
  modified_base 6: mod_base = OTHER; note = 2'-O-methyladenosine-3'-phosphate
  modified_base 7: mod_base = OTHER; note = 2'-deoxy-2'-fluorocytidine-3'-phosphate
  modified_base 8: mod_base = OTHER; note = 2'-O-methylguanosine-3'-phosphate
  modified_base 9: mod_base = OTHER; note = 2'-deoxy-2'-fluoroguanosine-3'-phosphate
  modified_base 10: mod_base = OTHER; note = 2'-deoxy-2'-fluoroguanosine-3'-phosphate
  modified_base 11: mod_base = OTHER; note = 2'-deoxy-2'-fluorocytidine-3'-phosphate
  modified_base 12: mod_base = OTHER; note = 2'-O-methyladenosine-3'-phosphate
  modified_base 13: mod_base = OTHER; note = 2'-O-methyluridine-3'-phosphate
  modified_base 14: mod_base = OTHER; note = 2'-O-methylguanosine-3'-phosphate
  modified_base 15: mod_base = OTHER; note = 2'-O-methyladenosine-3'-phosphate
  modified_base 16: mod_base = OTHER; note = 2'-O-methyluridine-3'-phosphate
  modified_base 17: mod_base = OTHER; note = 2'-O-methylguanosine-3'-phosphate
  modified_base 18: mod_base = OTHER; note = 2'-O-methyluridine-3'-phosphate
  modified_base 19: mod_base = OTHER; note = 2'-O-methyluridine-3'-phosphate
  modified_base 20: mod_base = OTHER; note = 2'-O-methylguanosine-3'-phosphate
  modified_base 21: mod_base = OTHER; note = 2'-O-methyladenosine-3'-phosphate ((2S,4R)-1-[29-[[2-(acetylamino)-2-deoxy-beta-D-galactopyra nosyl]oxy]-14,14-bis[[3-[[3-[[5-[[2-(acetylamino)-2-deoxy-b eta-D-galactopyranosyl]oxy]-1-oxopentyl]amino]propyl]amino] -3-oxopropoxy]methyl]-1,12,19,25-tetraoxo-16-oxa-13,20,24-t riazanonacos-1-yl]-4-hydroxy-2-pyrrolidinyl)methyl ester
tgggaacgggcatgatgttga

SEQ ID NO: 2009 - RNA, 23 nt, synthetic construct
  source 1..23: mol_type = other RNA
  modified_base 1: mod_base = OTHER; note = 2'-O-methyluridine-3'-phosphorothioate
  modified_base 2: mod_base = OTHER; note = 2'-deoxy-2'-fluorocytidine-3'-phosphorothioate
  modified_base 3: mod_base = OTHER; note = 2'-O-methyladenosine-3'-phosphate
  modified_base 4: mod_base = OTHER; note = 2'-O-methyladenosine-3'-phosphate
  modified_base 5: mod_base = OTHER; note = 2'-O-methylcytidine-3'-phosphate
  modified_base 6: mod_base = OTHER; note = 2'-deoxy-2'-fluoroadenosine-3'-phosphate
  modified_base 7: mod_base = OTHER; note = 2'-O-methyluridine-3'-phosphate
  modified_base 8: mod_base = OTHER; note = 2'-deoxy-2'-fluorocytidine-3'-phosphate
  modified_base 9: mod_base = OTHER; note = 2'-deoxy-2'-fluoroadenosine-3'-phosphate
  modified_base 10: mod_base = OTHER; note = 2'-O-methyluridine-3'-phosphate
  modified_base 11: mod_base = OTHER; note = 2'-O-methylguanosine-3'-phosphate
  modified_base 12: mod_base = OTHER; note = 2'-O-methylcytidine-3'-phosphate
  modified_base 13: mod_base = OTHER; note = 2'-O-methylcytidine-3'-phosphate
  modified_base 14: mod_base = OTHER; note = 2'-deoxy-2'-fluorocytidine-3'-phosphate
  modified_base 15: mod_base = OTHER; note = 2'-O-methylguanosine-3'-phosphate
  modified_base 16: mod_base = OTHER; note = 2'-deoxy-2'-fluorouridine-3'-phosphate
  modified_base 17: mod_base = OTHER; note = 2'-O-methyluridine-3'-phosphate
  modified_base 18: mod_base = OTHER; note = 2'-O-methylcytidine-3'-phosphate
  modified_base 19: mod_base = OTHER; note = 2'-O-methylcytidine-3'-phosphate
  modified_base 20: mod_base = OTHER; note = 2'-O-methylcytidine-3'-phosphate
  modified_base 21: mod_base = OTHER; note = 2'-O-methyladenosine-3'-phosphorothioate
  modified_base 22: mod_base = OTHER; note = 2'-O-methylguanosine-3'-phosphorothioate
  modified_base 23: mod_base = OTHER; note = 2'-O-methylguanosine
tcaacatcatgcccgttcccagg

SEQ ID NO: 2010 - RNA, 21 nt, synthetic construct
  source 1..21: mol_type = other RNA
  modified_base 1: mod_base = OTHER; note = 2'-O-methyladenosine-3'-phosphorothioate
  modified_base 2: mod_base = OTHER; note = 2'-O-methylcytidine-3'-phosphorothioate
  modified_base 3: mod_base = OTHER; note = 2'-O-methyluridine-3'-phosphate
  modified_base 4: mod_base = OTHER; note = 2'-O-methyladenosine-3'-phosphate
  modified_base 5: mod_base = OTHER; note = 2'-O-methyladenosine-3'-phosphate
  modified_base 6: mod_base = OTHER; note = 2'-O-methylguanosine-3'-phosphate
  modified_base 7: mod_base = OTHER; note = 2'-deoxy-2'-fluoroguanosine-3'-phosphate
  modified_base 8: mod_base = OTHER; note = 2'-O-methyluridine-3'-phosphate
  modified_base 9: mod_base = OTHER; note = 2'-deoxy-2'-fluoroguanosine-3'-phosphate
  modified_base 10: mod_base = OTHER; note = 2'-deoxy-2'-fluoroadenosine-3'-phosphate
  modified_base 11: mod_base = OTHER; note = 2'-deoxy-2'-fluoroadenosine-3'-phosphate
  modified_base 12: mod_base = OTHER; note = 2'-O-methyladenosine-3'-phosphate
  modified_base 13: mod_base = OTHER; note = 2'-O-methyladenosine-3'-phosphate
  modified_base 14: mod_base = OTHER; note = 2'-O-methylguanosine-3'-phosphate
  modified_base 15: mod_base = OTHER; note = 2'-O-methyladenosine-3'-phosphate
  modified_base 16: mod_base = OTHER; note = 2'-O-methyluridine-3'-phosphate
  modified_base 17: mod_base = OTHER; note = 2'-O-methyladenosine-3'-phosphate
  modified_base 18: mod_base = OTHER; note = 2'-O-methyladenosine-3'-phosphate
  modified_base 19: mod_base = OTHER; note = 2'-O-methyluridine-3'-phosphate
  modified_base 20: mod_base = OTHER; note = 2'-O-methylguanosine-3'-phosphate
  modified_base 21: mod_base = OTHER; note = 2'-O-methyladenosine-3'-phosphate ((2S,4R)-1-[29-[[2-(acetylamino)-2-deoxy-beta-D-galactopyra nosyl]oxy]-14,14-bis[[3-[[3-[[5-[[2-(acetylamino)-2-deoxy-b eta-D-galactopyranosyl]oxy]-1-oxopentyl]amino]propyl]amino] -3-oxopropoxy]methyl]-1,12,19,25-tetraoxo-16-oxa-13,20,24-t riazanonacos-1-yl]-4-hydroxy-2-pyrrolidinyl)methyl ester
actaaggtgaaaagataatga

SEQ ID NO: 2011 - RNA, 23 nt, synthetic construct
  source 1..23: mol_type = other RNA
  modified_base 1: mod_base = OTHER; note = 2'-O-methyluridine-3'-phosphorothioate
  modified_base 2: mod_base = OTHER; note = 2'-deoxy-2'-fluorocytidine-3'-phosphorothioate
  modified_base 3: mod_base = OTHER; note = 2'-O-methyladenosine-3'-phosphate
  modified_base 4: mod_base = OTHER; note = 2'-O-methyluridine-3'-phosphate
  modified_base 5: mod_base = OTHER; note = 2'-O-methyluridine-3'-phosphate
  modified_base 6: mod_base = OTHER; note = 2'-deoxy-2'-fluoroadenosine-3'-phosphate
  modified_base 7: mod_base = OTHER; note = 2'-O-methyluridine-3'-phosphate
  modified_base 8: mod_base = OTHER; note = 2'-deoxy-2'-fluorocytidine-3'-phosphate
  modified_base 9: mod_base = OTHER; note = 2'-deoxy-2'-fluorouridine-3'-phosphate
  modified_base 10: mod_base = OTHER; note = 2'-O-methyluridine-3'-phosphate
  modified_base 11: mod_base = OTHER; note = 2'-O-methyluridine-3'-phosphate
  modified_base 12: mod_base = OTHER; note = 2'-O-methyluridine-3'-phosphate
  modified_base 13: mod_base = OTHER; note = 2'-O-methylcytidine-3'-phosphate
  modified_base 14: mod_base = OTHER; note = 2'-deoxy-2'-fluoroadenosine-3'-phosphate
  modified_base 15: mod_base = OTHER; note = 2'-O-methylcytidine-3'-phosphate
  modified_base 16: mod_base = OTHER; note = 2'-deoxy-2'-fluorocytidine-3'-phosphate
  modified_base 17: mod_base = OTHER; note = 2'-O-methyluridine-3'-phosphate
  modified_base 18: mod_base = OTHER; note = 2'-O-methyluridine-3'-phosphate
  modified_base 19: mod_base = OTHER; note = 2'-O-methyladenosine-3'-phosphate
  modified_base 20: mod_base = OTHER; note = 2'-O-methylguanosine-3'-phosphate
  modified_base 21: mod_base = OTHER; note = 2'-O-methyluridine-3'-phosphorothioate
  modified_base 22: mod_base = OTHER; note = 2'-O-methylguanosine-3'-phosphorothioate
  modified_base 23: mod_base = OTHER; note = 2'-O-methyluridine
tcattatcttttcaccttagtgt

SEQ ID NO: 2012 - RNA, 21 nt, synthetic construct
  source 1..21: mol_type = other RNA
  modified_base 1: mod_base = OTHER; note = 2'-O-methylcytidine-3'-phosphorothioate
  modified_base 2: mod_base = OTHER; note = 2'-O-methyluridine-3'-phosphorothioate
  modified_base 3: mod_base = OTHER; note = 2'-O-methyladenosine-3'-phosphate
  modified_base 4: mod_base = OTHER; note = 2'-O-methyladenosine-3'-phosphate
  modified_base 5: mod_base = OTHER; note = 2'-O-methylguanosine-3'-phosphate
  modified_base 6: mod_base = OTHER; note = 2'-O-methylguanosine-3'-phosphate
  modified_base 7: mod_base = OTHER; note = 2'-deoxy-2'-fluorouridine-3'-phosphate
  modified_base 8: mod_base = OTHER; note = 2'-O-methylguanosine-3'-phosphate
  modified_base 9: mod_base = OTHER; note = 2'-deoxy-2'-fluoroadenosine-3'-phosphate
  modified_base 10: mod_base = OTHER; note = 2'-deoxy-2'-fluoroadenosine-3'-phosphate
  modified_base 11: mod_base = OTHER; note = 2'-deoxy-2'-fluoroadenosine-3'-phosphate
  modified_base 12: mod_base = OTHER; note = 2'-O-methyladenosine-3'-phosphate
  modified_base 13: mod_base = OTHER; note = 2'-O-methylguanosine-3'-phosphate
  modified_base 14: mod_base = OTHER; note = 2'-O-methyladenosine-3'-phosphate
  modified_base 15: mod_base = OTHER; note = 2'-O-methyluridine-3'-phosphate
  modified_base 16: mod_base = OTHER; note = 2'-O-methyladenosine-3'-phosphate
  modified_base 17: mod_base = OTHER; note = 2'-O-methyladenosine-3'-phosphate
  modified_base 18: mod_base = OTHER; note = 2'-O-methyluridine-3'-phosphate
  modified_base 19: mod_base = OTHER; note = 2'-O-methylguanosine-3'-phosphate
  modified_base 20: mod_base = OTHER; note = 2'-O-methyladenosine-3'-phosphate
  modified_base 21: mod_base = OTHER; note = 2'-O-methyluridine-3'-phosphate ((2S,4R)-1-[29-[[2-(acetylamino)-2-deoxy-beta-D-galactopyra nosyl]oxy]-14,14-bis[[3-[[3-[[5-[[2-(acetylamino)-2-deoxy-b eta-D-galactopyranosyl]oxy]-1-oxopentyl]amino]propyl]amino] -3-oxopropoxy]methyl]-1,12,19,25-tetraoxo-16-oxa-13,20,24-t riazanonacos-1-yl]-4-hydroxy-2-pyrrolidinyl)methyl ester
ctaaggtgaaaagataatgat

SEQ ID NO: 2013 - RNA, 23 nt, synthetic construct
  source 1..23: mol_type = other RNA
  modified_base 1: mod_base = OTHER; note = 2'-O-methyladenosine-3'-phosphorothioate
  modified_base 2: mod_base = OTHER; note = 2'-deoxy-2'-fluorouridine-3'-phosphorothioate
  modified_base 3: mod_base = OTHER; note = 2'-O-methylcytidine-3'-phosphate
  modified_base 4: mod_base = OTHER; note = 2'-O-methyladenosine-3'-phosphate
  modified_base 5: mod_base = OTHER; note = 2'-O-methyluridine-3'-phosphate
  modified_base 6: mod_base = OTHER; note = 2'-deoxy-2'-fluorouridine-3'-phosphate
  modified_base 7: mod_base = OTHER; note = 2'-O-methyladenosine-3'-phosphate
  modified_base 8: mod_base = OTHER; note = 2'-deoxy-2'-fluorouridine-3'-phosphate
  modified_base 9: mod_base = OTHER; note = 2'-deoxy-2'-fluorocytidine-3'-phosphate
  modified_base 10: mod_base = OTHER; note = 2'-O-methyluridine-3'-phosphate
  modified_base 11: mod_base = OTHER; note = 2'-O-methyluridine-3'-phosphate
  modified_base 12: mod_base = OTHER; note = 2'-O-methyluridine-3'-phosphate
  modified_base 13: mod_base = OTHER; note = 2'-O-methyluridine-3'-phosphate
  modified_base 14: mod_base = OTHER; note = 2'-deoxy-2'-fluorocytidine-3'-phosphate
  modified_base 15: mod_base = OTHER; note = 2'-O-methyladenosine-3'-phosphate
  modified_base 16: mod_base = OTHER; note = 2'-deoxy-2'-fluorocytidine-3'-phosphate
  modified_base 17: mod_base = OTHER; note = 2'-O-methylcytidine-3'-phosphate
  modified_base 18: mod_base = OTHER; note = 2'-O-methyluridine-3'-phosphate
  modified_base 19: mod_base = OTHER; note = 2'-O-methyluridine-3'-phosphate
  modified_base 20: mod_base = OTHER; note = 2'-O-methyladenosine-3'-phosphate
  modified_base 21: mod_base = OTHER; note = 2'-O-methylguanosine-3'-phosphorothioate
  modified_base 22: mod_base = OTHER; note = 2'-O-methyluridine-3'-phosphorothioate
  modified_base 23: mod_base = OTHER; note = 2'-O-methylguanosine
atcattatcttttcaccttagtg

SEQ ID NO: 2014 - RNA, 21 nt, synthetic construct
  source 1..21: mol_type = other RNA
  modified_base 1: mod_base = OTHER; note = 2'-O-methyladenosine-3'-phosphorothioate
  modified_base 2: mod_base = OTHER; note = 2'-O-methyladenosine-3'-phosphorothioate
  modified_base 3: mod_base = OTHER; note = 2'-O-methyladenosine-3'-phosphate
  modified_base 4: mod_base = OTHER; note = 2'-O-methylcytidine-3'-phosphate
  modified_base 5: mod_base = OTHER; note = 2'-O-methyladenosine-3'-phosphate
  modified_base 6: mod_base = OTHER; note = 2'-O-methylcytidine-3'-phosphate
  modified_base 7: mod_base = OTHER; note = 2'-deoxy-2'-fluorouridine-3'-phosphate
  modified_base 8: mod_base = OTHER; note = 2'-O-methyladenosine-3'-phosphate
  modified_base 9: mod_base = OTHER; note = 2'-deoxy-2'-fluoroadenosine-3'-phosphate
  modified_base 10: mod_base = OTHER; note = 2'-deoxy-2'-fluoroguanosine-3'-phosphate
  modified_base 11: mod_base = OTHER; note = 2'-deoxy-2'-fluoroguanosine-3'-phosphate
  modified_base 12: mod_base = OTHER; note = 2'-O-methyluridine-3'-phosphate
  modified_base 13: mod_base = OTHER; note = 2'-O-methylguanosine-3'-phosphate
  modified_base 14: mod_base = OTHER; note = 2'-O-methyladenosine-3'-phosphate
  modified_base 15: mod_base = OTHER; note = 2'-O-methyladenosine-3'-phosphate
  modified_base 16: mod_base = OTHER; note = 2'-O-methyladenosine-3'-phosphate
  modified_base 17: mod_base = OTHER; note = 2'-O-methyladenosine-3'-phosphate
  modified_base 18: mod_base = OTHER; note = 2'-O-methylguanosine-3'-phosphate
  modified_base 19: mod_base = OTHER; note = 2'-O-methyladenosine-3'-phosphate
  modified_base 20: mod_base = OTHER; note = 2'-O-methyluridine-3'-phosphate
  modified_base 21: mod_base = OTHER; note = 2'-O-methyladenosine-3'-phosphate ((2S,4R)-1-[29-[[2-(acetylamino)-2-deoxy-beta-D-galactopyra nosyl]oxy]-14,14-bis[[3-[[3-[[5-[[2-(acetylamino)-2-deoxy-b eta-D-galactopyranosyl]oxy]-1-oxopentyl]amino]propyl]amino] -3-oxopropoxy]methyl]-1,12,19,25-tetraoxo-16-oxa-13,20,24-t riazanonacos-1-yl]-4-hydroxy-2-pyrrolidinyl)methyl ester
aaacactaaggtgaaaagata

SEQ ID NO: 2015 - RNA, 23 nt, synthetic construct
  source 1..23: mol_type = other RNA
  modified_base 1: mod_base = OTHER; note = 2'-O-methyluridine-3'-phosphorothioate
  modified_base 2: mod_base = OTHER; note = 2'-deoxy-2'-fluoroadenosine-3'-phosphorothioate
  modified_base 3: mod_base = OTHER; note = 2'-O-methyluridine-3'-phosphate
  modified_base 4: mod_base = OTHER; note = 2'-O-methylcytidine-3'-phosphate
  modified_base 5: mod_base = OTHER; note = 2'-O-methyluridine-3'-phosphate
  modified_base 6: mod_base = OTHER; note = 2'-deoxy-2'-fluorouridine-3'-phosphate
  modified_base 7: mod_base = OTHER; note = 2'-O-methyluridine-3'-phosphate
  modified_base 8: mod_base = OTHER; note = 2'-deoxy-2'-fluorouridine-3'-phosphate
  modified_base 9: mod_base = OTHER; note = 2'-deoxy-2'-fluorocytidine-3'-phosphate
  modified_base 10: mod_base = OTHER; note = 2'-O-methyladenosine-3'-phosphate
  modified_base 11: mod_base = OTHER; note = 2'-O-methylcytidine-3'-phosphate
  modified_base 12: mod_base = OTHER; note = 2'-O-methylcytidine-3'-phosphate
  modified_base 13: mod_base = OTHER; note = 2'-O-methyluridine-3'-phosphate
  modified_base 14: mod_base = OTHER; note = 2'-deoxy-2'-fluorouridine-3'-phosphate
  modified_base 15: mod_base = OTHER; note = 2'-O-methyladenosine-3'-phosphate
  modified_base 16: mod_base = OTHER; note = 2'-deoxy-2'-fluoroguanosine-3'-phosphate
  modified_base 17: mod_base = OTHER; note = 2'-O-methyluridine-3'-phosphate
  modified_base 18: mod_base = OTHER; note = 2'-O-methylguanosine-3'-phosphate
  modified_base 19: mod_base = OTHER; note = 2'-O-methyluridine-3'-phosphate
  modified_base 20: mod_base = OTHER; note = 2'-O-methyluridine-3'-phosphate
  modified_base 21: mod_base = OTHER; note = 2'-O-methyluridine-3'-phosphorothioate
  modified_base 22: mod_base = OTHER; note = 2'-O-methylguanosine-3'-phosphorothioate
  modified_base 23: mod_base = OTHER; note = 2'-O-methylcytidine
tatcttttcaccttagtgtttgc

SEQ ID NO: 2016 - RNA, 21 nt, synthetic construct
  source 1..21: mol_type = other RNA
  modified_base 1: mod_base = OTHER; note = 2'-O-methylcytidine-3'-phosphorothioate
  modified_base 2: mod_base = OTHER; note = 2'-O-methyladenosine-3'-phosphorothioate
  modified_base 3: mod_base = OTHER; note = 2'-O-methyladenosine-3'-phosphate
  modified_base 4: mod_base = OTHER; note = 2'-O-methyladenosine-3'-phosphate
  modified_base 5: mod_base = OTHER; note = 2'-O-methylcytidine-3'-phosphate
  modified_base 6: mod_base = OTHER; note = 2'-O-methyladenosine-3'-phosphate
  modified_base 7: mod_base = OTHER; note = 2'-deoxy-2'-fluorocytidine-3'-phosphate
  modified_base 8: mod_base = OTHER; note = 2'-O-methyluridine-3'-phosphate
  modified_base 9: mod_base = OTHER; note = 2'-deoxy-2'-fluoroadenosine-3'-phosphate
  modified_base 10: mod_base = OTHER; note = 2'-deoxy-2'-fluoroadenosine-3'-phosphate
  modified_base 11: mod_base = OTHER; note = 2'-deoxy-2'-fluoroguanosine-3'-phosphate
  modified_base 12: mod_base = OTHER; note = 2'-O-methylguanosine-3'-phosphate
  modified_base 13: mod_base = OTHER; note = 2'-O-methyluridine-3'-phosphate
  modified_base 14: mod_base = OTHER; note = 2'-O-methylguanosine-3'-phosphate
  modified_base 15: mod_base = OTHER; note = 2'-O-methyladenosine-3'-phosphate
  modified_base 16: mod_base = OTHER; note = 2'-O-methyladenosine-3'-phosphate
  modified_base 17: mod_base = OTHER; note = 2'-O-methyladenosine-3'-phosphate
  modified_base 18: mod_base = OTHER; note = 2'-O-methyladenosine-3'-phosphate
  modified_base 19: mod_base = OTHER; note = 2'-O-methylguanosine-3'-phosphate
  modified_base 20: mod_base = OTHER; note = 2'-O-methyladenosine-3'-phosphate
  modified_base 21: mod_base = OTHER; note = 2'-O-methyluridine-3'-phosphate ((2S,4R)-1-[29-[[2-(acetylamino)-2-deoxy-beta-D-galactopyra nosyl]oxy]-14,14-bis[[3-[[3-[[5-[[2-(acetylamino)-2-deoxy-b eta-D-galactopyranosyl]oxy]-1-oxopentyl]amino]propyl]amino] -3-oxopropoxy]methyl]-1,12,19,25-tetraoxo-16-oxa-13,20,24-t riazanonacos-1-yl]-4-hydroxy-2-pyrrolidinyl)methyl ester
caaacactaaggtgaaaagat

SEQ ID NO: 2017 - RNA, 23 nt, synthetic construct
  source 1..23: mol_type = other RNA
  modified_base 1: mod_base = OTHER; note = 2'-O-methyladenosine-3'-phosphorothioate
  modified_base 2: mod_base = OTHER; note = 2'-deoxy-2'-fluorouridine-3'-phosphorothioate
  modified_base 3: mod_base = OTHER; note = 2'-O-methylcytidine-3'-phosphate
  modified_base 4: mod_base = OTHER; note = 2'-O-methyluridine-3'-phosphate
  modified_base 5: mod_base = OTHER; note = 2'-O-methyluridine-3'-phosphate
  modified_base 6: mod_base = OTHER; note = 2'-deoxy-2'-fluorouridine-3'-phosphate
  modified_base 7: mod_base = OTHER; note = 2'-O-methyluridine-3'-phosphate
  modified_base 8: mod_base = OTHER; note = 2'-deoxy-2'-fluorocytidine-3'-phosphate
  modified_base 9: mod_base = OTHER; note = 2'-deoxy-2'-fluoroadenosine-3'-phosphate
  modified_base 10: mod_base = OTHER; note = 2'-O-methylcytidine-3'-phosphate
  modified_base 11: mod_base = OTHER; note = 2'-O-methylcytidine-3'-phosphate
  modified_base 12: mod_base = OTHER; note = 2'-O-methyluridine-3'-phosphate
  modified_base 13: mod_base = OTHER; note = 2'-O-methyluridine-3'-phosphate
  modified_base 14: mod_base = OTHER; note = 2'-deoxy-2'-fluoroadenosine-3'-phosphate
  modified_base 15: mod_base = OTHER; note = 2'-O-methylguanosine-3'-phosphate
  modified_base 16: mod_base = OTHER; note = 2'-deoxy-2'-fluorouridine-3'-phosphate
  modified_base 17: mod_base = OTHER; note = 2'-O-methylguanosine-3'-phosphate
  modified_base 18: mod_base = OTHER; note = 2'-O-methyluridine-3'-phosphate
  modified_base 19: mod_base = OTHER; note = 2'-O-methyluridine-3'-phosphate
  modified_base 20: mod_base = OTHER; note = 2'-O-methyluridine-3'-phosphate
  modified_base 21: mod_base = OTHER; note = 2'-O-methylguanosine-3'-phosphorothioate
  modified_base 22: mod_base = OTHER; note = 2'-O-methylcytidine-3'-phosphorothioate
  modified_base 23: mod_base = OTHER; note = 2'-O-methyluridine
atcttttcaccttagtgtttgct

SEQ ID NO: 2018 - RNA, 21 nt, synthetic construct
  source 1..21: mol_type = other RNA
  modified_base 1: mod_base = OTHER; note = 2'-O-methyladenosine-3'-phosphorothioate
  modified_base 2: mod_base = OTHER; note = 2'-O-methylguanosine-3'-phosphorothioate
  modified_base 3: mod_base = OTHER; note = 2'-O-methylguanosine-3'-phosphate
  modified_base 4: mod_base = OTHER; note = 2'-O-methyluridine-3'-phosphate
  modified_base 5: mod_base = OTHER; note = 2'-O-methyladenosine-3'-phosphate
  modified_base 6: mod_base = OTHER; note = 2'-O-methylguanosine-3'-phosphate
  modified_base 7: mod_base = OTHER; note = 2'-deoxy-2'-fluorocytidine-3'-phosphate
  modified_base 8: mod_base = OTHER; note = 2'-O-methyladenosine-3'-phosphate
  modified_base 9: mod_base = OTHER; note = 2'-deoxy-2'-fluorocytidine-3'-phosphate
  modified_base 10: mod_base = OTHER; note = 2'-deoxy-2'-fluorouridine-3'-phosphate
  modified_base 11: mod_base = OTHER; note = 2'-deoxy-2'-fluoroguanosine-3'-phosphate
  modified_base 12: mod_base = OTHER; note = 2'-O-methylguanosine-3'-phosphate
  modified_base 13: mod_base = OTHER; note = 2'-O-methyladenosine-3'-phosphate
  modified_base 14: mod_base = OTHER; note = 2'-O-methylguanosine-3'-phosphate
  modified_base 15: mod_base = OTHER; note = 2'-O-methyladenosine-3'-phosphate
  modified_base 16: mod_base = OTHER; note = 2'-O-methylguanosine-3'-phosphate
  modified_base 17: mod_base = OTHER; note = 2'-O-methyladenosine-3'-phosphate
  modified_base 18: mod_base = OTHER; note = 2'-O-methyladenosine-3'-phosphate
  modified_base 19: mod_base = OTHER; note = 2'-O-methyluridine-3'-phosphate
  modified_base 20: mod_base = OTHER; note = 2'-O-methyluridine-3'-phosphate
  modified_base 21: mod_base = OTHER; note = 2'-O-methylguanosine-3'-phosphate ((2S,4R)-1-[29-[[2-(acetylamino)-2-deoxy-beta-D-galactopyra nosyl]oxy]-14,14-bis[[3-[[3-[[5-[[2-(acetylamino)-2-deoxy-b eta-D-galactopyranosyl]oxy]-1-oxopentyl]amino]propyl]amino] -3-oxopropoxy]methyl]-1,12,19,25-tetraoxo-16-oxa-13,20,24-t riazanonacos-1-yl]-4-hydroxy-2-pyrrolidinyl)methyl ester
aggtagcactggagagaattg

SEQ ID NO: 2019 - RNA, 23 nt, synthetic construct
  source 1..23: mol_type = other RNA
  modified_base 1: mod_base = OTHER; note = 2'-O-methylcytidine-3'-phosphorothioate
  modified_base 2: mod_base = OTHER; note = 2'-deoxy-2'-fluoroadenosine-3'-phosphorothioate
  modified_base 3: mod_base = OTHER; note = 2'-O-methyladenosine-3'-phosphate
  modified_base 4: mod_base = OTHER; note = 2'-O-methyluridine-3'-phosphate
  modified_base 5: mod_base = OTHER; note = 2'-O-methyluridine-3'-phosphate
  modified_base 6: mod_base = OTHER; note = 2'-deoxy-2'-fluorocytidine-3'-phosphate
  modified_base 7: mod_base = OTHER; note = 2'-O-methyluridine-3'-phosphate
  modified_base 8: mod_base = OTHER; note = 2'-deoxy-2'-fluorocytidine-3'-phosphate
  modified_base 9: mod_base = OTHER; note = 2'-deoxy-2'-fluorouridine-3'-phosphate
  modified_base 10: mod_base = OTHER; note = 2'-O-methylcytidine-3'-phosphate
  modified_base 11: mod_base = OTHER; note = 2'-O-methylcytidine-3'-phosphate
  modified_base 12: mod_base = OTHER; note = 2'-O-methyladenosine-3'-phosphate
  modified_base 13: mod_base = OTHER; note = 2'-O-methylguanosine-3'-phosphate
  modified_base 14: mod_base = OTHER; note = 2'-deoxy-2'-fluorouridine-3'-phosphate
  modified_base 15: mod_base = OTHER; note = 2'-O-methylguanosine-3'-phosphate
  modified_base 16: mod_base = OTHER; note = 2'-deoxy-2'-fluorocytidine-3'-phosphate
  modified_base 17: mod_base = OTHER; note = 2'-O-methyluridine-3'-phosphate
  modified_base 18: mod_base = OTHER; note = 2'-O-methyladenosine-3'-phosphate
  modified_base 19: mod_base = OTHER; note = 2'-O-methylcytidine-3'-phosphate
  modified_base 20: mod_base = OTHER; note = 2'-O-methylcytidine-3'-phosphate
  modified_base 21: mod_base = OTHER; note = 2'-O-methyluridine-3'-phosphorothioate
  modified_base 22: mod_base = OTHER; note = 2'-O-methyluridine-3'-phosphorothioate
  modified_base 23: mod_base = OTHER; note = 2'-O-methylcytidine
caattctctccagtgctaccttc

SEQ ID NO: 2020 - RNA, 21 nt, synthetic construct
  source 1..21: mol_type = other RNA
  modified_base 1: mod_base = OTHER; note = 2'-O-methylguanosine-3'-phosphorothioate
  modified_base 2: mod_base = OTHER; note = 2'-O-methylguanosine-3'-phosphorothioate
  modified_base 3: mod_base = OTHER; note = 2'-O-methyluridine-3'-phosphate
  modified_base 4: mod_base = OTHER; note = 2'-O-methyladenosine-3'-phosphate
  modified_base 5: mod_base = OTHER; note = 2'-O-methylguanosine-3'-phosphate
  modified_base 6: mod_base = OTHER; note = 2'-O-methylcytidine-3'-phosphate
  modified_base 7: mod_base = OTHER; note = 2'-deoxy-2'-fluoroadenosine-3'-phosphate
  modified_base 8: mod_base = OTHER; note = 2'-O-methylcytidine-3'-phosphate
  modified_base 9: mod_base = OTHER; note = 2'-deoxy-2'-fluorouridine-3'-phosphate
  modified_base 10: mod_base = OTHER; note = 2'-deoxy-2'-fluoroguanosine-3'-phosphate
  modified_base 11: mod_base = OTHER; note = 2'-deoxy-2'-fluoroguanosine-3'-phosphate
  modified_base 12: mod_base = OTHER; note = 2'-O-methyladenosine-3'-phosphate
  modified_base 13: mod_base = OTHER; note = 2'-O-methylguanosine-3'-phosphate
  modified_base 14: mod_base = OTHER; note = 2'-O-methyladenosine-3'-phosphate
  modified_base 15: mod_base = OTHER; note = 2'-O-methylguanosine-3'-phosphate
  modified_base 16: mod_base = OTHER; note = 2'-O-methyladenosine-3'-phosphate
  modified_base 17: mod_base = OTHER; note = 2'-O-methyladenosine-3'-phosphate
  modified_base 18: mod_base = OTHER; note = 2'-O-methyluridine-3'-phosphate
  modified_base 19: mod_base = OTHER; note = 2'-O-methyluridine-3'-phosphate
  modified_base 20: mod_base = OTHER; note = 2'-O-methylguanosine-3'-phosphate
  modified_base 21: mod_base = OTHER; note = 2'-O-methylguanosine-3'-phosphate ((2S,4R)-1-[29-[[2-(acetylamino)-2-deoxy-beta-D-galactopyra nosyl]oxy]-14,14-bis[[3-[[3-[[5-[[2-(acetylamino)-2-deoxy-b eta-D-galactopyranosyl]oxy]-1-oxopentyl]amino]propyl]amino] -3-oxopropoxy]methyl]-1,12,19,25-tetraoxo-16-oxa-13,20,24-t riazanonacos-1-yl]-4-hydroxy-2-pyrrolidinyl)methyl ester
ggtagcactggagagaattgg

SEQ ID NO: 2021 - RNA, 23 nt, synthetic construct
  source 1..23: mol_type = other RNA
  modified_base 1: mod_base = OTHER; note = 2'-O-methylcytidine-3'-phosphorothioate
  modified_base 2: mod_base = OTHER; note = 2'-deoxy-2'-fluorocytidine-3'-phosphorothioate
  modified_base 3: mod_base = OTHER; note = 2'-O-methyladenosine-3'-phosphate
  modified_base 4: mod_base = OTHER; note = 2'-O-methyladenosine-3'-phosphate
  modified_base 5: mod_base = OTHER; note = 2'-O-methyluridine-3'-phosphate
  modified_base 6: mod_base = OTHER; note = 2'-deoxy-2'-fluorouridine-3'-phosphate
  modified_base 7: mod_base = OTHER; note = 2'-O-methylcytidine-3'-phosphate
  modified_base 8: mod_base = OTHER; note = 2'-deoxy-2'-fluorouridine-3'-phosphate
  modified_base 9: mod_base = OTHER; note = 2'-deoxy-2'-fluorocytidine-3'-phosphate
  modified_base 10: mod_base = OTHER; note = 2'-O-methyluridine-3'-phosphate
  modified_base 11: mod_base = OTHER; note = 2'-O-methylcytidine-3'-phosphate
  modified_base 12: mod_base = OTHER; note = 2'-O-methylcytidine-3'-phosphate
  modified_base 13: mod_base = OTHER; note = 2'-O-methyladenosine-3'-phosphate
  modified_base 14: mod_base = OTHER; note = 2'-deoxy-2'-fluoroguanosine-3'-phosphate
  modified_base 15: mod_base = OTHER; note = 2'-O-methyluridine-3'-phosphate
  modified_base 16: mod_base = OTHER; note = 2'-deoxy-2'-fluoroguanosine-3'-phosphate
  modified_base 17: mod_base = OTHER; note = 2'-O-methylcytidine-3'-phosphate
  modified_base 18: mod_base = OTHER; note = 2'-O-methyluridine-3'-phosphate
  modified_base 19: mod_base = OTHER; note = 2'-O-methyladenosine-3'-phosphate
  modified_base 20: mod_base = OTHER; note = 2'-O-methylcytidine-3'-phosphate
  modified_base 21: mod_base = OTHER; note = 2'-O-methylcytidine-3'-phosphorothioate
  modified_base 22: mod_base = OTHER; note = 2'-O-methyluridine-3'-phosphorothioate
  modified_base 23: mod_base = OTHER; note = 2'-O-methyluridine
ccaattctctccagtgctacctt

SEQ ID NO: 2022 - RNA, 21 nt, synthetic construct
  source 1..21: mol_type = other RNA
  modified_base 1: mod_base = OTHER; note = 2'-O-methylguanosine-3'-phosphorothioate
  modified_base 2: mod_base = OTHER; note = 2'-O-methyladenosine-3'-phosphorothioate
  modified_base 3: mod_base = OTHER; note = 2'-O-methylguanosine-3'-phosphate
  modified_base 4: mod_base = OTHER; note = 2'-O-methyladenosine-3'-phosphate
  modified_base 5: mod_base = OTHER; note = 2'-O-methyladenosine-3'-phosphate
  modified_base 6: mod_base = OTHER; note = 2'-O-methylguanosine-3'-phosphate
  modified_base 7: mod_base = OTHER; note = 2'-deoxy-2'-fluoroguanosine-3'-phosphate
  modified_base 8: mod_base = OTHER; note = 2'-O-methyluridine-3'-phosphate
  modified_base 9: mod_base = OTHER; note = 2'-deoxy-2'-fluoroadenosine-3'-phosphate
  modified_base 10: mod_base = OTHER; note = 2'-deoxy-2'-fluoroguanosine-3'-phosphate
  modified_base 11: mod_base = OTHER; note = 2'-deoxy-2'-fluorocytidine-3'-phosphate
  modified_base 12: mod_base = OTHER; note = 2'-O-methyladenosine-3'-phosphate
  modified_base 13: mod_base = OTHER; note = 2'-O-methylcytidine-3'-phosphate
  modified_base 14: mod_base = OTHER; note = 2'-O-methyluridine-3'-phosphate
  modified_base 15: mod_base = OTHER; note = 2'-O-methylguanosine-3'-phosphate
  modified_base 16: mod_base = OTHER; note = 2'-O-methylguanosine-3'-phosphate
  modified_base 17: mod_base = OTHER; note = 2'-O-methyladenosine-3'-phosphate
  modified_base 18: mod_base = OTHER; note = 2'-O-methylguanosine-3'-phosphate
  modified_base 19: mod_base = OTHER; note = 2'-O-methyladenosine-3'-phosphate
  modified_base 20: mod_base = OTHER; note = 2'-O-methylguanosine-3'-phosphate
  modified_base 21: mod_base = OTHER; note = 2'-O-methyladenosine-3'-phosphate ((2S,4R)-1-[29-[[2-(acetylamino)-2-deoxy-beta-D-galactopyra nosyl]oxy]-14,14-bis[[3-[[3-[[5-[[2-(acetylamino)-2-deoxy-b eta-D-galactopyranosyl]oxy]-1-oxopentyl]amino]propyl]amino] -3-oxopropoxy]methyl]-1,12,19,25-tetraoxo-16-oxa-13,20,24-t riazanonacos-1-yl]-4-hydroxy-2-pyrrolidinyl)methyl ester
gagaaggtagcactggagaga

SEQ ID NO: 2023 - RNA, 23 nt, synthetic construct
  source 1..23: mol_type = other RNA
  modified_base 1: mod_base = OTHER; note = 2'-O-methyluridine-3'-phosphorothioate
  modified_base 2: mod_base = OTHER; note = 2'-deoxy-2'-fluorocytidine-3'-phosphorothioate
  modified_base 3: mod_base = OTHER; note = 2'-O-methyluridine-3'-phosphate
  modified_base 4: mod_base = OTHER; note = 2'-O-methylcytidine-3'-phosphate
  modified_base 5: mod_base = OTHER; note = 2'-O-methyluridine-3'-phosphate
  modified_base 6: mod_base = OTHER; note = 2'-deoxy-2'-fluorocytidine-3'-phosphate
  modified_base 7: mod_base = OTHER; note = 2'-O-methylcytidine-3'-phosphate
  modified_base 8: mod_base = OTHER; note = 2'-deoxy-2'-fluoroadenosine-3'-phosphate
  modified_base 9: mod_base = OTHER; note = 2'-deoxy-2'-fluoroguanosine-3'-phosphate
  modified_base 10: mod_base = OTHER; note = 2'-O-methyluridine-3'-phosphate
  modified_base 11: mod_base = OTHER; note = 2'-O-methylguanosine-3'-phosphate
  modified_base 12: mod_base = OTHER; note = 2'-O-methylcytidine-3'-phosphate
  modified_base 13: mod_base = OTHER; note = 2'-O-methyluridine-3'-phosphate
  modified_base 14: mod_base = OTHER; note = 2'-deoxy-2'-fluoroadenosine-3'-phosphate
  modified_base 15: mod_base = OTHER; note = 2'-O-methylcytidine-3'-phosphate
  modified_base 16: mod_base = OTHER; note = 2'-deoxy-2'-fluorocytidine-3'-phosphate
  modified_base 17: mod_base = OTHER; note = 2'-O-methyluridine-3'-phosphate
  modified_base 18: mod_base = OTHER; note = 2'-O-methyluridine-3'-phosphate
  modified_base 19: mod_base = OTHER; note = 2'-O-methylcytidine-3'-phosphate
  modified_base 20: mod_base = OTHER; note = 2'-O-methyluridine-3'-phosphate
  modified_base 21: mod_base = OTHER; note = 2'-O-methylcytidine-3'-phosphorothioate
  modified_base 22: mod_base = OTHER; note = 2'-O-methyladenosine-3'-phosphorothioate
  modified_base 23: mod_base = OTHER; note = 2'-O-methyladenosine
tctctccagtgctaccttctcaa

SEQ ID NO: 2024 - RNA, 21 nt, synthetic construct
  source 1..21: mol_type = other RNA
  modified_base 1: mod_base = OTHER; note = 2'-O-methyluridine-3'-phosphorothioate
  modified_base 2: mod_base = OTHER; note = 2'-O-methylguanosine-3'-phosphorothioate
  modified_base 3: mod_base = OTHER; note = 2'-O-methyladenosine-3'-phosphate
  modified_base 4: mod_base = OTHER; note = 2'-O-methylguanosine-3'-phosphate
  modified_base 5: mod_base = OTHER; note = 2'-O-methyladenosine-3'-phosphate
  modified_base 6: mod_base = OTHER; note = 2'-O-methyladenosine-3'-phosphate
  modified_base 7: mod_base = OTHER; note = 2'-deoxy-2'-fluoroguanosine-3'-phosphate
  modified_base 8: mod_base = OTHER; note = 2'-O-methylguanosine-3'-phosphate
  modified_base 9: mod_base = OTHER; note = 2'-deoxy-2'-fluorouridine-3'-phosphate
  modified_base 10: mod_base = OTHER; note = 2'-deoxy-2'-fluoroadenosine-3'-phosphate
  modified_base 11: mod_base = OTHER; note = 2'-deoxy-2'-fluoroguanosine-3'-phosphate
  modified_base 12: mod_base = OTHER; note = 2'-O-methylcytidine-3'-phosphate
  modified_base 13: mod_base = OTHER; note = 2'-O-methyladenosine-3'-phosphate
  modified_base 14: mod_base = OTHER; note = 2'-O-methylcytidine-3'-phosphate
  modified_base 15: mod_base = OTHER; note = 2'-O-methyluridine-3'-phosphate
  modified_base 16: mod_base = OTHER; note = 2'-O-methylguanosine-3'-phosphate
  modified_base 17: mod_base = OTHER; note = 2'-O-methylguanosine-3'-phosphate
  modified_base 18: mod_base = OTHER; note = 2'-O-methyladenosine-3'-phosphate
  modified_base 19: mod_base = OTHER; note = 2'-O-methylguanosine-3'-phosphate
  modified_base 20: mod_base = OTHER; note = 2'-O-methyladenosine-3'-phosphate
  modified_base 21: mod_base = OTHER; note = 2'-O-methylguanosine-3'-phosphate ((2S,4R)-1-[29-[[2-(acetylamino)-2-deoxy-beta-D-galactopyra nosyl]oxy]-14,14-bis[[3-[[3-[[5-[[2-(acetylamino)-2-deoxy-b eta-D-galactopyranosyl]oxy]-1-oxopentyl]amino]propyl]amino] -3-oxopropoxy]methyl]-1,12,19,25-tetraoxo-16-oxa-13,20,24-t riazanonacos-1-yl]-4-hydroxy-2-pyrrolidinyl)methyl ester
tgagaaggtagcactggagag

SEQ ID NO: 2025 - RNA, 23 nt, synthetic construct
  source 1..23: mol_type = other RNA
  modified_base 1: mod_base = OTHER; note = 2'-O-methylcytidine-3'-phosphorothioate
  modified_base 2: mod_base = OTHER; note = 2'-deoxy-2'-fluorouridine-3'-phosphorothioate
  modified_base 3: mod_base = OTHER; note = 2'-O-methylcytidine-3'-phosphate
  modified_base 4: mod_base = OTHER; note = 2'-O-methyluridine-3'-phosphate
  modified_base 5: mod_base = OTHER; note = 2'-O-methylcytidine-3'-phosphate
  modified_base 6: mod_base = OTHER; note = 2'-deoxy-2'-fluorocytidine-3'-phosphate
  modified_base 7: mod_base = OTHER; note = 2'-O-methyladenosine-3'-phosphate
  modified_base 8: mod_base = OTHER; note = 2'-deoxy-2'-fluoroguanosine-3'-phosphate
  modified_base 9: mod_base = OTHER; note = 2'-deoxy-2'-fluorouridine-3'-phosphate
  modified_base 10: mod_base = OTHER; note = 2'-O-methylguanosine-3'-phosphate
  modified_base 11: mod_base = OTHER; note = 2'-O-methylcytidine-3'-phosphate
  modified_base 12: mod_base = OTHER; note = 2'-O-methyluridine-3'-phosphate
  modified_base 13: mod_base = OTHER; note = 2'-O-methyladenosine-3'-phosphate
  modified_base 14: mod_base = OTHER; note = 2'-deoxy-2'-fluorocytidine-3'-phosphate
  modified_base 15: mod_base = OTHER; note = 2'-O-methylcytidine-3'-phosphate
  modified_base 16: mod_base = OTHER; note = 2'-deoxy-2'-fluorouridine-3'-phosphate
  modified_base 17: mod_base = OTHER; note = 2'-O-methyluridine-3'-phosphate
  modified_base 18: mod_base = OTHER; note = 2'-O-methylcytidine-3'-phosphate
  modified_base 19: mod_base = OTHER; note = 2'-O-methyluridine-3'-phosphate
  modified_base 20: mod_base = OTHER; note = 2'-O-methylcytidine-3'-phosphate
  modified_base 21: mod_base = OTHER; note = 2'-O-methyladenosine-3'-phosphorothioate
  modified_base 22: mod_base = OTHER; note = 2'-O-methyladenosine-3'-phosphorothioate
  modified_base 23: mod_base = OTHER; note = 2'-O-methyladenosine
ctctccagtgctaccttctcaaa

SEQ ID NO: 2026 - RNA, 21 nt, synthetic construct
  source 1..21: mol_type = other RNA
  modified_base 1: mod_base = OTHER; note = 2'-O-methyladenosine-3'-phosphorothioate
  modified_base 2: mod_base = OTHER; note = 2'-O-methylguanosine-3'-phosphorothioate
  modified_base 3: mod_base = OTHER; note = 2'-O-methyluridine-3'-phosphate
  modified_base 4: mod_base = OTHER; note = 2'-O-methylguanosine-3'-phosphate
  modified_base 5: mod_base = OTHER; note = 2'-O-methylguanosine-3'-phosphate
  modified_base 6: mod_base = OTHER; note = 2'-O-methyladenosine-3'-phosphate
  modified_base 7: mod_base = OTHER; note = 2'-deoxy-2'-fluorocytidine-3'-phosphate
  modified_base 8: mod_base = OTHER; note = 2'-O-methyluridine-3'-phosphate
  modified_base 9: mod_base = OTHER; note = 2'-deoxy-2'-fluorouridine-3'-phosphate
  modified_base 10: mod_base = OTHER; note = 2'-deoxy-2'-fluoroguanosine-3'-phosphate
  modified_base 11: mod_base = OTHER; note = 2'-deoxy-2'-fluorocytidine-3'-phosphate
  modified_base 12: mod_base = OTHER; note = 2'-O-methyluridine-3'-phosphate
  modified_base 13: mod_base = OTHER; note = 2'-O-methylguanosine-3'-phosphate
  modified_base 14: mod_base = OTHER; note = 2'-O-methylcytidine-3'-phosphate
  modified_base 15: mod_base = OTHER; note = 2'-O-methyladenosine-3'-phosphate
  modified_base 16: mod_base = OTHER; note = 2'-O-methyluridine-3'-phosphate
  modified_base 17: mod_base = OTHER; note = 2'-O-methyladenosine-3'-phosphate
  modified_base 18: mod_base = OTHER; note = 2'-O-methyluridine-3'-phosphate
  modified_base 19: mod_base = OTHER; note = 2'-O-methylguanosine-3'-phosphate
  modified_base 20: mod_base = OTHER; note = 2'-O-methyluridine-3'-phosphate
  modified_base 21: mod_base = OTHER; note = 2'-O-methylguanosine-3'-phosphate ((2S,4R)-1-[29-[[2-(acetylamino)-2-deoxy-beta-D-galactopyra nosyl]oxy]-14,14-bis[[3-[[3-[[5-[[2-(acetylamino)-2-deoxy-b eta-D-galactopyranosyl]oxy]-1-oxopentyl]amino]propyl]amino] -3-oxopropoxy]methyl]-1,12,19,25-tetraoxo-16-oxa-13,20,24-t riazanonacos-1-yl]-4-hydroxy-2-pyrrolidinyl)methyl ester
agtggacttgctgcatatgtg

SEQ ID NO: 2027 - RNA, 23 nt, synthetic construct
  source 1..23: mol_type = other RNA
  modified_base 1: mod_base = OTHER; note = 2'-O-methylcytidine-3'-phosphorothioate
  modified_base 2: mod_base = OTHER; note = 2'-deoxy-2'-fluoroadenosine-3'-phosphorothioate
  modified_base 3: mod_base = OTHER; note = 2'-O-methylcytidine-3'-phosphate
  modified_base 4: mod_base = OTHER; note = 2'-O-methyladenosine-3'-phosphate
  modified_base 5: mod_base = OTHER; note = 2'-O-methyluridine-3'-phosphate
  modified_base 6: mod_base = OTHER; note = 2'-deoxy-2'-fluoroadenosine-3'-phosphate
  modified_base 7: mod_base = OTHER; note = 2'-O-methyluridine-3'-phosphate
  modified_base 8: mod_base = OTHER; note = 2'-deoxy-2'-fluoroguanosine-3'-phosphate
  modified_base 9: mod_base = OTHER; note = 2'-deoxy-2'-fluorocytidine-3'-phosphate
  modified_base 10: mod_base = OTHER; note = 2'-O-methyladenosine-3'-phosphate
  modified_base 11: mod_base = OTHER; note = 2'-O-methylguanosine-3'-phosphate
  modified_base 12: mod_base = OTHER; note = 2'-O-methylcytidine-3'-phosphate
  modified_base 13: mod_base = OTHER; note = 2'-O-methyladenosine-3'-phosphate
  modified_base 14: mod_base = OTHER; note = 2'-deoxy-2'-fluoroadenosine-3'-phosphate
  modified_base 15: mod_base = OTHER; note = 2'-O-methylguanosine-3'-phosphate
  modified_base 16: mod_base = OTHER; note = 2'-deoxy-2'-fluorouridine-3'-phosphate
  modified_base 17: mod_base = OTHER; note = 2'-O-methylcytidine-3'-phosphate
  modified_base 18: mod_base = OTHER; note = 2'-O-methylcytidine-3'-phosphate
  modified_base 19: mod_base = OTHER; note = 2'-O-methyladenosine-3'-phosphate
  modified_base 20: mod_base = OTHER; note = 2'-O-methylcytidine-3'-phosphate
  modified_base 21: mod_base = OTHER; note = 2'-O-methyluridine-3'-phosphorothioate
  modified_base 22: mod_base = OTHER; note = 2'-O-methylguanosine-3'-phosphorothioate
  modified_base 23: mod_base = OTHER; note = 2'-O-methyluridine
cacatatgcagcaagtccactgt

SEQ ID NO: 2028 - RNA, 21 nt, synthetic construct
  source 1..21: mol_type = other RNA
  modified_base 1: mod_base = OTHER; note = 2'-O-methylguanosine-3'-phosphorothioate
  modified_base 2: mod_base = OTHER; note = 2'-O-methyluridine-3'-phosphorothioate
  modified_base 3: mod_base = OTHER; note = 2'-O-methylguanosine-3'-phosphate
  modified_base 4: mod_base = OTHER; note = 2'-O-methylguanosine-3'-phosphate
  modified_base 5: mod_base = OTHER; note = 2'-O-methyladenosine-3'-phosphate
  modified_base 6: mod_base = OTHER; note = 2'-O-methylcytidine-3'-phosphate
  modified_base 7: mod_base = OTHER; note = 2'-deoxy-2'-fluorouridine-3'-phosphate
  modified_base 8: mod_base = OTHER; note = 2'-O-methyluridine-3'-phosphate
  modified_base 9: mod_base = OTHER; note = 2'-deoxy-2'-fluoroguanosine-3'-phosphate
  modified_base 10: mod_base = OTHER; note = 2'-deoxy-2'-fluorocytidine-3'-phosphate
  modified_base 11: mod_base = OTHER; note = 2'-deoxy-2'-fluorouridine-3'-phosphate
  modified_base 12: mod_base = OTHER; note = 2'-O-methylguanosine-3'-phosphate
  modified_base 13: mod_base = OTHER; note = 2'-O-methylcytidine-3'-phosphate
  modified_base 14: mod_base = OTHER; note = 2'-O-methyladenosine-3'-phosphate
  modified_base 15: mod_base = OTHER; note = 2'-O-methyluridine-3'-phosphate
  modified_base 16: mod_base = OTHER; note = 2'-O-methyladenosine-3'-phosphate
  modified_base 17: mod_base = OTHER; note = 2'-O-methyluridine-3'-phosphate
  modified_base 18: mod_base = OTHER; note = 2'-O-methylguanosine-3'-phosphate
  modified_base 19: mod_base = OTHER; note = 2'-O-methyluridine-3'-phosphate
  modified_base 20: mod_base = OTHER; note = 2'-O-methylguanosine-3'-phosphate
  modified_base 21: mod_base = OTHER; note = 2'-O-methylguanosine-3'-phosphate ((2S,4R)-1-[29-[[2-(acetylamino)-2-deoxy-beta-D-galactopyra nosyl]oxy]-14,14-bis[[3-[[3-[[5-[[2-(acetylamino)-2-deoxy-b eta-D-galactopyranosyl]oxy]-1-oxopentyl]amino]propyl]amino] -3-oxopropoxy]methyl]-1,12,19,25-tetraoxo-16-oxa-13,20,24-t riazanonacos-1-yl]-4-hydroxy-2-pyrrolidinyl)methyl ester
gtggacttgctgcatatgtgg

SEQ ID NO: 2029 - RNA, 23 nt, synthetic construct
  source 1..23: mol_type = other RNA
  modified_base 1: mod_base = OTHER; note = 2'-O-methylcytidine-3'-phosphorothioate
  modified_base 2: mod_base = OTHER; note = 2'-deoxy-2'-fluorocytidine-3'-phosphorothioate
  modified_base 3: mod_base = OTHER; note = 2'-O-methyladenosine-3'-phosphate
  modified_base 4: mod_base = OTHER; note = 2'-O-methylcytidine-3'-phosphate
  modified_base 5: mod_base = OTHER; note = 2'-O-methyladenosine-3'-phosphate
  modified_base 6: mod_base = OTHER; note = 2'-deoxy-2'-fluorouridine-3'-phosphate
  modified_base 7: mod_base = OTHER; note = 2'-O-methyladenosine-3'-phosphate
  modified_base 8: mod_base = OTHER; note = 2'-deoxy-2'-fluorouridine-3'-phosphate
  modified_base 9: mod_base = OTHER; note = 2'-deoxy-2'-fluoroguanosine-3'-phosphate
  modified_base 10: mod_base = OTHER; note = 2'-O-methylcytidine-3'-phosphate
  modified_base 11: mod_base = OTHER; note = 2'-O-methyladenosine-3'-phosphate
  modified_base 12: mod_base = OTHER; note = 2'-O-methylguanosine-3'-phosphate
  modified_base 13: mod_base = OTHER; note = 2'-O-methylcytidine-3'-phosphate
  modified_base 14: mod_base = OTHER; note = 2'-deoxy-2'-fluoroadenosine-3'-phosphate
  modified_base 15: mod_base = OTHER; note = 2'-O-methyladenosine-3'-phosphate
  modified_base 16: mod_base = OTHER; note = 2'-deoxy-2'-fluoroguanosine-3'-phosphate
  modified_base 17: mod_base = OTHER; note = 2'-O-methyluridine-3'-phosphate
  modified_base 18: mod_base = OTHER; note = 2'-O-methylcytidine-3'-phosphate
  modified_base 19: mod_base = OTHER; note = 2'-O-methylcytidine-3'-phosphate
  modified_base 20: mod_base = OTHER; note = 2'-O-methyladenosine-3'-phosphate
  modified_base 21: mod_base = OTHER; note = 2'-O-methylcytidine-3'-phosphorothioate
  modified_base 22: mod_base = OTHER; note = 2'-O-methyluridine-3'-phosphorothioate
  modified_base 23: mod_base = OTHER; note = 2'-O-methylguanosine
ccacatatgcagcaagtccactg

SEQ ID NO: 2030 - RNA, 21 nt, synthetic construct
  source 1..21: mol_type = other RNA
  modified_base 1: mod_base = OTHER; note = 2'-O-methylcytidine-3'-phosphorothioate
  modified_base 2: mod_base = OTHER; note = 2'-O-methylguanosine-3'-phosphorothioate
  modified_base 3: mod_base = OTHER; note = 2'-O-methyladenosine-3'-phosphate
  modified_base 4: mod_base = OTHER; note = 2'-O-methylcytidine-3'-phosphate
  modified_base 5: mod_base = OTHER; note = 2'-O-methyladenosine-3'-phosphate
  modified_base 6: mod_base = OTHER; note = 2'-O-methylguanosine-3'-phosphate
  modified_base 7: mod_base = OTHER; note = 2'-deoxy-2'-fluorouridine-3'-phosphate
  modified_base 8: mod_base = OTHER; note = 2'-O-methylguanosine-3'-phosphate
  modified_base 9: mod_base = OTHER; note = 2'-deoxy-2'-fluoroguanosine-3'-phosphate
  modified_base 10: mod_base = OTHER; note = 2'-deoxy-2'-fluoroadenosine-3'-phosphate
  modified_base 11: mod_base = OTHER; note = 2'-deoxy-2'-fluorocytidine-3'-phosphate
  modified_base 12: mod_base = OTHER; note = 2'-O-methyluridine-3'-phosphate
  modified_base 13: mod_base = OTHER; note = 2'-O-methyluridine-3'-phosphate
  modified_base 14: mod_base = OTHER; note = 2'-O-methylguanosine-3'-phosphate
  modified_base 15: mod_base = OTHER; note = 2'-O-methylcytidine-3'-phosphate
  modified_base 16: mod_base = OTHER; note = 2'-O-methyluridine-3'-phosphate
  modified_base 17: mod_base = OTHER; note = 2'-O-methylguanosine-3'-phosphate
  modified_base 18: mod_base = OTHER; note = 2'-O-methylcytidine-3'-phosphate
  modified_base 19: mod_base = OTHER; note = 2'-O-methyladenosine-3'-phosphate
  modified_base 20: mod_base = OTHER; note = 2'-O-methyluridine-3'-phosphate
  modified_base 21: mod_base = OTHER; note = 2'-O-methyladenosine-3'-phosphate ((2S,4R)-1-[29-[[2-(acetylamino)-2-deoxy-beta-D-galactopyra nosyl]oxy]-14,14-bis[[3-[[3-[[5-[[2-(acetylamino)-2-deoxy-b eta-D-galactopyranosyl]oxy]-1-oxopentyl]amino]propyl]amino] -3-oxopropoxy]methyl]-1,12,19,25-tetraoxo-16-oxa-13,20,24-t riazanonacos-1-yl]-4-hydroxy-2-pyrrolidinyl)methyl ester
cgacagtggacttgctgcata

SEQ ID NO: 2031 - RNA, 23 nt, synthetic construct
  source 1..23: mol_type = other RNA
  modified_base 1: mod_base = OTHER; note = 2'-O-methyluridine-3'-phosphorothioate
  modified_base 2: mod_base = OTHER; note = 2'-deoxy-2'-fluoroadenosine-3'-phosphorothioate
  modified_base 3: mod_base = OTHER; note = 2'-O-methyluridine-3'-phosphate
  modified_base 4: mod_base = OTHER; note = 2'-O-methylguanosine-3'-phosphate
  modified_base 5: mod_base = OTHER; note = 2'-O-methylcytidine-3'-phosphate
  modified_base 6: mod_base = OTHER; note = 2'-deoxy-2'-fluoroadenosine-3'-phosphate
  modified_base 7: mod_base = OTHER; note = 2'-O-methylguanosine-3'-phosphate
  modified_base 8: mod_base = OTHER; note = 2'-deoxy-2'-fluorocytidine-3'-phosphate
  modified_base 9: mod_base = OTHER; note = 2'-deoxy-2'-fluoroadenosine-3'-phosphate
  modified_base 10: mod_base = OTHER; note = 2'-O-methyladenosine-3'-phosphate
  modified_base 11: mod_base = OTHER; note = 2'-O-methylguanosine-3'-phosphate
  modified_base 12: mod_base = OTHER; note = 2'-O-methyluridine-3'-phosphate
  modified_base 13: mod_base = OTHER; note = 2'-O-methylcytidine-3'-phosphate
  modified_base 14: mod_base = OTHER; note = 2'-deoxy-2'-fluorocytidine-3'-phosphate
  modified_base 15: mod_base = OTHER; note = 2'-O-methyladenosine-3'-phosphate
  modified_base 16: mod_base = OTHER; note = 2'-deoxy-2'-fluorocytidine-3'-phosphate
  modified_base 17: mod_base = OTHER; note = 2'-O-methyluridine-3'-phosphate
  modified_base 18: mod_base = OTHER; note = 2'-O-methylguanosine-3'-phosphate
  modified_base 19: mod_base = OTHER; note = 2'-O-methyluridine-3'-phosphate
  modified_base 20: mod_base = OTHER; note = 2'-O-methylcytidine-3'-phosphate
  modified_base 21: mod_base = OTHER; note = 2'-O-methylguanosine-3'-phosphorothioate
  modified_base 22: mod_base = OTHER; note = 2'-O-methyluridine-3'-phosphorothioate
  modified_base 23: mod_base = OTHER; note = 2'-O-methylcytidine
tatgcagcaagtccactgtcgtc

SEQ ID NO: 2032 - RNA, 21 nt, synthetic construct
  source 1..21: mol_type = other RNA
  modified_base 1: mod_base = OTHER; note = 2'-O-methyladenosine-3'-phosphorothioate
  modified_base 2: mod_base = OTHER; note = 2'-O-methylcytidine-3'-phosphorothioate
  modified_base 3: mod_base = OTHER; note = 2'-O-methylguanosine-3'-phosphate
  modified_base 4: mod_base = OTHER; note = 2'-O-methyladenosine-3'-phosphate
  modified_base 5: mod_base = OTHER; note = 2'-O-methylcytidine-3'-phosphate
  modified_base 6: mod_base = OTHER; note = 2'-O-methyladenosine-3'-phosphate
  modified_base 7: mod_base = OTHER; note = 2'-deoxy-2'-fluoroguanosine-3'-phosphate
  modified_base 8: mod_base = OTHER; note = 2'-O-methyluridine-3'-phosphate
  modified_base 9: mod_base = OTHER; note = 2'-deoxy-2'-fluoroguanosine-3'-phosphate
  modified_base 10: mod_base = OTHER; note = 2'-deoxy-2'-fluoroguanosine-3'-phosphate
  modified_base 11: mod_base = OTHER; note = 2'-deoxy-2'-fluoroadenosine-3'-phosphate
  modified_base 12: mod_base = OTHER; note = 2'-O-methylcytidine-3'-phosphate
  modified_base 13: mod_base = OTHER; note = 2'-O-methyluridine-3'-phosphate
  modified_base 14: mod_base = OTHER; note = 2'-O-methyluridine-3'-phosphate
  modified_base 15: mod_base = OTHER; note = 2'-O-methylguanosine-3'-phosphate
  modified_base 16: mod_base = OTHER; note = 2'-O-methylcytidine-3'-phosphate
  modified_base 17: mod_base = OTHER; note = 2'-O-methyluridine-3'-phosphate
  modified_base 18: mod_base = OTHER; note = 2'-O-methylguanosine-3'-phosphate
  modified_base 19: mod_base = OTHER; note = 2'-O-methylcytidine-3'-phosphate
  modified_base 20: mod_base = OTHER; note = 2'-O-methyladenosine-3'-phosphate
  modified_base 21: mod_base = OTHER; note = 2'-O-methyluridine-3'-phosphate ((2S,4R)-1-[29-[[2-(acetylamino)-2-deoxy-beta-D-galactopyra nosyl]oxy]-14,14-bis[[3-[[3-[[5-[[2-(acetylamino)-2-deoxy-b eta-D-galactopyranosyl]oxy]-1-oxopentyl]amino]propyl]amino] -3-oxopropoxy]methyl]-1,12,19,25-tetraoxo-16-oxa-13,20,24-t riazanonacos-1-yl]-4-hydroxy-2-pyrrolidinyl)methyl ester
acgacagtggacttgctgcat

SEQ ID NO: 2033 - RNA, 23 nt, synthetic construct
  source 1..23: mol_type = other RNA
  modified_base 1: mod_base = OTHER; note = 2'-O-methyladenosine-3'-phosphorothioate
  modified_base 2: mod_base = OTHER; note = 2'-deoxy-2'-fluorouridine-3'-phosphorothioate
  modified_base 3: mod_base = OTHER; note = 2'-O-methylguanosine-3'-phosphate
  modified_base 4: mod_base = OTHER; note = 2'-O-methylcytidine-3'-phosphate
  modified_base 5: mod_base = OTHER; note = 2'-O-methyladenosine-3'-phosphate
  modified_base 6: mod_base = OTHER; note = 2'-deoxy-2'-fluoroguanosine-3'-phosphate
  modified_base 7: mod_base = OTHER; note = 2'-O-methylcytidine-3'-phosphate
  modified_base 8: mod_base = OTHER; note = 2'-deoxy-2'-fluoroadenosine-3'-phosphate
  modified_base 9: mod_base = OTHER; note = 2'-deoxy-2'-fluoroadenosine-3'-phosphate
  modified_base 10: mod_base = OTHER; note = 2'-O-methylguanosine-3'-phosphate
  modified_base 11: mod_base = OTHER; note = 2'-O-methyluridine-3'-phosphate
  modified_base 12: mod_base = OTHER; note = 2'-O-methylcytidine-3'-phosphate
  modified_base 13: mod_base = OTHER; note = 2'-O-methylcytidine-3'-phosphate
  modified_base 14: mod_base = OTHER; note = 2'-deoxy-2'-fluoroadenosine-3'-phosphate
  modified_base 15: mod_base = OTHER; note = 2'-O-methylcytidine-3'-phosphate
  modified_base 16: mod_base = OTHER; note = 2'-deoxy-2'-fluorouridine-3'-phosphate
  modified_base 17: mod_base = OTHER; note = 2'-O-methylguanosine-3'-phosphate
  modified_base 18: mod_base = OTHER; note = 2'-O-methyluridine-3'-phosphate
  modified_base 19: mod_base = OTHER; note = 2'-O-methylcytidine-3'-phosphate
  modified_base 20: mod_base = OTHER; note = 2'-O-methylguanosine-3'-phosphate
  modified_base 21: mod_base = OTHER; note = 2'-O-methyluridine-3'-phosphorothioate
  modified_base 22: mod_base = OTHER; note = 2'-O-methylcytidine-3'-phosphorothioate
  modified_base 23: mod_base = OTHER; note = 2'-O-methyluridine
atgcagcaagtccactgtcgtct

SEQ ID NO: 2034 - RNA, 21 nt, synthetic construct
  source 1..21: mol_type = other RNA
  modified_base 1: mod_base = OTHER; note = 2'-O-methyladenosine-3'-phosphorothioate
  modified_base 2: mod_base = OTHER; note = 2'-O-methyladenosine-3'-phosphorothioate
  modified_base 3: mod_base = OTHER; note = 2'-O-methylguanosine-3'-phosphate
  modified_base 4: mod_base = OTHER; note = 2'-O-methylguanosine-3'-phosphate
  modified_base 5: mod_base = OTHER; note = 2'-O-methyluridine-3'-phosphate
  modified_base 6: mod_base = OTHER; note = 2'-O-methylguanosine-3'-phosphate
  modified_base 7: mod_base = OTHER; note = 2'-deoxy-2'-fluorouridine-3'-phosphate
  modified_base 8: mod_base = OTHER; note = 2'-O-methyluridine-3'-phosphate
  modified_base 9: mod_base = OTHER; note = 2'-deoxy-2'-fluorocytidine-3'-phosphate
  modified_base 10: mod_base = OTHER; note = 2'-deoxy-2'-fluoroadenosine-3'-phosphate
  modified_base 11: mod_base = OTHER; note = 2'-deoxy-2'-fluoroadenosine-3'-phosphate
  modified_base 12: mod_base = OTHER; note = 2'-O-methylguanosine-3'-phosphate
  modified_base 13: mod_base = OTHER; note = 2'-O-methyladenosine-3'-phosphate
  modified_base 14: mod_base = OTHER; note = 2'-O-methyluridine-3'-phosphate
  modified_base 15: mod_base = OTHER; note = 2'-O-methylguanosine-3'-phosphate
  modified_base 16: mod_base = OTHER; note = 2'-O-methyluridine-3'-phosphate
  modified_base 17: mod_base = OTHER; note = 2'-O-methylcytidine-3'-phosphate
  modified_base 18: mod_base = OTHER; note = 2'-O-methylcytidine-3'-phosphate
  modified_base 19: mod_base = OTHER; note = 2'-O-methyluridine-3'-phosphate
  modified_base 20: mod_base = OTHER; note = 2'-O-methylcytidine-3'-phosphate
  modified_base 21: mod_base = OTHER; note = 2'-O-methylguanosine-3'-phosphate ((2S,4R)-1-[29-[[2-(acetylamino)-2-deoxy-beta-D-galactopyra nosyl]oxy]-14,14-bis[[3-[[3-[[5-[[2-(acetylamino)-2-deoxy-b eta-D-galactopyranosyl]oxy]-1-oxopentyl]amino]propyl]amino] -3-oxopropoxy]methyl]-1,12,19,25-tetraoxo-16-oxa-13,20,24-t riazanonacos-1-yl]-4-hydroxy-2-pyrrolidinyl)methyl ester
aaggtgttcaagatgtcctcg

SEQ ID NO: 2035 - RNA, 23 nt, synthetic construct
  source 1..23: mol_type = other RNA
  modified_base 1: mod_base = OTHER; note = 2'-O-methylcytidine-3'-phosphorothioate
  modified_base 2: mod_base = OTHER; note = 2'-deoxy-2'-fluoroguanosine-3'-phosphorothioate
  modified_base 3: mod_base = OTHER; note = 2'-O-methyladenosine-3'-phosphate
  modified_base 4: mod_base = OTHER; note = 2'-O-methylguanosine-3'-phosphate
  modified_base 5: mod_base = OTHER; note = 2'-O-methylguanosine-3'-phosphate
  modified_base 6: mod_base = OTHER; note = 2'-deoxy-2'-fluoroadenosine-3'-phosphate
  modified_base 7: mod_base = OTHER; note = 2'-O-methylcytidine-3'-phosphate
  modified_base 8: mod_base = OTHER; note = 2'-deoxy-2'-fluoroadenosine-3'-phosphate
  modified_base 9: mod_base = OTHER; note = 2'-deoxy-2'-fluorouridine-3'-phosphate
  modified_base 10: mod_base = OTHER; note = 2'-O-methylcytidine-3'-phosphate
  modified_base 11: mod_base = OTHER; note = 2'-O-methyluridine-3'-phosphate
  modified_base 12: mod_base = OTHER; note = 2'-O-methyluridine-3'-phosphate
  modified_base 13: mod_base = OTHER; note = 2'-O-methylguanosine-3'-phosphate
  modified_base 14: mod_base = OTHER; note = 2'-deoxy-2'-fluoroadenosine-3'-phosphate
  modified_base 15: mod_base = OTHER; note = 2'-O-methyladenosine-3'-phosphate
  modified_base 16: mod_base = OTHER; note = 2'-deoxy-2'-fluorocytidine-3'-phosphate
  modified_base 17: mod_base = OTHER; note = 2'-O-methyladenosine-3'-phosphate
  modified_base 18: mod_base = OTHER; note = 2'-O-methylcytidine-3'-phosphate
  modified_base 19: mod_base = OTHER; note = 2'-O-methylcytidine-3'-phosphate
  modified_base 20: mod_base = OTHER; note = 2'-O-methyluridine-3'-phosphate
  modified_base 21: mod_base = OTHER; note = 2'-O-methyluridine-3'-phosphorothioate
  modified_base 22: mod_base = OTHER; note = 2'-O-methyluridine-3'-phosphorothioate
  modified_base 23: mod_base = OTHER; note = 2'-O-methylcytidine
cgaggacatcttgaacacctttc

SEQ ID NO: 2036 - RNA, 21 nt, synthetic construct
  source 1..21: mol_type = other RNA
  modified_base 1: mod_base = OTHER; note = 2'-O-methyladenosine-3'-phosphorothioate
  modified_base 2: mod_base = OTHER; note = 2'-O-methylguanosine-3'-phosphorothioate
  modified_base 3: mod_base = OTHER; note = 2'-O-methylguanosine-3'-phosphate
  modified_base 4: mod_base = OTHER; note = 2'-O-methyluridine-3'-phosphate
  modified_base 5: mod_base = OTHER; note = 2'-O-methylguanosine-3'-phosphate
  modified_base 6: mod_base = OTHER; note = 2'-O-methyluridine-3'-phosphate
  modified_base 7: mod_base = OTHER; note = 2'-deoxy-2'-fluorouridine-3'-phosphate
  modified_base 8: mod_base = OTHER; note = 2'-O-methylcytidine-3'-phosphate
  modified_base 9: mod_base = OTHER; note = 2'-deoxy-2'-fluoroadenosine-3'-phosphate
  modified_base 10: mod_base = OTHER; note = 2'-deoxy-2'-fluoroadenosine-3'-phosphate
  modified_base 11: mod_base = OTHER; note = 2'-deoxy-2'-fluoroguanosine-3'-phosphate
  modified_base 12: mod_base = OTHER; note = 2'-O-methyladenosine-3'-phosphate
  modified_base 13: mod_base = OTHER; note = 2'-O-methyluridine-3'-phosphate
  modified_base 14: mod_base = OTHER; note = 2'-O-methylguanosine-3'-phosphate
  modified_base 15: mod_base = OTHER; note = 2'-O-methyluridine-3'-phosphate
  modified_base 16: mod_base = OTHER; note = 2'-O-methylcytidine-3'-phosphate
  modified_base 17: mod_base = OTHER; note = 2'-O-methylcytidine-3'-phosphate
  modified_base 18: mod_base = OTHER; note = 2'-O-methyluridine-3'-phosphate
  modified_base 19: mod_base = OTHER; note = 2'-O-methylcytidine-3'-phosphate
  modified_base 20: mod_base = OTHER; note = 2'-O-methylguanosine-3'-phosphate
  modified_base 21: mod_base = OTHER; note = 2'-O-methyladenosine-3'-phosphate ((2S,4R)-1-[29-[[2-(acetylamino)-2-deoxy-beta-D-galactopyra nosyl]oxy]-14,14-bis[[3-[[3-[[5-[[2-(acetylamino)-2-deoxy-b eta-D-galactopyranosyl]oxy]-1-oxopentyl]amino]propyl]amino] -3-oxopropoxy]methyl]-1,12,19,25-tetraoxo-16-oxa-13,20,24-t riazanonacos-1-yl]-4-hydroxy-2-pyrrolidinyl)methyl ester
aggtgttcaagatgtcctcga

SEQ ID NO: 2037 - RNA, 23 nt, synthetic construct
  source 1..23: mol_type = other RNA
  modified_base 1: mod_base = OTHER; note = 2'-O-methyluridine-3'-phosphorothioate
  modified_base 2: mod_base = OTHER; note = 2'-deoxy-2'-fluorocytidine-3'-phosphorothioate
  modified_base 3: mod_base = OTHER; note = 2'-O-methylguanosine-3'-phosphate
  modified_base 4: mod_base = OTHER; note = 2'-O-methyladenosine-3'-phosphate
  modified_base 5: mod_base = OTHER; note = 2'-O-methylguanosine-3'-phosphate
  modified_base 6: mod_base = OTHER; note = 2'-deoxy-2'-fluoroguanosine-3'-phosphate
  modified_base 7: mod_base = OTHER; note = 2'-O-methyladenosine-3'-phosphate
  modified_base 8: mod_base = OTHER; note = 2'-deoxy-2'-fluorocytidine-3'-phosphate
  modified_base 9: mod_base = OTHER; note = 2'-deoxy-2'-fluoroadenosine-3'-phosphate
  modified_base 10: mod_base = OTHER; note = 2'-O-methyluridine-3'-phosphate
  modified_base 11: mod_base = OTHER; note = 2'-O-methylcytidine-3'-phosphate
  modified_base 12: mod_base = OTHER; note = 2'-O-methyluridine-3'-phosphate
  modified_base 13: mod_base = OTHER; note = 2'-O-methyluridine-3'-phosphate
  modified_base 14: mod_base = OTHER; note = 2'-deoxy-2'-fluoroguanosine-3'-phosphate
  modified_base 15: mod_base = OTHER; note = 2'-O-methyladenosine-3'-phosphate
  modified_base 16: mod_base = OTHER; note = 2'-deoxy-2'-fluoroadenosine-3'-phosphate
  modified_base 17: mod_base = OTHER; note = 2'-O-methylcytidine-3'-phosphate
  modified_base 18: mod_base = OTHER; note = 2'-O-methyladenosine-3'-phosphate
  modified_base 19: mod_base = OTHER; note = 2'-O-methylcytidine-3'-phosphate
  modified_base 20: mod_base = OTHER; note = 2'-O-methylcytidine-3'-phosphate
  modified_base 21: mod_base = OTHER; note = 2'-O-methyluridine-3'-phosphorothioate
  modified_base 22: mod_base = OTHER; note = 2'-O-methyluridine-3'-phosphorothioate
  modified_base 23: mod_base = OTHER; note = 2'-O-methyluridine
tcgaggacatcttgaacaccttt

SEQ ID NO: 2038 - RNA, 21 nt, synthetic construct
  source 1..21: mol_type = other RNA
  modified_base 1: mod_base = OTHER; note = 2'-O-methylguanosine-3'-phosphorothioate
  modified_base 2: mod_base = OTHER; note = 2'-O-methyladenosine-3'-phosphorothioate
  modified_base 3: mod_base = OTHER; note = 2'-O-methylguanosine-3'-phosphate
  modified_base 4: mod_base = OTHER; note = 2'-O-methyladenosine-3'-phosphate
  modified_base 5: mod_base = OTHER; note = 2'-O-methyladenosine-3'-phosphate
  modified_base 6: mod_base = OTHER; note = 2'-O-methyladenosine-3'-phosphate
  modified_base 7: mod_base = OTHER; note = 2'-deoxy-2'-fluoroguanosine-3'-phosphate
  modified_base 8: mod_base = OTHER; note = 2'-O-methylguanosine-3'-phosphate
  modified_base 9: mod_base = OTHER; note = 2'-deoxy-2'-fluorouridine-3'-phosphate
  modified_base 10: mod_base = OTHER; note = 2'-deoxy-2'-fluoroguanosine-3'-phosphate
  modified_base 11: mod_base = OTHER; note = 2'-deoxy-2'-fluorouridine-3'-phosphate
  modified_base 12: mod_base = OTHER; note = 2'-O-methyluridine-3'-phosphate
  modified_base 13: mod_base = OTHER; note = 2'-O-methylcytidine-3'-phosphate
  modified_base 14: mod_base = OTHER; note = 2'-O-methyladenosine-3'-phosphate
  modified_base 15: mod_base = OTHER; note = 2'-O-methyladenosine-3'-phosphate
  modified_base 16: mod_base = OTHER; note = 2'-O-methylguanosine-3'-phosphate
  modified_base 17: mod_base = OTHER; note = 2'-O-methyladenosine-3'-phosphate
  modified_base 18: mod_base = OTHER; note = 2'-O-methyluridine-3'-phosphate
  modified_base 19: mod_base = OTHER; note = 2'-O-methylguanosine-3'-phosphate
  modified_base 20: mod_base = OTHER; note = 2'-O-methyluridine-3'-phosphate
  modified_base 21: mod_base = OTHER; note = 2'-O-methylcytidine-3'-phosphate ((2S,4R)-1-[29-[[2-(acetylamino)-2-deoxy-beta-D-galactopyra nosyl]oxy]-14,14-bis[[3-[[3-[[5-[[2-(acetylamino)-2-deoxy-b eta-D-galactopyranosyl]oxy]-1-oxopentyl]amino]propyl]amino] -3-oxopropoxy]methyl]-1,12,19,25-tetraoxo-16-oxa-13,20,24-t riazanonacos-1-yl]-4-hydroxy-2-pyrrolidinyl)methyl ester
gagaaaggtgttcaagatgtc

SEQ ID NO: 2039 - RNA, 23 nt, synthetic construct
  source 1..23: mol_type = other RNA
  modified_base 1: mod_base = OTHER; note = 2'-O-methylguanosine-3'-phosphorothioate
  modified_base 2: mod_base = OTHER; note = 2'-deoxy-2'-fluoroadenosine-3'-phosphorothioate
  modified_base 3: mod_base = OTHER; note = 2'-O-methylcytidine-3'-phosphate
  modified_base 4: mod_base = OTHER; note = 2'-O-methyladenosine-3'-phosphate
  modified_base 5: mod_base = OTHER; note = 2'-O-methyluridine-3'-phosphate
  modified_base 6: mod_base = OTHER; note = 2'-deoxy-2'-fluorocytidine-3'-phosphate
  modified_base 7: mod_base = OTHER; note = 2'-O-methyluridine-3'-phosphate
  modified_base 8: mod_base = OTHER; note = 2'-deoxy-2'-fluorouridine-3'-phosphate
  modified_base 9: mod_base = OTHER; note = 2'-deoxy-2'-fluoroguanosine-3'-phosphate
  modified_base 10: mod_base = OTHER; note = 2'-O-methyladenosine-3'-phosphate
  modified_base 11: mod_base = OTHER; note = 2'-O-methyladenosine-3'-phosphate
  modified_base 12: mod_base = OTHER; note = 2'-O-methylcytidine-3'-phosphate
  modified_base 13: mod_base = OTHER; note = 2'-O-methyladenosine-3'-phosphate
  modified_base 14: mod_base = OTHER; note = 2'-deoxy-2'-fluorocytidine-3'-phosphate
  modified_base 15: mod_base = OTHER; note = 2'-O-methylcytidine-3'-phosphate
  modified_base 16: mod_base = OTHER; note = 2'-deoxy-2'-fluorouridine-3'-phosphate
  modified_base 17: mod_base = OTHER; note = 2'-O-methyluridine-3'-phosphate
  modified_base 18: mod_base = OTHER; note = 2'-O-methyluridine-3'-phosphate
  modified_base 19: mod_base = OTHER; note = 2'-O-methylcytidine-3'-phosphate
  modified_base 20: mod_base = OTHER; note = 2'-O-methyluridine-3'-phosphate
  modified_base 21: mod_base = OTHER; note = 2'-O-methylcytidine-3'-phosphorothioate
  modified_base 22: mod_base = OTHER; note = 2'-O-methylcytidine-3'-phosphorothioate
  modified_base 23: mod_base = OTHER; note = 2'-O-methylcytidine
gacatcttgaacacctttctccc

SEQ ID NO: 2040 - RNA, 21 nt, synthetic construct
  source 1..21: mol_type = other RNA
  modified_base 1: mod_base = OTHER; note = 2'-O-methylguanosine-3'-phosphorothioate
  modified_base 2: mod_base = OTHER; note = 2'-O-methylguanosine-3'-phosphorothioate
  modified_base 3: mod_base = OTHER; note = 2'-O-methyladenosine-3'-phosphate
  modified_base 4: mod_base = OTHER; note = 2'-O-methylguanosine-3'-phosphate
  modified_base 5: mod_base = OTHER; note = 2'-O-methyladenosine-3'-phosphate
  modified_base 6: mod_base = OTHER; note = 2'-O-methyladenosine-3'-phosphate
  modified_base 7: mod_base = OTHER; note = 2'-deoxy-2'-fluoroadenosine-3'-phosphate
  modified_base 8: mod_base = OTHER; note = 2'-O-methylguanosine-3'-phosphate
  modified_base 9: mod_base = OTHER; note = 2'-deoxy-2'-fluoroguanosine-3'-phosphate
  modified_base 10: mod_base = OTHER; note = 2'-deoxy-2'-fluorouridine-3'-phosphate
  modified_base 11: mod_base = OTHER; note = 2'-deoxy-2'-fluoroguanosine-3'-phosphate
  modified_base 12: mod_base = OTHER; note = 2'-O-methyluridine-3'-phosphate
  modified_base 13: mod_base = OTHER; note = 2'-O-methyluridine-3'-phosphate
  modified_base 14: mod_base = OTHER; note = 2'-O-methylcytidine-3'-phosphate
  modified_base 15: mod_base = OTHER; note = 2'-O-methyladenosine-3'-phosphate
  modified_base 16: mod_base = OTHER; note = 2'-O-methyladenosine-3'-phosphate
  modified_base 17: mod_base = OTHER; note = 2'-O-methylguanosine-3'-phosphate
  modified_base 18: mod_base = OTHER; note = 2'-O-methyladenosine-3'-phosphate
  modified_base 19: mod_base = OTHER; note = 2'-O-methyluridine-3'-phosphate
  modified_base 20: mod_base = OTHER; note = 2'-O-methylguanosine-3'-phosphate
  modified_base 21: mod_base = OTHER; note = 2'-O-methyluridine-3'-phosphate ((2S,4R)-1-[29-[[2-(acetylamino)-2-deoxy-beta-D-galactopyra nosyl]oxy]-14,14-bis[[3-[[3-[[5-[[2-(acetylamino)-2-deoxy-b eta-D-galactopyranosyl]oxy]-1-oxopentyl]amino]propyl]amino] -3-oxopropoxy]methyl]-1,12,19,25-tetraoxo-16-oxa-13,20,24-t riazanonacos-1-yl]-4-hydroxy-2-pyrrolidinyl)methyl ester
ggagaaaggtgttcaagatgt

SEQ ID NO: 2041 - RNA, 23 nt, synthetic construct
  source 1..23: mol_type = other RNA
  modified_base 1: mod_base = OTHER; note = 2'-O-methyladenosine-3'-phosphorothioate
  modified_base 2: mod_base = OTHER; note = 2'-deoxy-2'-fluorocytidine-3'-phosphorothioate
  modified_base 3: mod_base = OTHER; note = 2'-O-methyladenosine-3'-phosphate
  modified_base 4: mod_base = OTHER; note = 2'-O-methyluridine-3'-phosphate
  modified_base 5: mod_base = OTHER; note = 2'-O-methylcytidine-3'-phosphate
  modified_base 6: mod_base = OTHER; note = 2'-deoxy-2'-fluorouridine-3'-phosphate
  modified_base 7: mod_base = OTHER; note = 2'-O-methyluridine-3'-phosphate
  modified_base 8: mod_base = OTHER; note = 2'-deoxy-2'-fluoroguanosine-3'-phosphate
  modified_base 9: mod_base = OTHER; note = 2'-deoxy-2'-fluoroadenosine-3'-phosphate
  modified_base 10: mod_base = OTHER; note = 2'-O-methyladenosine-3'-phosphate
  modified_base 11: mod_base = OTHER; note = 2'-O-methylcytidine-3'-phosphate
  modified_base 12: mod_base = OTHER; note = 2'-O-methyladenosine-3'-phosphate
  modified_base 13: mod_base = OTHER; note = 2'-O-methylcytidine-3'-phosphate
  modified_base 14: mod_base = OTHER; note = 2'-deoxy-2'-fluorocytidine-3'-phosphate
  modified_base 15: mod_base = OTHER; note = 2'-O-methyluridine-3'-phosphate
  modified_base 16: mod_base = OTHER; note = 2'-deoxy-2'-fluorouridine-3'-phosphate
  modified_base 17: mod_base = OTHER; note = 2'-O-methyluridine-3'-phosphate
  modified_base 18: mod_base = OTHER; note = 2'-O-methylcytidine-3'-phosphate
  modified_base 19: mod_base = OTHER; note = 2'-O-methyluridine-3'-phosphate
  modified_base 20: mod_base = OTHER; note = 2'-O-methylcytidine-3'-phosphate
  modified_base 21: mod_base = OTHER; note = 2'-O-methylcytidine-3'-phosphorothioate
  modified_base 22: mod_base = OTHER; note = 2'-O-methylcytidine-3'-phosphorothioate
  modified_base 23: mod_base = OTHER; note = 2'-O-methylcytidine
acatcttgaacacctttctcccc

SEQ ID NO: 2042 - RNA, 21 nt, synthetic construct
  source 1..21: mol_type = other RNA
  modified_base 1: mod_base = OTHER; note = 2'-O-methyladenosine-3'-phosphorothioate
  modified_base 2: mod_base = OTHER; note = 2'-O-methyladenosine-3'-phosphorothioate
  modified_base 3: mod_base = OTHER; note = 2'-O-methylcytidine-3'-phosphate
  modified_base 4: mod_base = OTHER; note = 2'-O-methylcytidine-3'-phosphate
  modified_base 5: mod_base = OTHER; note = 2'-O-methylguanosine-3'-phosphate
  modified_base 6: mod_base = OTHER; note = 2'-O-methyluridine-3'-phosphate
  modified_base 7: mod_base = OTHER; note = 2'-deoxy-2'-fluorocytidine-3'-phosphate
  modified_base 8: mod_base = OTHER; note = 2'-O-methyluridine-3'-phosphate
  modified_base 9: mod_base = OTHER; note = 2'-deoxy-2'-fluoroguanosine-3'-phosphate
  modified_base 10: mod_base = OTHER; note = 2'-deoxy-2'-fluoroguanosine-3'-phosphate
  modified_base 11: mod_base = OTHER; note = 2'-deoxy-2'-fluoroadenosine-3'-phosphate
  modified_base 12: mod_base = OTHER; note = 2'-O-methyluridine-3'-phosphate
  modified_base 13: mod_base = OTHER; note = 2'-O-methylguanosine-3'-phosphate
  modified_base 14: mod_base = OTHER; note = 2'-O-methyladenosine-3'-phosphate
  modified_base 15: mod_base = OTHER; note = 2'-O-methyluridine-3'-phosphate
  modified_base 16: mod_base = OTHER; note = 2'-O-methylguanosine-3'-phosphate
  modified_base 17: mod_base = OTHER; note = 2'-O-methyluridine-3'-phosphate
  modified_base 18: mod_base = OTHER; note = 2'-O-methylguanosine-3'-phosphate
  modified_base 19: mod_base = OTHER; note = 2'-O-methylcytidine-3'-phosphate
  modified_base 20: mod_base = OTHER; note = 2'-O-methylguanosine-3'-phosphate
  modified_base 21: mod_base = OTHER; note = 2'-O-methyluridine-3'-phosphate ((2S,4R)-1-[29-[[2-(acetylamino)-2-deoxy-beta-D-galactopyra nosyl]oxy]-14,14-bis[[3-[[3-[[5-[[2-(acetylamino)-2-deoxy-b eta-D-galactopyranosyl]oxy]-1-oxopentyl]amino]propyl]amino] -3-oxopropoxy]methyl]-1,12,19,25-tetraoxo-16-oxa-13,20,24-t riazanonacos-1-yl]-4-hydroxy-2-pyrrolidinyl)methyl ester
aaccgtctggatgatgtgcgt

SEQ ID NO: 2043 - RNA, 23 nt, synthetic construct
  source 1..23: mol_type = other RNA
  modified_base 1: mod_base = OTHER; note = 2'-O-methyladenosine-3'-phosphorothioate
  modified_base 2: mod_base = OTHER; note = 2'-deoxy-2'-fluorocytidine-3'-phosphorothioate
  modified_base 3: mod_base = OTHER; note = 2'-O-methylguanosine-3'-phosphate
  modified_base 4: mod_base = OTHER; note = 2'-O-methylcytidine-3'-phosphate
  modified_base 5: mod_base = OTHER; note = 2'-O-methyladenosine-3'-phosphate
  modified_base 6: mod_base = OTHER; note = 2'-deoxy-2'-fluorocytidine-3'-phosphate
  modified_base 7: mod_base = OTHER; note = 2'-O-methyladenosine-3'-phosphate
  modified_base 8: mod_base = OTHER; note = 2'-deoxy-2'-fluorouridine-3'-phosphate
  modified_base 9: mod_base = OTHER; note = 2'-deoxy-2'-fluorocytidine-3'-phosphate
  modified_base 10: mod_base = OTHER; note = 2'-O-methyladenosine-3'-phosphate
  modified_base 11: mod_base = OTHER; note = 2'-O-methyluridine-3'-phosphate
  modified_base 12: mod_base = OTHER; note = 2'-O-methylcytidine-3'-phosphate
  modified_base 13: mod_base = OTHER; note = 2'-O-methylcytidine-3'-phosphate
  modified_base 14: mod_base = OTHER; note = 2'-deoxy-2'-fluoroadenosine-3'-phosphate
  modified_base 15: mod_base = OTHER; note = 2'-O-methylguanosine-3'-phosphate
  modified_base 16: mod_base = OTHER; note = 2'-deoxy-2'-fluoroadenosine-3'-phosphate
  modified_base 17: mod_base = OTHER; note = 2'-O-methylcytidine-3'-phosphate
  modified_base 18: mod_base = OTHER; note = 2'-O-methylguanosine-3'-phosphate
  modified_base 19: mod_base = OTHER; note = 2'-O-methylguanosine-3'-phosphate
  modified_base 20: mod_base = OTHER; note = 2'-O-methyluridine-3'-phosphate
  modified_base 21: mod_base = OTHER; note = 2'-O-methyluridine-3'-phosphorothioate
  modified_base 22: mod_base = OTHER; note = 2'-O-methylguanosine-3'-phosphorothioate
  modified_base 23: mod_base = OTHER; note = 2'-O-methylcytidine
acgcacatcatccagacggttgc

SEQ ID NO: 2044 - RNA, 21 nt, synthetic construct
  source 1..21: mol_type = other RNA
  modified_base 1: mod_base = OTHER; note = 2'-O-methyladenosine-3'-phosphorothioate
  modified_base 2: mod_base = OTHER; note = 2'-O-methylcytidine-3'-phosphorothioate
  modified_base 3: mod_base = OTHER; note = 2'-O-methylcytidine-3'-phosphate
  modified_base 4: mod_base = OTHER; note = 2'-O-methylguanosine-3'-phosphate
  modified_base 5: mod_base = OTHER; note = 2'-O-methyluridine-3'-phosphate
  modified_base 6: mod_base = OTHER; note = 2'-O-methylcytidine-3'-phosphate
  modified_base 7: mod_base = OTHER; note = 2'-deoxy-2'-fluorouridine-3'-phosphate
  modified_base 8: mod_base = OTHER; note = 2'-O-methylguanosine-3'-phosphate
  modified_base 9: mod_base = OTHER; note = 2'-deoxy-2'-fluoroguanosine-3'-phosphate
  modified_base 10: mod_base = OTHER; note = 2'-deoxy-2'-fluoroadenosine-3'-phosphate
  modified_base 11: mod_base = OTHER; note = 2'-deoxy-2'-fluorouridine-3'-phosphate
  modified_base 12: mod_base = OTHER; note = 2'-O-methylguanosine-3'-phosphate
  modified_base 13: mod_base = OTHER; note = 2'-O-methyladenosine-3'-phosphate
  modified_base 14: mod_base = OTHER; note = 2'-O-methyluridine-3'-phosphate
  modified_base 15: mod_base = OTHER; note = 2'-O-methylguanosine-3'-phosphate
  modified_base 16: mod_base = OTHER; note = 2'-O-methyluridine-3'-phosphate
  modified_base 17: mod_base = OTHER; note = 2'-O-methylguanosine-3'-phosphate
  modified_base 18: mod_base = OTHER; note = 2'-O-methylcytidine-3'-phosphate
  modified_base 19: mod_base = OTHER; note = 2'-O-methylguanosine-3'-phosphate
  modified_base 20: mod_base = OTHER; note = 2'-O-methyluridine-3'-phosphate
  modified_base 21: mod_base = OTHER; note = 2'-O-methyladenosine-3'-phosphate ((2S,4R)-1-[29-[[2-(acetylamino)-2-deoxy-beta-D-galactopyra nosyl]oxy]-14,14-bis[[3-[[3-[[5-[[2-(acetylamino)-2-deoxy-b eta-D-galactopyranosyl]oxy]-1-oxopentyl]amino]propyl]amino] -3-oxopropoxy]methyl]-1,12,19,25-tetraoxo-16-oxa-13,20,24-t riazanonacos-1-yl]-4-hydroxy-2-pyrrolidinyl)methyl ester
accgtctggatgatgtgcgta

SEQ ID NO: 2045 - RNA, 23 nt, synthetic construct
  source 1..23: mol_type = other RNA
  modified_base 1: mod_base = OTHER; note = 2'-O-methyluridine-3'-phosphorothioate
  modified_base 2: mod_base = OTHER; note = 2'-deoxy-2'-fluoroadenosine-3'-phosphorothioate
  modified_base 3: mod_base = OTHER; note = 2'-O-methylcytidine-3'-phosphate
  modified_base 4: mod_base = OTHER; note = 2'-O-methylguanosine-3'-phosphate
  modified_base 5: mod_base = OTHER; note = 2'-O-methylcytidine-3'-phosphate
  modified_base 6: mod_base = OTHER; note = 2'-deoxy-2'-fluoroadenosine-3'-phosphate
  modified_base 7: mod_base = OTHER; note = 2'-O-methylcytidine-3'-phosphate
  modified_base 8: mod_base = OTHER; note = 2'-deoxy-2'-fluoroadenosine-3'-phosphate
  modified_base 9: mod_base = OTHER; note = 2'-deoxy-2'-fluorouridine-3'-phosphate
  modified_base 10: mod_base = OTHER; note = 2'-O-methylcytidine-3'-phosphate
  modified_base 11: mod_base = OTHER; note = 2'-O-methyladenosine-3'-phosphate
  modified_base 12: mod_base = OTHER; note = 2'-O-methyluridine-3'-phosphate
  modified_base 13: mod_base = OTHER; note = 2'-O-methylcytidine-3'-phosphate
  modified_base 14: mod_base = OTHER; note = 2'-deoxy-2'-fluorocytidine-3'-phosphate
  modified_base 15: mod_base = OTHER; note = 2'-O-methyladenosine-3'-phosphate
  modified_base 16: mod_base = OTHER; note = 2'-deoxy-2'-fluoroguanosine-3'-phosphate
  modified_base 17: mod_base = OTHER; note = 2'-O-methyladenosine-3'-phosphate
  modified_base 18: mod_base = OTHER; note = 2'-O-methylcytidine-3'-phosphate
  modified_base 19: mod_base = OTHER; note = 2'-O-methylguanosine-3'-phosphate
  modified_base 20: mod_base = OTHER; note = 2'-O-methylguanosine-3'-phosphate
  modified_base 21: mod_base = OTHER; note = 2'-O-methyluridine-3'-phosphorothioate
  modified_base 22: mod_base = OTHER; note = 2'-O-methyluridine-3'-phosphorothioate
  modified_base 23: mod_base = OTHER; note = 2'-O-methylguanosine
tacgcacatcatccagacggttg

SEQ ID NO: 2046 - RNA, 21 nt, synthetic construct
  source 1..21: mol_type = other RNA
  modified_base 1: mod_base = OTHER; note = 2'-O-methylguanosine-3'-phosphorothioate
  modified_base 2: mod_base = OTHER; note = 2'-O-methylguanosine-3'-phosphorothioate
  modified_base 3: mod_base = OTHER; note = 2'-O-methylguanosine-3'-phosphate
  modified_base 4: mod_base = OTHER; note = 2'-O-methylcytidine-3'-phosphate
  modified_base 5: mod_base = OTHER; note = 2'-O-methyladenosine-3'-phosphate
  modified_base 6: mod_base = OTHER; note = 2'-O-methyladenosine-3'-phosphate
  modified_base 7: mod_base = OTHER; note = 2'-deoxy-2'-fluorocytidine-3'-phosphate
  modified_base 8: mod_base = OTHER; note = 2'-O-methylcytidine-3'-phosphate
  modified_base 9: mod_base = OTHER; note = 2'-deoxy-2'-fluoroguanosine-3'-phosphate
  modified_base 10: mod_base = OTHER; note = 2'-deoxy-2'-fluorouridine-3'-phosphate
  modified_base 11: mod_base = OTHER; note = 2'-deoxy-2'-fluorocytidine-3'-phosphate
  modified_base 12: mod_base = OTHER; note = 2'-O-methyluridine-3'-phosphate
  modified_base 13: mod_base = OTHER; note = 2'-O-methylguanosine-3'-phosphate
  modified_base 14: mod_base = OTHER; note = 2'-O-methylguanosine-3'-phosphate
  modified_base 15: mod_base = OTHER; note = 2'-O-methyladenosine-3'-phosphate
  modified_base 16: mod_base = OTHER; note = 2'-O-methyluridine-3'-phosphate
  modified_base 17: mod_base = OTHER; note = 2'-O-methylguanosine-3'-phosphate
  modified_base 18: mod_base = OTHER; note = 2'-O-methyladenosine-3'-phosphate
  modified_base 19: mod_base = OTHER; note = 2'-O-methyluridine-3'-phosphate
  modified_base 20: mod_base = OTHER; note = 2'-O-methylguanosine-3'-phosphate
  modified_base 21: mod_base = OTHER; note = 2'-O-methyluridine-3'-phosphate ((2S,4R)-1-[29-[[2-(acetylamino)-2-deoxy-beta-D-galactopyra nosyl]oxy]-14,14-bis[[3-[[3-[[5-[[2-(acetylamino)-2-deoxy-b eta-D-galactopyranosyl]oxy]-1-oxopentyl]amino]propyl]amino] -3-oxopropoxy]methyl]-1,12,19,25-tetraoxo-16-oxa-13,20,24-t riazanonacos-1-yl]-4-hydroxy-2-pyrrolidinyl)methyl ester
gggcaaccgtctggatgatgt

SEQ ID NO: 2047 - RNA, 23 nt, synthetic construct
  source 1..23: mol_type = other RNA
  modified_base 1: mod_base = OTHER; note = 2'-O-methyladenosine-3'-phosphorothioate
  modified_base 2: mod_base = OTHER; note = 2'-deoxy-2'-fluorocytidine-3'-phosphorothioate
  modified_base 3: mod_base = OTHER; note = 2'-O-methyladenosine-3'-phosphate
  modified_base 4: mod_base = OTHER; note = 2'-O-methyluridine-3'-phosphate
  modified_base 5: mod_base = OTHER; note = 2'-O-methylcytidine-3'-phosphate
  modified_base 6: mod_base = OTHER; note = 2'-deoxy-2'-fluoroadenosine-3'-phosphate
  modified_base 7: mod_base = OTHER; note = 2'-O-methyluridine-3'-phosphate
  modified_base 8: mod_base = OTHER; note = 2'-deoxy-2'-fluorocytidine-3'-phosphate
  modified_base 9: mod_base = OTHER; note = 2'-deoxy-2'-fluorocytidine-3'-phosphate
  modified_base 10: mod_base = OTHER; note = 2'-O-methyladenosine-3'-phosphate
  modified_base 11: mod_base = OTHER; note = 2'-O-methylguanosine-3'-phosphate
  modified_base 12: mod_base = OTHER; note = 2'-O-methyladenosine-3'-phosphate
  modified_base 13: mod_base = OTHER; note = 2'-O-methylcytidine-3'-phosphate
  modified_base 14: mod_base = OTHER; note = 2'-deoxy-2'-fluoroguanosine-3'-phosphate
  modified_base 15: mod_base = OTHER; note = 2'-O-methylguanosine-3'-phosphate
  modified_base 16: mod_base = OTHER; note = 2'-deoxy-2'-fluorouridine-3'-phosphate
  modified_base 17: mod_base = OTHER; note = 2'-O-methyluridine-3'-phosphate
  modified_base 18: mod_base = OTHER; note = 2'-O-methylguanosine-3'-phosphate
  modified_base 19: mod_base = OTHER; note = 2'-O-methylcytidine-3'-phosphate
  modified_base 20: mod_base = OTHER; note = 2'-O-methylcytidine-3'-phosphate
  modified_base 21: mod_base = OTHER; note = 2'-O-methylcytidine-3'-phosphorothioate
  modified_base 22: mod_base = OTHER; note = 2'-O-methyladenosine-3'-phosphorothioate
  modified_base 23: mod_base = OTHER; note = 2'-O-methylguanosine
acatcatccagacggttgcccag

SEQ ID NO: 2048 - RNA, 21 nt, synthetic construct
  source 1..21: mol_type = other RNA
  modified_base 1: mod_base = OTHER; note = 2'-O-methyluridine-3'-phosphorothioate
  modified_base 2: mod_base = OTHER; note = 2'-O-methylguanosine-3'-phosphorothioate
  modified_base 3: mod_base = OTHER; note = 2'-O-methylguanosine-3'-phosphate
  modified_base 4: mod_base = OTHER; note = 2'-O-methylguanosine-3'-phosphate
  modified_base 5: mod_base = OTHER; note = 2'-O-methylcytidine-3'-phosphate
  modified_base 6: mod_base = OTHER; note = 2'-O-methyladenosine-3'-phosphate
  modified_base 7: mod_base = OTHER; note = 2'-deoxy-2'-fluoroadenosine-3'-phosphate
  modified_base 8: mod_base = OTHER; note = 2'-O-methylcytidine-3'-phosphate
  modified_base 9: mod_base = OTHER; note = 2'-deoxy-2'-fluorocytidine-3'-phosphate
  modified_base 10: mod_base = OTHER; note = 2'-deoxy-2'-fluoroguanosine-3'-phosphate
  modified_base 11: mod_base = OTHER; note = 2'-deoxy-2'-fluorouridine-3'-phosphate
  modified_base 12: mod_base = OTHER; note = 2'-O-methylcytidine-3'-phosphate
  modified_base 13: mod_base = OTHER; note = 2'-O-methyluridine-3'-phosphate
  modified_base 14: mod_base = OTHER; note = 2'-O-methylguanosine-3'-phosphate
  modified_base 15: mod_base = OTHER; note = 2'-O-methylguanosine-3'-phosphate
  modified_base 16: mod_base = OTHER; note = 2'-O-methyladenosine-3'-phosphate
  modified_base 17: mod_base = OTHER; note = 2'-O-methyluridine-3'-phosphate
  modified_base 18: mod_base = OTHER; note = 2'-O-methylguanosine-3'-phosphate
  modified_base 19: mod_base = OTHER; note = 2'-O-methyladenosine-3'-phosphate
  modified_base 20: mod_base = OTHER; note = 2'-O-methyluridine-3'-phosphate
  modified_base 21: mod_base = OTHER; note = 2'-O-methylguanosine-3'-phosphate ((2S,4R)-1-[29-[[2-(acetylamino)-2-deoxy-beta-D-galactopyra nosyl]oxy]-14,14-bis[[3-[[3-[[5-[[2-(acetylamino)-2-deoxy-b eta-D-galactopyranosyl]oxy]-1-oxopentyl]amino]propyl]amino] -3-oxopropoxy]methyl]-1,12,19,25-tetraoxo-16-oxa-13,20,24-t riazanonacos-1-yl]-4-hydroxy-2-pyrrolidinyl)methyl ester
tgggcaaccgtctggatgatg

SEQ ID NO: 2049 - RNA, 23 nt, synthetic construct
  source 1..23: mol_type = other RNA
  modified_base 1: mod_base = OTHER; note = 2'-O-methylcytidine-3'-phosphorothioate
  modified_base 2: mod_base = OTHER; note = 2'-deoxy-2'-fluoroadenosine-3'-phosphorothioate
  modified_base 3: mod_base = OTHER; note = 2'-O-methyluridine-3'-phosphate
  modified_base 4: mod_base = OTHER; note = 2'-O-methylcytidine-3'-phosphate
  modified_base 5: mod_base = OTHER; note = 2'-O-methyladenosine-3'-phosphate
  modified_base 6: mod_base = OTHER; note = 2'-deoxy-2'-fluorouridine-3'-phosphate
  modified_base 7: mod_base = OTHER; note = 2'-O-methylcytidine-3'-phosphate
  modified_base 8: mod_base = OTHER; note = 2'-deoxy-2'-fluorocytidine-3'-phosphate
  modified_base 9: mod_base = OTHER; note = 2'-deoxy-2'-fluoroadenosine-3'-phosphate
  modified_base 10: mod_base = OTHER; note = 2'-O-methylguanosine-3'-phosphate
  modified_base 11: mod_base = OTHER; note = 2'-O-methyladenosine-3'-phosphate
  modified_base 12: mod_base = OTHER; note = 2'-O-methylcytidine-3'-phosphate
  modified_base 13: mod_base = OTHER; note = 2'-O-methylguanosine-3'-phosphate
  modified_base 14: mod_base = OTHER; note = 2'-deoxy-2'-fluoroguanosine-3'-phosphate
  modified_base 15: mod_base = OTHER; note = 2'-O-methyluridine-3'-phosphate
  modified_base 16: mod_base = OTHER; note = 2'-deoxy-2'-fluorouridine-3'-phosphate
  modified_base 17: mod_base = OTHER; note = 2'-O-methylguanosine-3'-phosphate
  modified_base 18: mod_base = OTHER; note = 2'-O-methylcytidine-3'-phosphate
  modified_base 19: mod_base = OTHER; note = 2'-O-methylcytidine-3'-phosphate
  modified_base 20: mod_base = OTHER; note = 2'-O-methylcytidine-3'-phosphate
  modified_base 21: mod_base = OTHER; note = 2'-O-methyladenosine-3'-phosphorothioate
  modified_base 22: mod_base = OTHER; note = 2'-O-methylguanosine-3'-phosphorothioate
  modified_base 23: mod_base = OTHER; note = 2'-O-methylguanosine
catcatccagacggttgcccagg

SEQ ID NO: 2050 - RNA, 21 nt, synthetic construct
  source 1..21: mol_type = other RNA
  modified_base 1: mod_base = OTHER; note = 2'-O-methylguanosine-3'-phosphorothioate
  modified_base 2: mod_base = OTHER; note = 2'-O-methyladenosine-3'-phosphorothioate
  modified_base 3: mod_base = OTHER; note = 2'-O-methyladenosine-3'-phosphate
  modified_base 4: mod_base = OTHER; note = 2'-O-methyladenosine-3'-phosphate
  modified_base 5: mod_base = OTHER; note = 2'-O-methylcytidine-3'-phosphate
  modified_base 6: mod_base = OTHER; note = 2'-O-methyluridine-3'-phosphate
  modified_base 7: mod_base = OTHER; note = 2'-deoxy-2'-fluorouridine-3'-phosphate
  modified_base 8: mod_base = OTHER; note = 2'-O-methyluridine-3'-phosphate
  modified_base 9: mod_base = OTHER; note = 2'-deoxy-2'-fluoroguanosine-3'-phosphate
  modified_base 10: mod_base = OTHER; note = 2'-deoxy-2'-fluoroguanosine-3'-phosphate
  modified_base 11: mod_base = OTHER; note = 2'-deoxy-2'-fluorocytidine-3'-phosphate
  modified_base 12: mod_base = OTHER; note = 2'-O-methyluridine-3'-phosphate
  modified_base 13: mod_base = OTHER; note = 2'-O-methylguanosine-3'-phosphate
  modified_base 14: mod_base = OTHER; note = 2'-O-methyladenosine-3'-phosphate
  modified_base 15: mod_base = OTHER; note = 2'-O-methyluridine-3'-phosphate
  modified_base 16: mod_base = OTHER; note = 2'-O-methyladenosine-3'-phosphate
  modified_base 17: mod_base = OTHER; note = 2'-O-methyladenosine-3'-phosphate
  modified_base 18: mod_base = OTHER; note = 2'-O-methyluridine-3'-phosphate
  modified_base 19: mod_base = OTHER; note = 2'-O-methyladenosine-3'-phosphate
  modified_base 20: mod_base = OTHER; note = 2'-O-methyluridine-3'-phosphate
  modified_base 21: mod_base = OTHER; note = 2'-O-methyluridine-3'-phosphate ((2S,4R)-1-[29-[[2-(acetylamino)-2-deoxy-beta-D-galactopyra nosyl]oxy]-14,14-bis[[3-[[3-[[5-[[2-(acetylamino)-2-deoxy-b eta-D-galactopyranosyl]oxy]-1-oxopentyl]amino]propyl]amino] -3-oxopropoxy]methyl]-1,12,19,25-tetraoxo-16-oxa-13,20,24-t riazanonacos-1-yl]-4-hydroxy-2-pyrrolidinyl)methyl ester
gaaactttggctgataatatt

SEQ ID NO: 2051 - RNA, 23 nt, synthetic construct
  source 1..23: mol_type = other RNA
  modified_base 1: mod_base = OTHER; note = 2'-O-methyladenosine-3'-phosphorothioate
  modified_base 2: mod_base = OTHER; note = 2'-deoxy-2'-fluoroadenosine-3'-phosphorothioate
  modified_base 3: mod_base = OTHER; note = 2'-O-methyluridine-3'-phosphate
  modified_base 4: mod_base = OTHER; note = 2'-O-methyladenosine-3'-phosphate
  modified_base 5: mod_base = OTHER; note = 2'-O-methyluridine-3'-phosphate
  modified_base 6: mod_base = OTHER; note = 2'-deoxy-2'-fluorouridine-3'-phosphate
  modified_base 7: mod_base = OTHER; note = 2'-O-methyladenosine-3'-phosphate
  modified_base 8: mod_base = OTHER; note = 2'-deoxy-2'-fluorouridine-3'-phosphate
  modified_base 9: mod_base = OTHER; note = 2'-deoxy-2'-fluorocytidine-3'-phosphate
  modified_base 10: mod_base = OTHER; note = 2'-O-methyladenosine-3'-phosphate
  modified_base 11: mod_base = OTHER; note = 2'-O-methylguanosine-3'-phosphate
  modified_base 12: mod_base = OTHER; note = 2'-O-methylcytidine-3'-phosphate
  modified_base 13: mod_base = OTHER; note = 2'-O-methylcytidine-3'-phosphate
  modified_base 14: mod_base = OTHER; note = 2'-deoxy-2'-fluoroadenosine-3'-phosphate
  modified_base 15: mod_base = OTHER; note = 2'-O-methyladenosine-3'-phosphate
  modified_base 16: mod_base = OTHER; note = 2'-deoxy-2'-fluoroadenosine-3'-phosphate
  modified_base 17: mod_base = OTHER; note = 2'-O-methylguanosine-3'-phosphate
  modified_base 18: mod_base = OTHER; note = 2'-O-methyluridine-3'-phosphate
  modified_base 19: mod_base = OTHER; note = 2'-O-methyluridine-3'-phosphate
  modified_base 20: mod_base = OTHER; note = 2'-O-methyluridine-3'-phosphate
  modified_base 21: mod_base = OTHER; note = 2'-O-methylcytidine-3'-phosphorothioate
  modified_base 22: mod_base = OTHER; note = 2'-O-methyluridine-3'-phosphorothioate
  modified_base 23: mod_base = OTHER; note = 2'-O-methyluridine
aatattatcagccaaagtttctt

SEQ ID NO: 2052 - RNA, 21 nt, synthetic construct
  source 1..21: mol_type = other RNA
  modified_base 1: mod_base = OTHER; note = 2'-O-methyladenosine-3'-phosphorothioate
  modified_base 2: mod_base = OTHER; note = 2'-O-methyladenosine-3'-phosphorothioate
  modified_base 3: mod_base = OTHER; note = 2'-O-methyladenosine-3'-phosphate
  modified_base 4: mod_base = OTHER; note = 2'-O-methylcytidine-3'-phosphate
  modified_base 5: mod_base = OTHER; note = 2'-O-methyluridine-3'-phosphate
  modified_base 6: mod_base = OTHER; note = 2'-O-methyluridine-3'-phosphate
  modified_base 7: mod_base = OTHER; note = 2'-deoxy-2'-fluorouridine-3'-phosphate
  modified_base 8: mod_base = OTHER; note = 2'-O-methylguanosine-3'-phosphate
  modified_base 9: mod_base = OTHER; note = 2'-deoxy-2'-fluoroguanosine-3'-phosphate
  modified_base 10: mod_base = OTHER; note = 2'-deoxy-2'-fluorocytidine-3'-phosphate
  modified_base 11: mod_base = OTHER; note = 2'-deoxy-2'-fluorouridine-3'-phosphate
  modified_base 12: mod_base = OTHER; note = 2'-O-methylguanosine-3'-phosphate
  modified_base 13: mod_base = OTHER; note = 2'-O-methyladenosine-3'-phosphate
  modified_base 14: mod_base = OTHER; note = 2'-O-methyluridine-3'-phosphate
  modified_base 15: mod_base = OTHER; note = 2'-O-methyladenosine-3'-phosphate
  modified_base 16: mod_base = OTHER; note = 2'-O-methyladenosine-3'-phosphate
  modified_base 17: mod_base = OTHER; note = 2'-O-methyluridine-3'-phosphate
  modified_base 18: mod_base = OTHER; note = 2'-O-methyladenosine-3'-phosphate
  modified_base 19: mod_base = OTHER; note = 2'-O-methyluridine-3'-phosphate
  modified_base 20: mod_base = OTHER; note = 2'-O-methyluridine-3'-phosphate
  modified_base 21: mod_base = OTHER; note = 2'-O-methylguanosine-3'-phosphate ((2S,4R)-1-[29-[[2-(acetylamino)-2-deoxy-beta-D-galactopyra nosyl]oxy]-14,14-bis[[3-[[3-[[5-[[2-(acetylamino)-2-deoxy-b eta-D-galactopyranosyl]oxy]-1-oxopentyl]amino]propyl]amino] -3-oxopropoxy]methyl]-1,12,19,25-tetraoxo-16-oxa-13,20,24-t riazanonacos-1-yl]-4-hydroxy-2-pyrrolidinyl)methyl ester
aaactttggctgataatattg

SEQ ID NO: 2053 - RNA, 23 nt, synthetic construct
  source 1..23: mol_type = other RNA
  modified_base 1: mod_base = OTHER; note = 2'-O-methylcytidine-3'-phosphorothioate
  modified_base 2: mod_base = OTHER; note = 2'-deoxy-2'-fluoroadenosine-3'-phosphorothioate
  modified_base 3: mod_base = OTHER; note = 2'-O-methyladenosine-3'-phosphate
  modified_base 4: mod_base = OTHER; note = 2'-O-methyluridine-3'-phosphate
  modified_base 5: mod_base = OTHER; note = 2'-O-methyladenosine-3'-phosphate
  modified_base 6: mod_base = OTHER; note = 2'-deoxy-2'-fluorouridine-3'-phosphate
  modified_base 7: mod_base = OTHER; note = 2'-O-methyluridine-3'-phosphate
  modified_base 8: mod_base = OTHER; note = 2'-deoxy-2'-fluoroadenosine-3'-phosphate
  modified_base 9: mod_base = OTHER; note = 2'-deoxy-2'-fluorouridine-3'-phosphate
  modified_base 10: mod_base = OTHER; note = 2'-O-methylcytidine-3'-phosphate
  modified_base 11: mod_base = OTHER; note = 2'-O-methyladenosine-3'-phosphate
  modified_base 12: mod_base = OTHER; note = 2'-O-methylguanosine-3'-phosphate
  modified_base 13: mod_base = OTHER; note = 2'-O-methylcytidine-3'-phosphate
  modified_base 14: mod_base = OTHER; note = 2'-deoxy-2'-fluorocytidine-3'-phosphate
  modified_base 15: mod_base = OTHER; note = 2'-O-methyladenosine-3'-phosphate
  modified_base 16: mod_base = OTHER; note = 2'-deoxy-2'-fluoroadenosine-3'-phosphate
  modified_base 17: mod_base = OTHER; note = 2'-O-methyladenosine-3'-phosphate
  modified_base 18: mod_base = OTHER; note = 2'-O-methylguanosine-3'-phosphate
  modified_base 19: mod_base = OTHER; note = 2'-O-methyluridine-3'-phosphate
  modified_base 20: mod_base = OTHER; note = 2'-O-methyluridine-3'-phosphate
  modified_base 21: mod_base = OTHER; note = 2'-O-methyluridine-3'-phosphorothioate
  modified_base 22: mod_base = OTHER; note = 2'-O-methylcytidine-3'-phosphorothioate
  modified_base 23: mod_base = OTHER; note = 2'-O-methyluridine
caatattatcagccaaagtttct

SEQ ID NO: 2054 - RNA, 21 nt, synthetic construct
  source 1..21: mol_type = other RNA
  modified_base 1: mod_base = OTHER; note = 2'-O-methyluridine-3'-phosphorothioate
  modified_base 2: mod_base = OTHER; note = 2'-O-methylguanosine-3'-phosphorothioate
  modified_base 3: mod_base = OTHER; note = 2'-O-methyladenosine-3'-phosphate
  modified_base 4: mod_base = OTHER; note = 2'-O-methyladenosine-3'-phosphate
  modified_base 5: mod_base = OTHER; note = 2'-O-methylguanosine-3'-phosphate
  modified_base 6: mod_base = OTHER; note = 2'-O-methyladenosine-3'-phosphate
  modified_base 7: mod_base = OTHER; note = 2'-deoxy-2'-fluoroadenosine-3'-phosphate
  modified_base 8: mod_base = OTHER; note = 2'-O-methyladenosine-3'-phosphate
  modified_base 9: mod_base = OTHER; note = 2'-deoxy-2'-fluorocytidine-3'-phosphate
  modified_base 10: mod_base = OTHER; note = 2'-deoxy-2'-fluorouridine-3'-phosphate
  modified_base 11: mod_base = OTHER; note = 2'-deoxy-2'-fluorouridine-3'-phosphate
  modified_base 12: mod_base = OTHER; note = 2'-O-methyluridine-3'-phosphate
  modified_base 13: mod_base = OTHER; note = 2'-O-methylguanosine-3'-phosphate
  modified_base 14: mod_base = OTHER; note = 2'-O-methylguanosine-3'-phosphate
  modified_base 15: mod_base = OTHER; note = 2'-O-methylcytidine-3'-phosphate
  modified_base 16: mod_base = OTHER; note = 2'-O-methyluridine-3'-phosphate
  modified_base 17: mod_base = OTHER; note = 2'-O-methylguanosine-3'-phosphate
  modified_base 18: mod_base = OTHER; note = 2'-O-methyladenosine-3'-phosphate
  modified_base 19: mod_base = OTHER; note = 2'-O-methyluridine-3'-phosphate
  modified_base 20: mod_base = OTHER; note = 2'-O-methyladenosine-3'-phosphate
  modified_base 21: mod_base = OTHER; note = 2'-O-methyladenosine-3'-phosphate ((2S,4R)-1-[29-[[2-(acetylamino)-2-deoxy-beta-D-galactopyra nosyl]oxy]-14,14-bis[[3-[[3-[[5-[[2-(acetylamino)-2-deoxy-b eta-D-galactopyranosyl]oxy]-1-oxopentyl]amino]propyl]amino] -3-oxopropoxy]methyl]-1,12,19,25-tetraoxo-16-oxa-13,20,24-t riazanonacos-1-yl]-4-hydroxy-2-pyrrolidinyl)methyl ester
tgaagaaactttggctgataa

SEQ ID NO: 2055 - RNA, 23 nt, synthetic construct
  source 1..23: mol_type = other RNA
  modified_base 1: mod_base = OTHER; note = 2'-O-methyluridine-3'-phosphorothioate
  modified_base 2: mod_base = OTHER; note = 2'-deoxy-2'-fluorouridine-3'-phosphorothioate
  modified_base 3: mod_base = OTHER; note = 2'-O-methyladenosine-3'-phosphate
  modified_base 4: mod_base = OTHER; note = 2'-O-methyluridine-3'-phosphate
  modified_base 5: mod_base = OTHER; note = 2'-O-methylcytidine-3'-phosphate
  modified_base 6: mod_base = OTHER; note = 2'-deoxy-2'-fluoroadenosine-3'-phosphate
  modified_base 7: mod_base = OTHER; note = 2'-O-methylguanosine-3'-phosphate
  modified_base 8: mod_base = OTHER; note = 2'-deoxy-2'-fluorocytidine-3'-phosphate
  modified_base 9: mod_base = OTHER; note = 2'-deoxy-2'-fluorocytidine-3'-phosphate
  modified_base 10: mod_base = OTHER; note = 2'-O-methyladenosine-3'-phosphate
  modified_base 11: mod_base = OTHER; note = 2'-O-methyladenosine-3'-phosphate
  modified_base 12: mod_base = OTHER; note = 2'-O-methyladenosine-3'-phosphate
  modified_base 13: mod_base = OTHER; note = 2'-O-methylguanosine-3'-phosphate
  modified_base 14: mod_base = OTHER; note = 2'-deoxy-2'-fluorouridine-3'-phosphate
  modified_base 15: mod_base = OTHER; note = 2'-O-methyluridine-3'-phosphate
  modified_base 16: mod_base = OTHER; note = 2'-deoxy-2'-fluorouridine-3'-phosphate
  modified_base 17: mod_base = OTHER; note = 2'-O-methylcytidine-3'-phosphate
  modified_base 18: mod_base = OTHER; note = 2'-O-methyluridine-3'-phosphate
  modified_base 19: mod_base = OTHER; note = 2'-O-methyluridine-3'-phosphate
  modified_base 20: mod_base = OTHER; note = 2'-O-methylcytidine-3'-phosphate
  modified_base 21: mod_base = OTHER; note = 2'-O-methyladenosine-3'-phosphorothioate
  modified_base 22: mod_base = OTHER; note = 2'-O-methyluridine-3'-phosphorothioate
  modified_base 23: mod_base = OTHER; note = 2'-O-methylcytidine
ttatcagccaaagtttcttcatc

SEQ ID NO: 2056 - RNA, 21 nt, synthetic construct
  source 1..21: mol_type = other RNA
  modified_base 1: mod_base = OTHER; note = 2'-O-methyladenosine-3'-phosphorothioate
  modified_base 2: mod_base = OTHER; note = 2'-O-methyluridine-3'-phosphorothioate
  modified_base 3: mod_base = OTHER; note = 2'-O-methylguanosine-3'-phosphate
  modified_base 4: mod_base = OTHER; note = 2'-O-methyladenosine-3'-phosphate
  modified_base 5: mod_base = OTHER; note = 2'-O-methyladenosine-3'-phosphate
  modified_base 6: mod_base = OTHER; note = 2'-O-methylguanosine-3'-phosphate
  modified_base 7: mod_base = OTHER; note = 2'-deoxy-2'-fluoroadenosine-3'-phosphate
  modified_base 8: mod_base = OTHER; note = 2'-O-methyladenosine-3'-phosphate
  modified_base 9: mod_base = OTHER; note = 2'-deoxy-2'-fluoroadenosine-3'-phosphate
  modified_base 10: mod_base = OTHER; note = 2'-deoxy-2'-fluorocytidine-3'-phosphate
  modified_base 11: mod_base = OTHER; note = 2'-deoxy-2'-fluorouridine-3'-phosphate
  modified_base 12: mod_base = OTHER; note = 2'-O-methyluridine-3'-phosphate
  modified_base 13: mod_base = OTHER; note = 2'-O-methyluridine-3'-phosphate
  modified_base 14: mod_base = OTHER; note = 2'-O-methylguanosine-3'-phosphate
  modified_base 15: mod_base = OTHER; note = 2'-O-methylguanosine-3'-phosphate
  modified_base 16: mod_base = OTHER; note = 2'-O-methylcytidine-3'-phosphate
  modified_base 17: mod_base = OTHER; note = 2'-O-methyluridine-3'-phosphate
  modified_base 18: mod_base = OTHER; note = 2'-O-methylguanosine-3'-phosphate
  modified_base 19: mod_base = OTHER; note = 2'-O-methyladenosine-3'-phosphate
  modified_base 20: mod_base = OTHER; note = 2'-O-methyluridine-3'-phosphate
  modified_base 21: mod_base = OTHER; note = 2'-O-methyladenosine-3'-phosphate ((2S,4R)-1-[29-[[2-(acetylamino)-2-deoxy-beta-D-galactopyra nosyl]oxy]-14,14-bis[[3-[[3-[[5-[[2-(acetylamino)-2-deoxy-b eta-D-galactopyranosyl]oxy]-1-oxopentyl]amino]propyl]amino] -3-oxopropoxy]methyl]-1,12,19,25-tetraoxo-16-oxa-13,20,24-t riazanonacos-1-yl]-4-hydroxy-2-pyrrolidinyl)methyl ester
atgaagaaactttggctgata

SEQ ID NO: 2057 - RNA, 23 nt, synthetic construct
  source 1..23: mol_type = other RNA
  modified_base 1: mod_base = OTHER; note = 2'-O-methyluridine-3'-phosphorothioate
  modified_base 2: mod_base = OTHER; note = 2'-deoxy-2'-fluoroadenosine-3'-phosphorothioate
  modified_base 3: mod_base = OTHER; note = 2'-O-methyluridine-3'-phosphate
  modified_base 4: mod_base = OTHER; note = 2'-O-methylcytidine-3'-phosphate
  modified_base 5: mod_base = OTHER; note = 2'-O-methyladenosine-3'-phosphate
  modified_base 6: mod_base = OTHER; note = 2'-deoxy-2'-fluoroguanosine-3'-phosphate
  modified_base 7: mod_base = OTHER; note = 2'-O-methylcytidine-3'-phosphate
  modified_base 8: mod_base = OTHER; note = 2'-deoxy-2'-fluorocytidine-3'-phosphate
  modified_base 9: mod_base = OTHER; note = 2'-deoxy-2'-fluoroadenosine-3'-phosphate
  modified_base 10: mod_base = OTHER; note = 2'-O-methyladenosine-3'-phosphate
  modified_base 11: mod_base = OTHER; note = 2'-O-methyladenosine-3'-phosphate
  modified_base 12: mod_base = OTHER; note = 2'-O-methylguanosine-3'-phosphate
  modified_base 13: mod_base = OTHER; note = 2'-O-methyluridine-3'-phosphate
  modified_base 14: mod_base = OTHER; note = 2'-deoxy-2'-fluorouridine-3'-phosphate
  modified_base 15: mod_base = OTHER; note = 2'-O-methyluridine-3'-phosphate
  modified_base 16: mod_base = OTHER; note = 2'-deoxy-2'-fluorocytidine-3'-phosphate
  modified_base 17: mod_base = OTHER; note = 2'-O-methyluridine-3'-phosphate
  modified_base 18: mod_base = OTHER; note = 2'-O-methyluridine-3'-phosphate
  modified_base 19: mod_base = OTHER; note = 2'-O-methylcytidine-3'-phosphate
  modified_base 20: mod_base = OTHER; note = 2'-O-methyladenosine-3'-phosphate
  modified_base 21: mod_base = OTHER; note = 2'-O-methyluridine-3'-phosphorothioate
  modified_base 22: mod_base = OTHER; note = 2'-O-methylcytidine-3'-phosphorothioate
  modified_base 23: mod_base = OTHER; note = 2'-O-methyladenosine
tatcagccaaagtttcttcatca

SEQ ID NO: 2058 - RNA, 21 nt, synthetic construct
  source 1..21: mol_type = other RNA
  modified_base 1: mod_base = OTHER; note = 2'-O-methyladenosine-3'-phosphorothioate
  modified_base 2: mod_base = OTHER; note = 2'-O-methyladenosine-3'-phosphorothioate
  modified_base 3: mod_base = OTHER; note = 2'-O-methyladenosine-3'-phosphate
  modified_base 4: mod_base = OTHER; note = 2'-O-methylguanosine-3'-phosphate
  modified_base 5: mod_base = OTHER; note = 2'-O-methylguanosine-3'-phosphate
  modified_base 6: mod_base = OTHER; note = 2'-O-methyluridine-3'-phosphate
  modified_base 7: mod_base = OTHER; note = 2'-deoxy-2'-fluoroguanosine-3'-phosphate
  modified_base 8: mod_base = OTHER; note = 2'-O-methyluridine-3'-phosphate
  modified_base 9: mod_base = OTHER; note = 2'-deoxy-2'-fluorouridine-3'-phosphate
  modified_base 10: mod_base = OTHER; note = 2'-deoxy-2'-fluorocytidine-3'-phosphate
  modified_base 11: mod_base = OTHER; note = 2'-deoxy-2'-fluoroadenosine-3'-phosphate
  modified_base 12: mod_base = OTHER; note = 2'-O-methyladenosine-3'-phosphate
  modified_base 13: mod_base = OTHER; note = 2'-O-methylguanosine-3'-phosphate
  modified_base 14: mod_base = OTHER; note = 2'-O-methyladenosine-3'-phosphate
  modified_base 15: mod_base = OTHER; note = 2'-O-methyluridine-3'-phosphate
  modified_base 16: mod_base = OTHER; note = 2'-O-methylguanosine-3'-phosphate
  modified_base 17: mod_base = OTHER; note = 2'-O-methyluridine-3'-phosphate
  modified_base 18: mod_base = OTHER; note = 2'-O-methylcytidine-3'-phosphate
  modified_base 19: mod_base = OTHER; note = 2'-O-methylcytidine-3'-phosphate
  modified_base 20: mod_base = OTHER; note = 2'-O-methyluridine-3'-phosphate
  modified_base 21: mod_base = OTHER; note = 2'-O-methylcytidine-3'-phosphate ((2S,4R)-1-[29-[[2-(acetylamino)-2-deoxy-beta-D-galactopyra nosyl]oxy]-14,14-bis[[3-[[3-[[5-[[2-(acetylamino)-2-deoxy-b eta-D-galactopyranosyl]oxy]-1-oxopentyl]amino]propyl]amino] -3-oxopropoxy]methyl]-1,12,19,25-tetraoxo-16-oxa-13,20,24-t riazanonacos-1-yl]-4-hydroxy-2-pyrrolidinyl)methyl ester
aaaggtgttcaagatgtcctc

SEQ ID NO: 2059 - RNA, 23 nt, synthetic construct
  source 1..23: mol_type = other RNA
  modified_base 1: mod_base = OTHER; note = 2'-O-methylguanosine-3'-phosphorothioate
  modified_base 2: mod_base = OTHER; note = 2'-deoxy-2'-fluoroadenosine-3'-phosphorothioate
  modified_base 3: mod_base = OTHER; note = 2'-O-methylguanosine-3'-phosphate
  modified_base 4: mod_base = OTHER; note = 2'-O-methylguanosine-3'-phosphate
  modified_base 5: mod_base = OTHER; note = 2'-O-methyladenosine-3'-phosphate
  modified_base 6: mod_base = OTHER; note = 2'-deoxy-2'-fluorocytidine-3'-phosphate
  modified_base 7: mod_base = OTHER; note = 2'-O-methyladenosine-3'-phosphate
  modified_base 8: mod_base = OTHER; note = 2'-deoxy-2'-fluorouridine-3'-phosphate
  modified_base 9: mod_base = OTHER; note = 2'-deoxy-2'-fluorocytidine-3'-phosphate
  modified_base 10: mod_base = OTHER; note = 2'-O-methyluridine-3'-phosphate
  modified_base 11: mod_base = OTHER; note = 2'-O-methyluridine-3'-phosphate
  modified_base 12: mod_base = OTHER; note = 2'-O-methylguanosine-3'-phosphate
  modified_base 13: mod_base = OTHER; note = 2'-O-methyladenosine-3'-phosphate
  modified_base 14: mod_base = OTHER; note = 2'-deoxy-2'-fluoroadenosine-3'-phosphate
  modified_base 15: mod_base = OTHER; note = 2'-O-methylcytidine-3'-phosphate
  modified_base 16: mod_base = OTHER; note = 2'-deoxy-2'-fluoroadenosine-3'-phosphate
  modified_base 17: mod_base = OTHER; note = 2'-O-methylcytidine-3'-phosphate
  modified_base 18: mod_base = OTHER; note = 2'-O-methylcytidine-3'-phosphate
  modified_base 19: mod_base = OTHER; note = 2'-O-methyluridine-3'-phosphate
  modified_base 20: mod_base = OTHER; note = 2'-O-methyluridine-3'-phosphate
  modified_base 21: mod_base = OTHER; note = 2'-O-methyluridine-3'-phosphorothioate
  modified_base 22: mod_base = OTHER; note = 2'-O-methylcytidine-3'-phosphorothioate
  modified_base 23: mod_base = OTHER; note = 2'-O-methyluridine
gaggacatcttgaacacctttct

SEQ ID NO: 2060 - RNA, 21 nt, synthetic construct
  source 1..21: mol_type = other RNA
  modified_base 1: mod_base = OTHER; note = 2'-O-methyladenosine-3'-phosphorothioate
  modified_base 2: mod_base = OTHER; note = 2'-O-methyladenosine-3'-phosphorothioate
  modified_base 3: mod_base = OTHER; note = 2'-O-methylguanosine-3'-phosphate
  modified_base 4: mod_base = OTHER; note = 2'-O-methylguanosine-3'-phosphate
  modified_base 5: mod_base = OTHER; note = 2'-O-methyluridine-3'-phosphate
  modified_base 6: mod_base = OTHER; note = 2'-O-methylguanosine-3'-phosphate
  modified_base 7: mod_base = OTHER; note = 2'-deoxy-2'-fluorouridine-3'-phosphate
  modified_base 8: mod_base = OTHER; note = 2'-O-methyluridine-3'-phosphate
  modified_base 9: mod_base = OTHER; note = 2'-deoxy-2'-fluorocytidine-3'-phosphate
  modified_base 10: mod_base = OTHER; note = 2'-deoxy-2'-fluoroadenosine-3'-phosphate
  modified_base 11: mod_base = OTHER; note = 2'-deoxy-2'-fluoroadenosine-3'-phosphate
  modified_base 12: mod_base = OTHER; note = 2'-O-methylguanosine-3'-phosphate
  modified_base 13: mod_base = OTHER; note = 2'-O-methyladenosine-3'-phosphate
  modified_base 14: mod_base = OTHER; note = 2'-O-methyluridine-3'-phosphate
  modified_base 15: mod_base = OTHER; note = 2'-O-methylguanosine-3'-phosphate
  modified_base 16: mod_base = OTHER; note = 2'-O-methyluridine-3'-phosphate
  modified_base 17: mod_base = OTHER; note = 2'-O-methylcytidine-3'-phosphate
  modified_base 18: mod_base = OTHER; note = 2'-O-methylcytidine-3'-phosphate
  modified_base 19: mod_base = OTHER; note = 2'-O-methyluridine-3'-phosphate
  modified_base 20: mod_base = OTHER; note = 2'-O-methylcytidine-3'-phosphate
  modified_base 21: mod_base = OTHER; note = 2'-O-methylguanosine-3'-phosphate ((2S,4R)-1-[29-[[2-(acetylamino)-2-deoxy-beta-D-galactopyra nosyl]oxy]-14,14-bis[[3-[[3-[[5-[[2-(acetylamino)-2-deoxy-b eta-D-galactopyranosyl]oxy]-1-oxopentyl]amino]propyl]amino] -3-oxopropoxy]methyl]-1,12,19,25-tetraoxo-16-oxa-13,20,24-t riazanonacos-1-yl]-4-hydroxy-2-pyrrolidinyl)methyl ester
aaggtgttcaagatgtcctcg

SEQ ID NO: 2061 - RNA, 23 nt, synthetic construct
  source 1..23: mol_type = other RNA
  modified_base 1: mod_base = OTHER; note = 2'-O-methylcytidine-3'-phosphorothioate
  modified_base 2: mod_base = OTHER; note = 2'-deoxy-2'-fluoroguanosine-3'-phosphorothioate
  modified_base 3: mod_base = OTHER; note = 2'-O-methyladenosine-3'-phosphate
  modified_base 4: mod_base = OTHER; note = 2'-O-methylguanosine-3'-phosphate
  modified_base 5: mod_base = OTHER; note = 2'-O-methylguanosine-3'-phosphate
  modified_base 6: mod_base = OTHER; note = 2'-deoxy-2'-fluoroadenosine-3'-phosphate
  modified_base 7: mod_base = OTHER; note = 2'-O-methylcytidine-3'-phosphate
  modified_base 8: mod_base = OTHER; note = 2'-deoxy-2'-fluoroadenosine-3'-phosphate
  modified_base 9: mod_base = OTHER; note = 2'-deoxy-2'-fluorouridine-3'-phosphate
  modified_base 10: mod_base = OTHER; note = 2'-O-methylcytidine-3'-phosphate
  modified_base 11: mod_base = OTHER; note = 2'-O-methyluridine-3'-phosphate
  modified_base 12: mod_base = OTHER; note = 2'-O-methyluridine-3'-phosphate
  modified_base 13: mod_base = OTHER; note = 2'-O-methylguanosine-3'-phosphate
  modified_base 14: mod_base = OTHER; note = 2'-deoxy-2'-fluoroadenosine-3'-phosphate
  modified_base 15: mod_base = OTHER; note = 2'-O-methyladenosine-3'-phosphate
  modified_base 16: mod_base = OTHER; note = 2'-deoxy-2'-fluorocytidine-3'-phosphate
  modified_base 17: mod_base = OTHER; note = 2'-O-methyladenosine-3'-phosphate
  modified_base 18: mod_base = OTHER; note = 2'-O-methylcytidine-3'-phosphate
  modified_base 19: mod_base = OTHER; note = 2'-O-methylcytidine-3'-phosphate
  modified_base 20: mod_base = OTHER; note = 2'-O-methyluridine-3'-phosphate
  modified_base 21: mod_base = OTHER; note = 2'-O-methyluridine-3'-phosphorothioate
  modified_base 22: mod_base = OTHER; note = 2'-O-methyluridine-3'-phosphorothioate
  modified_base 23: mod_base = OTHER; note = 2'-O-methylcytidine
cgaggacatcttgaacacctttc

SEQ ID NO: 2062 - RNA, 21 nt, synthetic construct
  source 1..21: mol_type = other RNA
  modified_base 1: mod_base = OTHER; note = 2'-O-methylguanosine-3'-phosphorothioate
  modified_base 2: mod_base = OTHER; note = 2'-O-methylguanosine-3'-phosphorothioate
  modified_base 3: mod_base = OTHER; note = 2'-O-methyladenosine-3'-phosphate
  modified_base 4: mod_base = OTHER; note = 2'-O-methylguanosine-3'-phosphate
  modified_base 5: mod_base = OTHER; note = 2'-O-methyladenosine-3'-phosphate
  modified_base 6: mod_base = OTHER; note = 2'-O-methyladenosine-3'-phosphate
  modified_base 7: mod_base = OTHER; note = 2'-deoxy-2'-fluoroadenosine-3'-phosphate
  modified_base 8: mod_base = OTHER; note = 2'-O-methylguanosine-3'-phosphate
  modified_base 9: mod_base = OTHER; note = 2'-deoxy-2'-fluoroguanosine-3'-phosphate
  modified_base 10: mod_base = OTHER; note = 2'-deoxy-2'-fluorouridine-3'-phosphate
  modified_base 11: mod_base = OTHER; note = 2'-deoxy-2'-fluoroguanosine-3'-phosphate
  modified_base 12: mod_base = OTHER; note = 2'-O-methyluridine-3'-phosphate
  modified_base 13: mod_base = OTHER; note = 2'-O-methyluridine-3'-phosphate
  modified_base 14: mod_base = OTHER; note = 2'-O-methylcytidine-3'-phosphate
  modified_base 15: mod_base = OTHER; note = 2'-O-methyladenosine-3'-phosphate
  modified_base 16: mod_base = OTHER; note = 2'-O-methyladenosine-3'-phosphate
  modified_base 17: mod_base = OTHER; note = 2'-O-methylguanosine-3'-phosphate
  modified_base 18: mod_base = OTHER; note = 2'-O-methyladenosine-3'-phosphate
  modified_base 19: mod_base = OTHER; note = 2'-O-methyluridine-3'-phosphate
  modified_base 20: mod_base = OTHER; note = 2'-O-methylguanosine-3'-phosphate
  modified_base 21: mod_base = OTHER; note = 2'-O-methyluridine-3'-phosphate ((2S,4R)-1-[29-[[2-(acetylamino)-2-deoxy-beta-D-galactopyra nosyl]oxy]-14,14-bis[[3-[[3-[[5-[[2-(acetylamino)-2-deoxy-b eta-D-galactopyranosyl]oxy]-1-oxopentyl]amino]propyl]amino] -3-oxopropoxy]methyl]-1,12,19,25-tetraoxo-16-oxa-13,20,24-t riazanonacos-1-yl]-4-hydroxy-2-pyrrolidinyl)methyl ester
ggagaaaggtgttcaagatgt

SEQ ID NO: 2063 - RNA, 23 nt, synthetic construct
  source 1..23: mol_type = other RNA
  modified_base 1: mod_base = OTHER; note = 2'-O-methyladenosine-3'-phosphorothioate
  modified_base 2: mod_base = OTHER; note = 2'-deoxy-2'-fluorocytidine-3'-phosphorothioate
  modified_base 3: mod_base = OTHER; note = 2'-O-methyladenosine-3'-phosphate
  modified_base 4: mod_base = OTHER; note = 2'-O-methyluridine-3'-phosphate
  modified_base 5: mod_base = OTHER; note = 2'-O-methylcytidine-3'-phosphate
  modified_base 6: mod_base = OTHER; note = 2'-deoxy-2'-fluorouridine-3'-phosphate
  modified_base 7: mod_base = OTHER; note = 2'-O-methyluridine-3'-phosphate
  modified_base 8: mod_base = OTHER; note = 2'-deoxy-2'-fluoroguanosine-3'-phosphate
  modified_base 9: mod_base = OTHER; note = 2'-deoxy-2'-fluoroadenosine-3'-phosphate
  modified_base 10: mod_base = OTHER; note = 2'-O-methyladenosine-3'-phosphate
  modified_base 11: mod_base = OTHER; note = 2'-O-methylcytidine-3'-phosphate
  modified_base 12: mod_base = OTHER; note = 2'-O-methyladenosine-3'-phosphate
  modified_base 13: mod_base = OTHER; note = 2'-O-methylcytidine-3'-phosphate
  modified_base 14: mod_base = OTHER; note = 2'-deoxy-2'-fluorocytidine-3'-phosphate
  modified_base 15: mod_base = OTHER; note = 2'-O-methyluridine-3'-phosphate
  modified_base 16: mod_base = OTHER; note = 2'-deoxy-2'-fluorouridine-3'-phosphate
  modified_base 17: mod_base = OTHER; note = 2'-O-methyluridine-3'-phosphate
  modified_base 18: mod_base = OTHER; note = 2'-O-methylcytidine-3'-phosphate
  modified_base 19: mod_base = OTHER; note = 2'-O-methyluridine-3'-phosphate
  modified_base 20: mod_base = OTHER; note = 2'-O-methylcytidine-3'-phosphate
  modified_base 21: mod_base = OTHER; note = 2'-O-methylcytidine-3'-phosphorothioate
  modified_base 22: mod_base = OTHER; note = 2'-O-methylcytidine-3'-phosphorothioate
  modified_base 23: mod_base = OTHER; note = 2'-O-methylcytidine
acatcttgaacacctttctcccc

SEQ ID NO: 2064 - RNA, 21 nt, synthetic construct
  source 1..21: mol_type = other RNA
  modified_base 1: mod_base = OTHER; note = 2'-O-methylguanosine-3'-phosphorothioate
  modified_base 2: mod_base = OTHER; note = 2'-O-methylguanosine-3'-phosphorothioate
  modified_base 3: mod_base = OTHER; note = 2'-O-methylguanosine-3'-phosphate
  modified_base 4: mod_base = OTHER; note = 2'-O-methyladenosine-3'-phosphate
  modified_base 5: mod_base = OTHER; note = 2'-O-methylguanosine-3'-phosphate
  modified_base 6: mod_base = OTHER; note = 2'-O-methyladenosine-3'-phosphate
  modified_base 7: mod_base = OTHER; note = 2'-deoxy-2'-fluoroadenosine-3'-phosphate
  modified_base 8: mod_base = OTHER; note = 2'-O-methyladenosine-3'-phosphate
  modified_base 9: mod_base = OTHER; note = 2'-deoxy-2'-fluoroguanosine-3'-phosphate
  modified_base 10: mod_base = OTHER; note = 2'-deoxy-2'-fluoroguanosine-3'-phosphate
  modified_base 11: mod_base = OTHER; note = 2'-deoxy-2'-fluorouridine-3'-phosphate
  modified_base 12: mod_base = OTHER; note = 2'-O-methylguanosine-3'-phosphate
  modified_base 13: mod_base = OTHER; note = 2'-O-methyluridine-3'-phosphate
  modified_base 14: mod_base = OTHER; note = 2'-O-methyluridine-3'-phosphate
  modified_base 15: mod_base = OTHER; note = 2'-O-methylcytidine-3'-phosphate
  modified_base 16: mod_base = OTHER; note = 2'-O-methyladenosine-3'-phosphate
  modified_base 17: mod_base = OTHER; note = 2'-O-methyladenosine-3'-phosphate
  modified_base 18: mod_base = OTHER; note = 2'-O-methylguanosine-3'-phosphate
  modified_base 19: mod_base = OTHER; note = 2'-O-methyladenosine-3'-phosphate
  modified_base 20: mod_base = OTHER; note = 2'-O-methyluridine-3'-phosphate
  modified_base 21: mod_base = OTHER; note = 2'-O-methylguanosine-3'-phosphate ((2S,4R)-1-[29-[[2-(acetylamino)-2-deoxy-beta-D-galactopyra nosyl]oxy]-14,14-bis[[3-[[3-[[5-[[2-(acetylamino)-2-deoxy-b eta-D-galactopyranosyl]oxy]-1-oxopentyl]amino]propyl]amino] -3-oxopropoxy]methyl]-1,12,19,25-tetraoxo-16-oxa-13,20,24-t riazanonacos-1-yl]-4-hydroxy-2-pyrrolidinyl)methyl ester
gggagaaaggtgttcaagatg

SEQ ID NO: 2065 - RNA, 23 nt, synthetic construct
  source 1..23: mol_type = other RNA
  modified_base 1: mod_base = OTHER; note = 2'-O-methylcytidine-3'-phosphorothioate
  modified_base 2: mod_base = OTHER; note = 2'-deoxy-2'-fluoroadenosine-3'-phosphorothioate
  modified_base 3: mod_base = OTHER; note = 2'-O-methyluridine-3'-phosphate
  modified_base 4: mod_base = OTHER; note = 2'-O-methylcytidine-3'-phosphate
  modified_base 5: mod_base = OTHER; note = 2'-O-methyluridine-3'-phosphate
  modified_base 6: mod_base = OTHER; note = 2'-deoxy-2'-fluorouridine-3'-phosphate
  modified_base 7: mod_base = OTHER; note = 2'-O-methylguanosine-3'-phosphate
  modified_base 8: mod_base = OTHER; note = 2'-deoxy-2'-fluoroadenosine-3'-phosphate
  modified_base 9: mod_base = OTHER; note = 2'-deoxy-2'-fluoroadenosine-3'-phosphate
  modified_base 10: mod_base = OTHER; note = 2'-O-methylcytidine-3'-phosphate
  modified_base 11: mod_base = OTHER; note = 2'-O-methyladenosine-3'-phosphate
  modified_base 12: mod_base = OTHER; note = 2'-O-methylcytidine-3'-phosphate
  modified_base 13: mod_base = OTHER; note = 2'-O-methylcytidine-3'-phosphate
  modified_base 14: mod_base = OTHER; note = 2'-deoxy-2'-fluorouridine-3'-phosphate
  modified_base 15: mod_base = OTHER; note = 2'-O-methyluridine-3'-phosphate
  modified_base 16: mod_base = OTHER; note = 2'-deoxy-2'-fluorouridine-3'-phosphate
  modified_base 17: mod_base = OTHER; note = 2'-O-methylcytidine-3'-phosphate
  modified_base 18: mod_base = OTHER; note = 2'-O-methyluridine-3'-phosphate
  modified_base 19: mod_base = OTHER; note = 2'-O-methylcytidine-3'-phosphate
  modified_base 20: mod_base = OTHER; note = 2'-O-methylcytidine-3'-phosphate
  modified_base 21: mod_base = OTHER; note = 2'-O-methylcytidine-3'-phosphorothioate
  modified_base 22: mod_base = OTHER; note = 2'-O-methylcytidine-3'-phosphorothioate
  modified_base 23: mod_base = OTHER; note = 2'-O-methylcytidine
catcttgaacacctttctccccc

SEQ ID NO: 2066 - RNA, 21 nt, synthetic construct
  source 1..21: mol_type = other RNA
  modified_base 1: mod_base = OTHER; note = 2'-O-methyladenosine-3'-phosphorothioate
  modified_base 2: mod_base = OTHER; note = 2'-O-methyladenosine-3'-phosphorothioate
  modified_base 3: mod_base = OTHER; note = 2'-O-methyladenosine-3'-phosphate
  modified_base 4: mod_base = OTHER; note = 2'-O-methyluridine-3'-phosphate
  modified_base 5: mod_base = OTHER; note = 2'-O-methylcytidine-3'-phosphate
  modified_base 6: mod_base = OTHER; note = 2'-O-methyladenosine-3'-phosphate
  modified_base 7: mod_base = OTHER; note = 2'-deoxy-2'-fluoroguanosine-3'-phosphate
  modified_base 8: mod_base = OTHER; note = 2'-O-methyluridine-3'-phosphate
  modified_base 9: mod_base = OTHER; note = 2'-deoxy-2'-fluoroadenosine-3'-phosphate
  modified_base 10: mod_base = OTHER; note = 2'-deoxy-2'-fluorocytidine-3'-phosphate
  modified_base 11: mod_base = OTHER; note = 2'-deoxy-2'-fluorouridine-3'-phosphate
  modified_base 12: mod_base = OTHER; note = 2'-O-methyluridine-3'-phosphate
  modified_base 13: mod_base = OTHER; note = 2'-O-methylcytidine-3'-phosphate
  modified_base 14: mod_base = OTHER; note = 2'-O-methylcytidine-3'-phosphate
  modified_base 15: mod_base = OTHER; note = 2'-O-methyladenosine-3'-phosphate
  modified_base 16: mod_base = OTHER; note = 2'-O-methyladenosine-3'-phosphate
  modified_base 17: mod_base = OTHER; note = 2'-O-methyladenosine-3'-phosphate
  modified_base 18: mod_base = OTHER; note = 2'-O-methylguanosine-3'-phosphate
  modified_base 19: mod_base = OTHER; note = 2'-O-methyluridine-3'-phosphate
  modified_base 20: mod_base = OTHER; note = 2'-O-methylcytidine-3'-phosphate
  modified_base 21: mod_base = OTHER; note = 2'-O-methyluridine-3'-phosphate ((2S,4R)-1-[29-[[2-(acetylamino)-2-deoxy-beta-D-galactopyra nosyl]oxy]-14,14-bis[[3-[[3-[[5-[[2-(acetylamino)-2-deoxy-b eta-D-galactopyranosyl]oxy]-1-oxopentyl]amino]propyl]amino] -3-oxopropoxy]methyl]-1,12,19,25-tetraoxo-16-oxa-13,20,24-t riazanonacos-1-yl]-4-hydroxy-2-pyrrolidinyl)methyl ester
aaatcagtacttccaaagtct

SEQ ID NO: 2067 - RNA, 23 nt, synthetic construct
  source 1..23: mol_type = other RNA
  modified_base 1: mod_base = OTHER; note = 2'-O-methyladenosine-3'-phosphorothioate
  modified_base 2: mod_base = OTHER; note = 2'-deoxy-2'-fluoroguanosine-3'-phosphorothioate
  modified_base 3: mod_base = OTHER; note = 2'-O-methyladenosine-3'-phosphate
  modified_base 4: mod_base = OTHER; note = 2'-O-methylcytidine-3'-phosphate
  modified_base 5: mod_base = OTHER; note = 2'-O-methyluridine-3'-phosphate
  modified_base 6: mod_base = OTHER; note = 2'-deoxy-2'-fluorouridine-3'-phosphate
  modified_base 7: mod_base = OTHER; note = 2'-O-methyluridine-3'-phosphate
  modified_base 8: mod_base = OTHER; note = 2'-deoxy-2'-fluoroguanosine-3'-phosphate
  modified_base 9: mod_base = OTHER; note = 2'-deoxy-2'-fluoroguanosine-3'-phosphate
  modified_base 10: mod_base = OTHER; note = 2'-O-methyladenosine-3'-phosphate
  modified_base 11: mod_base = OTHER; note = 2'-O-methyladenosine-3'-phosphate
  modified_base 12: mod_base = OTHER; note = 2'-O-methylguanosine-3'-phosphate
  modified_base 13: mod_base = OTHER; note = 2'-O-methyluridine-3'-phosphate
  modified_base 14: mod_base = OTHER; note = 2'-deoxy-2'-fluoroadenosine-3'-phosphate
  modified_base 15: mod_base = OTHER; note = 2'-O-methylcytidine-3'-phosphate
  modified_base 16: mod_base = OTHER; note = 2'-deoxy-2'-fluorouridine-3'-phosphate
  modified_base 17: mod_base = OTHER; note = 2'-O-methylguanosine-3'-phosphate
  modified_base 18: mod_base = OTHER; note = 2'-O-methyladenosine-3'-phosphate
  modified_base 19: mod_base = OTHER; note = 2'-O-methyluridine-3'-phosphate
  modified_base 20: mod_base = OTHER; note = 2'-O-methyluridine-3'-phosphate
  modified_base 21: mod_base = OTHER; note = 2'-O-methyluridine-3'-phosphorothioate
  modified_base 22: mod_base = OTHER; note = 2'-O-methyladenosine-3'-phosphorothioate
  modified_base 23: mod_base = OTHER; note = 2'-O-methylguanosine
agactttggaagtactgatttag

SEQ ID NO: 2068 - RNA, 21 nt, synthetic construct
  source 1..21: mol_type = other RNA
  modified_base 1: mod_base = OTHER; note = 2'-O-methyladenosine-3'-phosphorothioate
  modified_base 2: mod_base = OTHER; note = 2'-O-methyladenosine-3'-phosphorothioate
  modified_base 3: mod_base = OTHER; note = 2'-O-methyluridine-3'-phosphate
  modified_base 4: mod_base = OTHER; note = 2'-O-methylcytidine-3'-phosphate
  modified_base 5: mod_base = OTHER; note = 2'-O-methyladenosine-3'-phosphate
  modified_base 6: mod_base = OTHER; note = 2'-O-methylguanosine-3'-phosphate
  modified_base 7: mod_base = OTHER; note = 2'-deoxy-2'-fluorouridine-3'-phosphate
  modified_base 8: mod_base = OTHER; note = 2'-O-methyladenosine-3'-phosphate
  modified_base 9: mod_base = OTHER; note = 2'-deoxy-2'-fluorocytidine-3'-phosphate
  modified_base 10: mod_base = OTHER; note = 2'-deoxy-2'-fluorouridine-3'-phosphate
  modified_base 11: mod_base = OTHER; note = 2'-deoxy-2'-fluorouridine-3'-phosphate
  modified_base 12: mod_base = OTHER; note = 2'-O-methylcytidine-3'-phosphate
  modified_base 13: mod_base = OTHER; note = 2'-O-methylcytidine-3'-phosphate
  modified_base 14: mod_base = OTHER; note = 2'-O-methyladenosine-3'-phosphate
  modified_base 15: mod_base = OTHER; note = 2'-O-methyladenosine-3'-phosphate
  modified_base 16: mod_base = OTHER; note = 2'-O-methyladenosine-3'-phosphate
  modified_base 17: mod_base = OTHER; note = 2'-O-methylguanosine-3'-phosphate
  modified_base 18: mod_base = OTHER; note = 2'-O-methyluridine-3'-phosphate
  modified_base 19: mod_base = OTHER; note = 2'-O-methylcytidine-3'-phosphate
  modified_base 20: mod_base = OTHER; note = 2'-O-methyluridine-3'-phosphate
  modified_base 21: mod_base = OTHER; note = 2'-O-methyladenosine-3'-phosphate ((2S,4R)-1-[29-[[2-(acetylamino)-2-deoxy-beta-D-galactopyra nosyl]oxy]-14,14-bis[[3-[[3-[[5-[[2-(acetylamino)-2-deoxy-b eta-D-galactopyranosyl]oxy]-1-oxopentyl]amino]propyl]amino] -3-oxopropoxy]methyl]-1,12,19,25-tetraoxo-16-oxa-13,20,24-t riazanonacos-1-yl]-4-hydroxy-2-pyrrolidinyl)methyl ester
aatcagtacttccaaagtcta

SEQ ID NO: 2069 - RNA, 23 nt, synthetic construct
  source 1..23: mol_type = other RNA
  modified_base 1: mod_base = OTHER; note = 2'-O-methyluridine-3'-phosphorothioate
  modified_base 2: mod_base = OTHER; note = 2'-deoxy-2'-fluoroadenosine-3'-phosphorothioate
  modified_base 3: mod_base = OTHER; note = 2'-O-methylguanosine-3'-phosphate
  modified_base 4: mod_base = OTHER; note = 2'-O-methyladenosine-3'-phosphate
  modified_base 5: mod_base = OTHER; note = 2'-O-methylcytidine-3'-phosphate
  modified_base 6: mod_base = OTHER; note = 2'-deoxy-2'-fluorouridine-3'-phosphate
  modified_base 7: mod_base = OTHER; note = 2'-O-methyluridine-3'-phosphate
  modified_base 8: mod_base = OTHER; note = 2'-deoxy-2'-fluorouridine-3'-phosphate
  modified_base 9: mod_base = OTHER; note = 2'-deoxy-2'-fluoroguanosine-3'-phosphate
  modified_base 10: mod_base = OTHER; note = 2'-O-methylguanosine-3'-phosphate
  modified_base 11: mod_base = OTHER; note = 2'-O-methyladenosine-3'-phosphate
  modified_base 12: mod_base = OTHER; note = 2'-O-methyladenosine-3'-phosphate
  modified_base 13: mod_base = OTHER; note = 2'-O-methylguanosine-3'-phosphate
  modified_base 14: mod_base = OTHER; note = 2'-deoxy-2'-fluorouridine-3'-phosphate
  modified_base 15: mod_base = OTHER; note = 2'-O-methyladenosine-3'-phosphate
  modified_base 16: mod_base = OTHER; note = 2'-deoxy-2'-fluorocytidine-3'-phosphate
  modified_base 17: mod_base = OTHER; note = 2'-O-methyluridine-3'-phosphate
  modified_base 18: mod_base = OTHER; note = 2'-O-methylguanosine-3'-phosphate
  modified_base 19: mod_base = OTHER; note = 2'-O-methyladenosine-3'-phosphate
  modified_base 20: mod_base = OTHER; note = 2'-O-methyluridine-3'-phosphate
  modified_base 21: mod_base = OTHER; note = 2'-O-methyluridine-3'-phosphorothioate
  modified_base 22: mod_base = OTHER; note = 2'-O-methyluridine-3'-phosphorothioate
  modified_base 23: mod_base = OTHER; note = 2'-O-methyladenosine
tagactttggaagtactgattta

SEQ ID NO: 2070 - RNA, 21 nt, synthetic construct
  source 1..21: mol_type = other RNA
  modified_base 1: mod_base = OTHER; note = 2'-O-methyluridine-3'-phosphorothioate
  modified_base 2: mod_base = OTHER; note = 2'-O-methylguanosine-3'-phosphorothioate
  modified_base 3: mod_base = OTHER; note = 2'-O-methylcytidine-3'-phosphate
  modified_base 4: mod_base = OTHER; note = 2'-O-methyluridine-3'-phosphate
  modified_base 5: mod_base = OTHER; note = 2'-O-methyladenosine-3'-phosphate
  modified_base 6: mod_base = OTHER; note = 2'-O-methyladenosine-3'-phosphate
  modified_base 7: mod_base = OTHER; note = 2'-deoxy-2'-fluoroadenosine-3'-phosphate
  modified_base 8: mod_base = OTHER; note = 2'-O-methyluridine-3'-phosphate
  modified_base 9: mod_base = OTHER; note = 2'-deoxy-2'-fluorocytidine-3'-phosphate
  modified_base 10: mod_base = OTHER; note = 2'-deoxy-2'-fluoroadenosine-3'-phosphate
  modified_base 11: mod_base = OTHER; note = 2'-deoxy-2'-fluoroguanosine-3'-phosphate
  modified_base 12: mod_base = OTHER; note = 2'-O-methyluridine-3'-phosphate
  modified_base 13: mod_base = OTHER; note = 2'-O-methyladenosine-3'-phosphate
  modified_base 14: mod_base = OTHER; note = 2'-O-methylcytidine-3'-phosphate
  modified_base 15: mod_base = OTHER; note = 2'-O-methyluridine-3'-phosphate
  modified_base 16: mod_base = OTHER; note = 2'-O-methyluridine-3'-phosphate
  modified_base 17: mod_base = OTHER; note = 2'-O-methylcytidine-3'-phosphate
  modified_base 18: mod_base = OTHER; note = 2'-O-methylcytidine-3'-phosphate
  modified_base 19: mod_base = OTHER; note = 2'-O-methyladenosine-3'-phosphate
  modified_base 20: mod_base = OTHER; note = 2'-O-methyladenosine-3'-phosphate
  modified_base 21: mod_base = OTHER; note = 2'-O-methyladenosine-3'-phosphate ((2S,4R)-1-[29-[[2-(acetylamino)-2-deoxy-beta-D-galactopyra nosyl]oxy]-14,14-bis[[3-[[3-[[5-[[2-(acetylamino)-2-deoxy-b eta-D-galactopyranosyl]oxy]-1-oxopentyl]amino]propyl]amino] -3-oxopropoxy]methyl]-1,12,19,25-tetraoxo-16-oxa-13,20,24-t riazanonacos-1-yl]-4-hydroxy-2-pyrrolidinyl)methyl ester
tgctaaatcagtacttccaaa

SEQ ID NO: 2071 - RNA, 23 nt, synthetic construct
  source 1..23: mol_type = other RNA
  modified_base 1: mod_base = OTHER; note = 2'-O-methyluridine-3'-phosphorothioate
  modified_base 2: mod_base = OTHER; note = 2'-deoxy-2'-fluorouridine-3'-phosphorothioate
  modified_base 3: mod_base = OTHER; note = 2'-O-methyluridine-3'-phosphate
  modified_base 4: mod_base = OTHER; note = 2'-O-methylguanosine-3'-phosphate
  modified_base 5: mod_base = OTHER; note = 2'-O-methylguanosine-3'-phosphate
  modified_base 6: mod_base = OTHER; note = 2'-deoxy-2'-fluoroadenosine-3'-phosphate
  modified_base 7: mod_base = OTHER; note = 2'-O-methyladenosine-3'-phosphate
  modified_base 8: mod_base = OTHER; note = 2'-deoxy-2'-fluoroguanosine-3'-phosphate
  modified_base 9: mod_base = OTHER; note = 2'-deoxy-2'-fluorouridine-3'-phosphate
  modified_base 10: mod_base = OTHER; note = 2'-O-methyladenosine-3'-phosphate
  modified_base 11: mod_base = OTHER; note = 2'-O-methylcytidine-3'-phosphate
  modified_base 12: mod_base = OTHER; note = 2'-O-methyluridine-3'-phosphate
  modified_base 13: mod_base = OTHER; note = 2'-O-methylguanosine-3'-phosphate
  modified_base 14: mod_base = OTHER; note = 2'-deoxy-2'-fluoroadenosine-3'-phosphate
  modified_base 15: mod_base = OTHER; note = 2'-O-methyluridine-3'-phosphate
  modified_base 16: mod_base = OTHER; note = 2'-deoxy-2'-fluorouridine-3'-phosphate
  modified_base 17: mod_base = OTHER; note = 2'-O-methyluridine-3'-phosphate
  modified_base 18: mod_base = OTHER; note = 2'-O-methyladenosine-3'-phosphate
  modified_base 19: mod_base = OTHER; note = 2'-O-methylguanosine-3'-phosphate
  modified_base 20: mod_base = OTHER; note = 2'-O-methylcytidine-3'-phosphate
  modified_base 21: mod_base = OTHER; note = 2'-O-methyladenosine-3'-phosphorothioate
  modified_base 22: mod_base = OTHER; note = 2'-O-methyluridine-3'-phosphorothioate
  modified_base 23: mod_base = OTHER; note = 2'-O-methylguanosine
tttggaagtactgatttagcatg

SEQ ID NO: 2072 - RNA, 21 nt, synthetic construct
  source 1..21: mol_type = other RNA
  modified_base 1: mod_base = OTHER; note = 2'-O-methyladenosine-3'-phosphorothioate
  modified_base 2: mod_base = OTHER; note = 2'-O-methyluridine-3'-phosphorothioate
  modified_base 3: mod_base = OTHER; note = 2'-O-methylguanosine-3'-phosphate
  modified_base 4: mod_base = OTHER; note = 2'-O-methylcytidine-3'-phosphate
  modified_base 5: mod_base = OTHER; note = 2'-O-methyluridine-3'-phosphate
  modified_base 6: mod_base = OTHER; note = 2'-O-methyladenosine-3'-phosphate
  modified_base 7: mod_base = OTHER; note = 2'-deoxy-2'-fluoroadenosine-3'-phosphate
  modified_base 8: mod_base = OTHER; note = 2'-O-methyladenosine-3'-phosphate
  modified_base 9: mod_base = OTHER; note = 2'-deoxy-2'-fluorouridine-3'-phosphate
  modified_base 10: mod_base = OTHER; note = 2'-deoxy-2'-fluorocytidine-3'-phosphate
  modified_base 11: mod_base = OTHER; note = 2'-deoxy-2'-fluoroadenosine-3'-phosphate
  modified_base 12: mod_base = OTHER; note = 2'-O-methylguanosine-3'-phosphate
  modified_base 13: mod_base = OTHER; note = 2'-O-methyluridine-3'-phosphate
  modified_base 14: mod_base = OTHER; note = 2'-O-methyladenosine-3'-phosphate
  modified_base 15: mod_base = OTHER; note = 2'-O-methylcytidine-3'-phosphate
  modified_base 16: mod_base = OTHER; note = 2'-O-methyluridine-3'-phosphate
  modified_base 17: mod_base = OTHER; note = 2'-O-methyluridine-3'-phosphate
  modified_base 18: mod_base = OTHER; note = 2'-O-methylcytidine-3'-phosphate
  modified_base 19: mod_base = OTHER; note = 2'-O-methylcytidine-3'-phosphate
  modified_base 20: mod_base = OTHER; note = 2'-O-methyladenosine-3'-phosphate
  modified_base 21: mod_base = OTHER; note = 2'-O-methyladenosine-3'-phosphate ((2S,4R)-1-[29-[[2-(acetylamino)-2-deoxy-beta-D-galactopyra nosyl]oxy]-14,14-bis[[3-[[3-[[5-[[2-(acetylamino)-2-deoxy-b eta-D-galactopyranosyl]oxy]-1-oxopentyl]amino]propyl]amino] -3-oxopropoxy]methyl]-1,12,19,25-tetraoxo-16-oxa-13,20,24-t riazanonacos-1-yl]-4-hydroxy-2-pyrrolidinyl)methyl ester
atgctaaatcagtacttccaa

SEQ ID NO: 2073 - RNA, 23 nt, synthetic construct
  source 1..23: mol_type = other RNA
  modified_base 1: mod_base = OTHER; note = 2'-O-methyluridine-3'-phosphorothioate
  modified_base 2: mod_base = OTHER; note = 2'-deoxy-2'-fluorouridine-3'-phosphorothioate
  modified_base 3: mod_base = OTHER; note = 2'-O-methylguanosine-3'-phosphate
  modified_base 4: mod_base = OTHER; note = 2'-O-methylguanosine-3'-phosphate
  modified_base 5: mod_base = OTHER; note = 2'-O-methyladenosine-3'-phosphate
  modified_base 6: mod_base = OTHER; note = 2'-deoxy-2'-fluoroadenosine-3'-phosphate
  modified_base 7: mod_base = OTHER; note = 2'-O-methylguanosine-3'-phosphate
  modified_base 8: mod_base = OTHER; note = 2'-deoxy-2'-fluorouridine-3'-phosphate
  modified_base 9: mod_base = OTHER; note = 2'-deoxy-2'-fluoroadenosine-3'-phosphate
  modified_base 10: mod_base = OTHER; note = 2'-O-methylcytidine-3'-phosphate
  modified_base 11: mod_base = OTHER; note = 2'-O-methyluridine-3'-phosphate
  modified_base 12: mod_base = OTHER; note = 2'-O-methylguanosine-3'-phosphate
  modified_base 13: mod_base = OTHER; note = 2'-O-methyladenosine-3'-phosphate
  modified_base 14: mod_base = OTHER; note = 2'-deoxy-2'-fluorouridine-3'-phosphate
  modified_base 15: mod_base = OTHER; note = 2'-O-methyluridine-3'-phosphate
  modified_base 16: mod_base = OTHER; note = 2'-deoxy-2'-fluorouridine-3'-phosphate
  modified_base 17: mod_base = OTHER; note = 2'-O-methyladenosine-3'-phosphate
  modified_base 18: mod_base = OTHER; note = 2'-O-methylguanosine-3'-phosphate
  modified_base 19: mod_base = OTHER; note = 2'-O-methylcytidine-3'-phosphate
  modified_base 20: mod_base = OTHER; note = 2'-O-methyladenosine-3'-phosphate
  modified_base 21: mod_base = OTHER; note = 2'-O-methyluridine-3'-phosphorothioate
  modified_base 22: mod_base = OTHER; note = 2'-O-methylguanosine-3'-phosphorothioate
  modified_base 23: mod_base = OTHER; note = 2'-O-methyluridine
ttggaagtactgatttagcatgt

SEQ ID NO: 2074 - RNA, 21 nt, synthetic construct
  source 1..21: mol_type = other RNA
  modified_base 1: mod_base = OTHER; note = 2'-O-methyladenosine-3'-phosphorothioate
  modified_base 2: mod_base = OTHER; note = 2'-O-methylcytidine-3'-phosphorothioate
  modified_base 3: mod_base = OTHER; note = 2'-O-methyladenosine-3'-phosphate
  modified_base 4: mod_base = OTHER; note = 2'-O-methyluridine-3'-phosphate
  modified_base 5: mod_base = OTHER; note = 2'-O-methylcytidine-3'-phosphate
  modified_base 6: mod_base = OTHER; note = 2'-O-methyluridine-3'-phosphate
  modified_base 7: mod_base = OTHER; note = 2'-deoxy-2'-fluorouridine-3'-phosphate
  modified_base 8: mod_base = OTHER; note = 2'-O-methyluridine-3'-phosphate
  modified_base 9: mod_base = OTHER; note = 2'-deoxy-2'-fluoroadenosine-3'-phosphate
  modified_base 10: mod_base = OTHER; note = 2'-deoxy-2'-fluoroguanosine-3'-phosphate
  modified_base 11: mod_base = OTHER; note = 2'-deoxy-2'-fluorouridine-3'-phosphate
  modified_base 12: mod_base = OTHER; note = 2'-O-methylguanosine-3'-phosphate
  modified_base 13: mod_base = OTHER; note = 2'-O-methyluridine-3'-phosphate
  modified_base 14: mod_base = OTHER; note = 2'-O-methylcytidine-3'-phosphate
  modified_base 15: mod_base = OTHER; note = 2'-O-methyluridine-3'-phosphate
  modified_base 16: mod_base = OTHER; note = 2'-O-methylguanosine-3'-phosphate
  modified_base 17: mod_base = OTHER; note = 2'-O-methyladenosine-3'-phosphate
  modified_base 18: mod_base = OTHER; note = 2'-O-methyladenosine-3'-phosphate
  modified_base 19: mod_base = OTHER; note = 2'-O-methyluridine-3'-phosphate
  modified_base 20: mod_base = OTHER; note = 2'-O-methyladenosine-3'-phosphate
  modified_base 21: mod_base = OTHER; note = 2'-O-methyluridine-3'-phosphate ((2S,4R)-1-[29-[[2-(acetylamino)-2-deoxy-beta-D-galactopyra nosyl]oxy]-14,14-bis[[3-[[3-[[5-[[2-(acetylamino)-2-deoxy-b eta-D-galactopyranosyl]oxy]-1-oxopentyl]amino]propyl]amino] -3-oxopropoxy]methyl]-1,12,19,25-tetraoxo-16-oxa-13,20,24-t riazanonacos-1-yl]-4-hydroxy-2-pyrrolidinyl)methyl ester
acatctttagtgtctgaatat

SEQ ID NO: 2075 - RNA, 23 nt, synthetic construct
  source 1..23: mol_type = other RNA
  modified_base 1: mod_base = OTHER; note = 2'-O-methyladenosine-3'-phosphorothioate
  modified_base 2: mod_base = OTHER; note = 2'-deoxy-2'-fluorouridine-3'-phosphorothioate
  modified_base 3: mod_base = OTHER; note = 2'-O-methyladenosine-3'-phosphate
  modified_base 4: mod_base = OTHER; note = 2'-O-methyluridine-3'-phosphate
  modified_base 5: mod_base = OTHER; note = 2'-O-methyluridine-3'-phosphate
  modified_base 6: mod_base = OTHER; note = 2'-deoxy-2'-fluorocytidine-3'-phosphate
  modified_base 7: mod_base = OTHER; note = 2'-O-methyladenosine-3'-phosphate
  modified_base 8: mod_base = OTHER; note = 2'-deoxy-2'-fluoroguanosine-3'-phosphate
  modified_base 9: mod_base = OTHER; note = 2'-deoxy-2'-fluoroadenosine-3'-phosphate
  modified_base 10: mod_base = OTHER; note = 2'-O-methylcytidine-3'-phosphate
  modified_base 11: mod_base = OTHER; note = 2'-O-methyladenosine-3'-phosphate
  modified_base 12: mod_base = OTHER; note = 2'-O-methylcytidine-3'-phosphate
  modified_base 13: mod_base = OTHER; note = 2'-O-methyluridine-3'-phosphate
  modified_base 14: mod_base = OTHER; note = 2'-deoxy-2'-fluoroadenosine-3'-phosphate
  modified_base 15: mod_base = OTHER; note = 2'-O-methyladenosine-3'-phosphate
  modified_base 16: mod_base = OTHER; note = 2'-deoxy-2'-fluoroadenosine-3'-phosphate
  modified_base 17: mod_base = OTHER; note = 2'-O-methylguanosine-3'-phosphate
  modified_base 18: mod_base = OTHER; note = 2'-O-methyladenosine-3'-phosphate
  modified_base 19: mod_base = OTHER; note = 2'-O-methyluridine-3'-phosphate
  modified_base 20: mod_base = OTHER; note = 2'-O-methylguanosine-3'-phosphate
  modified_base 21: mod_base = OTHER; note = 2'-O-methyluridine-3'-phosphorothioate
  modified_base 22: mod_base = OTHER; note = 2'-O-methylguanosine-3'-phosphorothioate
  modified_base 23: mod_base = OTHER; note = 2'-O-methyladenosine
atattcagacactaaagatgtga

SEQ ID NO: 2076 - RNA, 21 nt, synthetic construct
  source 1..21: mol_type = other RNA
  modified_base 1: mod_base = OTHER; note = 2'-O-methylcytidine-3'-phosphorothioate
  modified_base 2: mod_base = OTHER; note = 2'-O-methyladenosine-3'-phosphorothioate
  modified_base 3: mod_base = OTHER; note = 2'-O-methyluridine-3'-phosphate
  modified_base 4: mod_base = OTHER; note = 2'-O-methylcytidine-3'-phosphate
  modified_base 5: mod_base = OTHER; note = 2'-O-methyluridine-3'-phosphate
  modified_base 6: mod_base = OTHER; note = 2'-O-methyluridine-3'-phosphate
  modified_base 7: mod_base = OTHER; note = 2'-deoxy-2'-fluorouridine-3'-phosphate
  modified_base 8: mod_base = OTHER; note = 2'-O-methyladenosine-3'-phosphate
  modified_base 9: mod_base = OTHER; note = 2'-deoxy-2'-fluoroguanosine-3'-phosphate
  modified_base 10: mod_base = OTHER; note = 2'-deoxy-2'-fluorouridine-3'-phosphate
  modified_base 11: mod_base = OTHER; note = 2'-deoxy-2'-fluoroguanosine-3'-phosphate
  modified_base 12: mod_base = OTHER; note = 2'-O-methyluridine-3'-phosphate
  modified_base 13: mod_base = OTHER; note = 2'-O-methylcytidine-3'-phosphate
  modified_base 14: mod_base = OTHER; note = 2'-O-methyluridine-3'-phosphate
  modified_base 15: mod_base = OTHER; note = 2'-O-methylguanosine-3'-phosphate
  modified_base 16: mod_base = OTHER; note = 2'-O-methyladenosine-3'-phosphate
  modified_base 17: mod_base = OTHER; note = 2'-O-methyladenosine-3'-phosphate
  modified_base 18: mod_base = OTHER; note = 2'-O-methyluridine-3'-phosphate
  modified_base 19: mod_base = OTHER; note = 2'-O-methyladenosine-3'-phosphate
  modified_base 20: mod_base = OTHER; note = 2'-O-methyluridine-3'-phosphate
  modified_base 21: mod_base = OTHER; note = 2'-O-methyladenosine-3'-phosphate ((2S,4R)-1-[29-[[2-(acetylamino)-2-deoxy-beta-D-galactopyra nosyl]oxy]-14,14-bis[[3-[[3-[[5-[[2-(acetylamino)-2-deoxy-b eta-D-galactopyranosyl]oxy]-1-oxopentyl]amino]propyl]amino] -3-oxopropoxy]methyl]-1,12,19,25-tetraoxo-16-oxa-13,20,24-t riazanonacos-1-yl]-4-hydroxy-2-pyrrolidinyl)methyl ester
catctttagtgtctgaatata

SEQ ID NO: 2077 - RNA, 23 nt, synthetic construct
  source 1..23: mol_type = other RNA
  modified_base 1: mod_base = OTHER; note = 2'-O-methyluridine-3'-phosphorothioate
  modified_base 2: mod_base = OTHER; note = 2'-deoxy-2'-fluoroadenosine-3'-phosphorothioate
  modified_base 3: mod_base = OTHER; note = 2'-O-methyluridine-3'-phosphate
  modified_base 4: mod_base = OTHER; note = 2'-O-methyladenosine-3'-phosphate
  modified_base 5: mod_base = OTHER; note = 2'-O-methyluridine-3'-phosphate
  modified_base 6: mod_base = OTHER; note = 2'-deoxy-2'-fluorouridine-3'-phosphate
  modified_base 7: mod_base = OTHER; note = 2'-O-methylcytidine-3'-phosphate
  modified_base 8: mod_base = OTHER; note = 2'-deoxy-2'-fluoroadenosine-3'-phosphate
  modified_base 9: mod_base = OTHER; note = 2'-deoxy-2'-fluoroguanosine-3'-phosphate
  modified_base 10: mod_base = OTHER; note = 2'-O-methyladenosine-3'-phosphate
  modified_base 11: mod_base = OTHER; note = 2'-O-methylcytidine-3'-phosphate
  modified_base 12: mod_base = OTHER; note = 2'-O-methyladenosine-3'-phosphate
  modified_base 13: mod_base = OTHER; note = 2'-O-methylcytidine-3'-phosphate
  modified_base 14: mod_base = OTHER; note = 2'-deoxy-2'-fluorouridine-3'-phosphate
  modified_base 15: mod_base = OTHER; note = 2'-O-methyladenosine-3'-phosphate
  modified_base 16: mod_base = OTHER; note = 2'-deoxy-2'-fluoroadenosine-3'-phosphate
  modified_base 17: mod_base = OTHER; note = 2'-O-methyladenosine-3'-phosphate
  modified_base 18: mod_base = OTHER; note = 2'-O-methylguanosine-3'-phosphate
  modified_base 19: mod_base = OTHER; note = 2'-O-methyladenosine-3'-phosphate
  modified_base 20: mod_base = OTHER; note = 2'-O-methyluridine-3'-phosphate
  modified_base 21: mod_base = OTHER; note = 2'-O-methylguanosine-3'-phosphorothioate
  modified_base 22: mod_base = OTHER; note = 2'-O-methyluridine-3'-phosphorothioate
  modified_base 23: mod_base = OTHER; note = 2'-O-methylguanosine
tatattcagacactaaagatgtg

SEQ ID NO: 2078 - RNA, 21 nt, synthetic construct
  source 1..21: mol_type = other RNA
  modified_base 1: mod_base = OTHER; note = 2'-O-methyladenosine-3'-phosphorothioate
  modified_base 2: mod_base = OTHER; note = 2'-O-methyladenosine-3'-phosphorothioate
  modified_base 3: mod_base = OTHER; note = 2'-O-methyluridine-3'-phosphate
  modified_base 4: mod_base = OTHER; note = 2'-O-methylcytidine-3'-phosphate
  modified_base 5: mod_base = OTHER; note = 2'-O-methyladenosine-3'-phosphate
  modified_base 6: mod_base = OTHER; note = 2'-O-methylcytidine-3'-phosphate
  modified_base 7: mod_base = OTHER; note = 2'-deoxy-2'-fluoroadenosine-3'-phosphate
  modified_base 8: mod_base = OTHER; note = 2'-O-methyluridine-3'-phosphate
  modified_base 9: mod_base = OTHER; note = 2'-deoxy-2'-fluorocytidine-3'-phosphate
  modified_base 10: mod_base = OTHER; note = 2'-deoxy-2'-fluorouridine-3'-phosphate
  modified_base 11: mod_base = OTHER; note = 2'-deoxy-2'-fluorouridine-3'-phosphate
  modified_base 12: mod_base = OTHER; note = 2'-O-methyluridine-3'-phosphate
  modified_base 13: mod_base = OTHER; note = 2'-O-methyladenosine-3'-phosphate
  modified_base 14: mod_base = OTHER; note = 2'-O-methylguanosine-3'-phosphate
  modified_base 15: mod_base = OTHER; note = 2'-O-methyluridine-3'-phosphate
  modified_base 16: mod_base = OTHER; note = 2'-O-methylguanosine-3'-phosphate
  modified_base 17: mod_base = OTHER; note = 2'-O-methyluridine-3'-phosphate
  modified_base 18: mod_base = OTHER; note = 2'-O-methylcytidine-3'-phosphate
  modified_base 19: mod_base = OTHER; note = 2'-O-methyluridine-3'-phosphate
  modified_base 20: mod_base = OTHER; note = 2'-O-methylguanosine-3'-phosphate
  modified_base 21: mod_base = OTHER; note = 2'-O-methyladenosine-3'-phosphate ((2S,4R)-1-[29-[[2-(acetylamino)-2-deoxy-beta-D-galactopyra nosyl]oxy]-14,14-bis[[3-[[3-[[5-[[2-(acetylamino)-2-deoxy-b eta-D-galactopyranosyl]oxy]-1-oxopentyl]amino]propyl]amino] -3-oxopropoxy]methyl]-1,12,19,25-tetraoxo-16-oxa-13,20,24-t riazanonacos-1-yl]-4-hydroxy-2-pyrrolidinyl)methyl ester
aatcacatctttagtgtctga

SEQ ID NO: 2079 - RNA, 23 nt, synthetic construct
  source 1..23: mol_type = other RNA
  modified_base 1: mod_base = OTHER; note = 2'-O-methyluridine-3'-phosphorothioate
  modified_base 2: mod_base = OTHER; note = 2'-deoxy-2'-fluorocytidine-3'-phosphorothioate
  modified_base 3: mod_base = OTHER; note = 2'-O-methyladenosine-3'-phosphate
  modified_base 4: mod_base = OTHER; note = 2'-O-methylguanosine-3'-phosphate
  modified_base 5: mod_base = OTHER; note = 2'-O-methyladenosine-3'-phosphate
  modified_base 6: mod_base = OTHER; note = 2'-deoxy-2'-fluorocytidine-3'-phosphate
  modified_base 7: mod_base = OTHER; note = 2'-O-methyladenosine-3'-phosphate
  modified_base 8: mod_base = OTHER; note = 2'-deoxy-2'-fluorocytidine-3'-phosphate
  modified_base 9: mod_base = OTHER; note = 2'-deoxy-2'-fluorouridine-3'-phosphate
  modified_base 10: mod_base = OTHER; note = 2'-O-methyladenosine-3'-phosphate
  modified_base 11: mod_base = OTHER; note = 2'-O-methyladenosine-3'-phosphate
  modified_base 12: mod_base = OTHER; note = 2'-O-methyladenosine-3'-phosphate
  modified_base 13: mod_base = OTHER; note = 2'-O-methylguanosine-3'-phosphate
  modified_base 14: mod_base = OTHER; note = 2'-deoxy-2'-fluoroadenosine-3'-phosphate
  modified_base 15: mod_base = OTHER; note = 2'-O-methyluridine-3'-phosphate
  modified_base 16: mod_base = OTHER; note = 2'-deoxy-2'-fluoroguanosine-3'-phosphate
  modified_base 17: mod_base = OTHER; note = 2'-O-methyluridine-3'-phosphate
  modified_base 18: mod_base = OTHER; note = 2'-O-methylguanosine-3'-phosphate
  modified_base 19: mod_base = OTHER; note = 2'-O-methyladenosine-3'-phosphate
  modified_base 20: mod_base = OTHER; note = 2'-O-methyluridine-3'-phosphate
  modified_base 21: mod_base = OTHER; note = 2'-O-methyluridine-3'-phosphorothioate
  modified_base 22: mod_base = OTHER; note = 2'-O-methylguanosine-3'-phosphorothioate
  modified_base 23: mod_base = OTHER; note = 2'-O-methylguanosine
tcagacactaaagatgtgattgg

SEQ ID NO: 2080 - RNA, 21 nt, synthetic construct
  source 1..21: mol_type = other RNA
  modified_base 1: mod_base = OTHER; note = 2'-O-methylcytidine-3'-phosphorothioate
  modified_base 2: mod_base = OTHER; note = 2'-O-methyladenosine-3'-phosphorothioate
  modified_base 3: mod_base = OTHER; note = 2'-O-methyladenosine-3'-phosphate
  modified_base 4: mod_base = OTHER; note = 2'-O-methyluridine-3'-phosphate
  modified_base 5: mod_base = OTHER; note = 2'-O-methylcytidine-3'-phosphate
  modified_base 6: mod_base = OTHER; note = 2'-O-methyladenosine-3'-phosphate
  modified_base 7: mod_base = OTHER; note = 2'-deoxy-2'-fluorocytidine-3'-phosphate
  modified_base 8: mod_base = OTHER; note = 2'-O-methyladenosine-3'-phosphate
  modified_base 9: mod_base = OTHER; note = 2'-deoxy-2'-fluorouridine-3'-phosphate
  modified_base 10: mod_base = OTHER; note = 2'-deoxy-2'-fluorocytidine-3'-phosphate
  modified_base 11: mod_base = OTHER; note = 2'-deoxy-2'-fluorouridine-3'-phosphate
  modified_base 12: mod_base = OTHER; note = 2'-O-methyluridine-3'-phosphate
  modified_base 13: mod_base = OTHER; note = 2'-O-methyluridine-3'-phosphate
  modified_base 14: mod_base = OTHER; note = 2'-O-methyladenosine-3'-phosphate
  modified_base 15: mod_base = OTHER; note = 2'-O-methylguanosine-3'-phosphate
  modified_base 16: mod_base = OTHER; note = 2'-O-methyluridine-3'-phosphate
  modified_base 17: mod_base = OTHER; note = 2'-O-methylguanosine-3'-phosphate
  modified_base 18: mod_base = OTHER; note = 2'-O-methyluridine-3'-phosphate
  modified_base 19: mod_base = OTHER; note = 2'-O-methylcytidine-3'-phosphate
  modified_base 20: mod_base = OTHER; note = 2'-O-methyluridine-3'-phosphate
  modified_base 21: mod_base = OTHER; note = 2'-O-methylguanosine-3'-phosphate ((2S,4R)-1-[29-[[2-(acetylamino)-2-deoxy-beta-D-galactopyra nosyl]oxy]-14,14-bis[[3-[[3-[[5-[[2-(acetylamino)-2-deoxy-b eta-D-galactopyranosyl]oxy]-1-oxopentyl]amino]propyl]amino] -3-oxopropoxy]methyl]-1,12,19,25-tetraoxo-16-oxa-13,20,24-t riazanonacos-1-yl]-4-hydroxy-2-pyrrolidinyl)methyl ester
caatcacatctttagtgtctg

SEQ ID NO: 2081 - RNA, 23 nt, synthetic construct
  source 1..23: mol_type = other RNA
  modified_base 1: mod_base = OTHER; note = 2'-O-methylcytidine-3'-phosphorothioate
  modified_base 2: mod_base = OTHER; note = 2'-deoxy-2'-fluoroadenosine-3'-phosphorothioate
  modified_base 3: mod_base = OTHER; note = 2'-O-methylguanosine-3'-phosphate
  modified_base 4: mod_base = OTHER; note = 2'-O-methyladenosine-3'-phosphate
  modified_base 5: mod_base = OTHER; note = 2'-O-methylcytidine-3'-phosphate
  modified_base 6: mod_base = OTHER; note = 2'-deoxy-2'-fluoroadenosine-3'-phosphate
  modified_base 7: mod_base = OTHER; note = 2'-O-methylcytidine-3'-phosphate
  modified_base 8: mod_base = OTHER; note = 2'-deoxy-2'-fluorouridine-3'-phosphate
  modified_base 9: mod_base = OTHER; note = 2'-deoxy-2'-fluoroadenosine-3'-phosphate
  modified_base 10: mod_base = OTHER; note = 2'-O-methyladenosine-3'-phosphate
  modified_base 11: mod_base = OTHER; note = 2'-O-methyladenosine-3'-phosphate
  modified_base 12: mod_base = OTHER; note = 2'-O-methylguanosine-3'-phosphate
  modified_base 13: mod_base = OTHER; note = 2'-O-methyladenosine-3'-phosphate
  modified_base 14: mod_base = OTHER; note = 2'-deoxy-2'-fluorouridine-3'-phosphate
  modified_base 15: mod_base = OTHER; note = 2'-O-methylguanosine-3'-phosphate
  modified_base 16: mod_base = OTHER; note = 2'-deoxy-2'-fluorouridine-3'-phosphate
  modified_base 17: mod_base = OTHER; note = 2'-O-methylguanosine-3'-phosphate
  modified_base 18: mod_base = OTHER; note = 2'-O-methyladenosine-3'-phosphate
  modified_base 19: mod_base = OTHER; note = 2'-O-methyluridine-3'-phosphate
  modified_base 20: mod_base = OTHER; note = 2'-O-methyluridine-3'-phosphate
  modified_base 21: mod_base = OTHER; note = 2'-O-methylguanosine-3'-phosphorothioate
  modified_base 22: mod_base = OTHER; note = 2'-O-methylguanosine-3'-phosphorothioate
  modified_base 23: mod_base = OTHER; note = 2'-O-methyladenosine
cagacactaaagatgtgattgga

SEQ ID NO: 2082 - RNA, 21 nt, synthetic construct
  source 1..21: mol_type = other RNA
  modified_base 1: mod_base = OTHER; note = 2'-O-methylguanosine-3'-phosphorothioate
  modified_base 2: mod_base = OTHER; note = 2'-O-methylcytidine-3'-phosphorothioate
  modified_base 3: mod_base = OTHER; note = 2'-O-methyladenosine-3'-phosphate
  modified_base 4: mod_base = OTHER; note = 2'-O-methyluridine-3'-phosphate
  modified_base 5: mod_base = OTHER; note = 2'-O-methylguanosine-3'-phosphate
  modified_base 6: mod_base = OTHER; note = 2'-O-methyluridine-3'-phosphate
  modified_base 7: mod_base = OTHER; note = 2'-deoxy-2'-fluoroadenosine-3'-phosphate
  modified_base 8: mod_base = OTHER; note = 2'-O-methyluridine-3'-phosphate
  modified_base 9: mod_base = OTHER; note = 2'-deoxy-2'-fluorouridine-3'-phosphate
  modified_base 10: mod_base = OTHER; note = 2'-deoxy-2'-fluoroadenosine-3'-phosphate
  modified_base 11: mod_base = OTHER; note = 2'-deoxy-2'-fluorocytidine-3'-phosphate
  modified_base 12: mod_base = OTHER; note = 2'-O-methyluridine-3'-phosphate
  modified_base 13: mod_base = OTHER; note = 2'-O-methyluridine-3'-phosphate
  modified_base 14: mod_base = OTHER; note = 2'-O-methylguanosine-3'-phosphate
  modified_base 15: mod_base = OTHER; note = 2'-O-methyladenosine-3'-phosphate
  modified_base 16: mod_base = OTHER; note = 2'-O-methylcytidine-3'-phosphate
  modified_base 17: mod_base = OTHER; note = 2'-O-methyladenosine-3'-phosphate
  modified_base 18: mod_base = OTHER; note = 2'-O-methyladenosine-3'-phosphate
  modified_base 19: mod_base = OTHER; note = 2'-O-methyladenosine-3'-phosphate
  modified_base 20: mod_base = OTHER; note = 2'-O-methylguanosine-3'-phosphate
  modified_base 21: mod_base = OTHER; note = 2'-O-methyladenosine-3'-phosphate ((2S,4R)-1-[29-[[2-(acetylamino)-2-deoxy-beta-D-galactopyra nosyl]oxy]-14,14-bis[[3-[[3-[[5-[[2-(acetylamino)-2-deoxy-b eta-D-galactopyranosyl]oxy]-1-oxopentyl]amino]propyl]amino] -3-oxopropoxy]methyl]-1,12,19,25-tetraoxo-16-oxa-13,20,24-t riazanonacos-1-yl]-4-hydroxy-2-pyrrolidinyl)methyl ester
gcatgtattacttgacaaaga

SEQ ID NO: 2083 - RNA, 23 nt, synthetic construct
  source 1..23: mol_type = other RNA
  modified_base 1: mod_base = OTHER; note = 2'-O-methyluridine-3'-phosphorothioate
  modified_base 2: mod_base = OTHER; note = 2'-deoxy-2'-fluorocytidine-3'-phosphorothioate
  modified_base 3: mod_base = OTHER; note = 2'-O-methyluridine-3'-phosphate
  modified_base 4: mod_base = OTHER; note = 2'-O-methyluridine-3'-phosphate
  modified_base 5: mod_base = OTHER; note = 2'-O-methyluridine-3'-phosphate
  modified_base 6: mod_base = OTHER; note = 2'-deoxy-2'-fluoroguanosine-3'-phosphate
  modified_base 7: mod_base = OTHER; note = 2'-O-methyluridine-3'-phosphate
  modified_base 8: mod_base = OTHER; note = 2'-deoxy-2'-fluorocytidine-3'-phosphate
  modified_base 9: mod_base = OTHER; note = 2'-deoxy-2'-fluoroadenosine-3'-phosphate
  modified_base 10: mod_base = OTHER; note = 2'-O-methyladenosine-3'-phosphate
  modified_base 11: mod_base = OTHER; note = 2'-O-methylguanosine-3'-phosphate
  modified_base 12: mod_base = OTHER; note = 2'-O-methyluridine-3'-phosphate
  modified_base 13: mod_base = OTHER; note = 2'-O-methyladenosine-3'-phosphate
  modified_base 14: mod_base = OTHER; note = 2'-deoxy-2'-fluoroadenosine-3'-phosphate
  modified_base 15: mod_base = OTHER; note = 2'-O-methyluridine-3'-phosphate
  modified_base 16: mod_base = OTHER; note = 2'-deoxy-2'-fluoroadenosine-3'-phosphate
  modified_base 17: mod_base = OTHER; note = 2'-O-methylcytidine-3'-phosphate
  modified_base 18: mod_base = OTHER; note = 2'-O-methyladenosine-3'-phosphate
  modified_base 19: mod_base = OTHER; note = 2'-O-methyluridine-3'-phosphate
  modified_base 20: mod_base = OTHER; note = 2'-O-methylguanosine-3'-phosphate
  modified_base 21: mod_base = OTHER; note = 2'-O-methylcytidine-3'-phosphorothioate
  modified_base 22: mod_base = OTHER; note = 2'-O-methyluridine-3'-phosphorothioate
  modified_base 23: mod_base = OTHER; note = 2'-O-methylguanosine
tctttgtcaagtaatacatgctg

SEQ ID NO: 2084 - RNA, 21 nt, synthetic construct
  source 1..21: mol_type = other RNA
  modified_base 1: mod_base = OTHER; note = 2'-O-methylcytidine-3'-phosphorothioate
  modified_base 2: mod_base = OTHER; note = 2'-O-methyladenosine-3'-phosphorothioate
  modified_base 3: mod_base = OTHER; note = 2'-O-methyluridine-3'-phosphate
  modified_base 4: mod_base = OTHER; note = 2'-O-methylguanosine-3'-phosphate
  modified_base 5: mod_base = OTHER; note = 2'-O-methyluridine-3'-phosphate
  modified_base 6: mod_base = OTHER; note = 2'-O-methyladenosine-3'-phosphate
  modified_base 7: mod_base = OTHER; note = 2'-deoxy-2'-fluorouridine-3'-phosphate
  modified_base 8: mod_base = OTHER; note = 2'-O-methyluridine-3'-phosphate
  modified_base 9: mod_base = OTHER; note = 2'-deoxy-2'-fluoroadenosine-3'-phosphate
  modified_base 10: mod_base = OTHER; note = 2'-deoxy-2'-fluorocytidine-3'-phosphate
  modified_base 11: mod_base = OTHER; note = 2'-deoxy-2'-fluorouridine-3'-phosphate
  modified_base 12: mod_base = OTHER; note = 2'-O-methyluridine-3'-phosphate
  modified_base 13: mod_base = OTHER; note = 2'-O-methylguanosine-3'-phosphate
  modified_base 14: mod_base = OTHER; note = 2'-O-methyladenosine-3'-phosphate
  modified_base 15: mod_base = OTHER; note = 2'-O-methylcytidine-3'-phosphate
  modified_base 16: mod_base = OTHER; note = 2'-O-methyladenosine-3'-phosphate
  modified_base 17: mod_base = OTHER; note = 2'-O-methyladenosine-3'-phosphate
  modified_base 18: mod_base = OTHER; note = 2'-O-methyladenosine-3'-phosphate
  modified_base 19: mod_base = OTHER; note = 2'-O-methylguanosine-3'-phosphate
  modified_base 20: mod_base = OTHER; note = 2'-O-methyladenosine-3'-phosphate
  modified_base 21: mod_base = OTHER; note = 2'-O-methylguanosine-3'-phosphate ((2S,4R)-1-[29-[[2-(acetylamino)-2-deoxy-beta-D-galactopyra nosyl]oxy]-14,14-bis[[3-[[3-[[5-[[2-(acetylamino)-2-deoxy-b eta-D-galactopyranosyl]oxy]-1-oxopentyl]amino]propyl]amino] -3-oxopropoxy]methyl]-1,12,19,25-tetraoxo-16-oxa-13,20,24-t riazanonacos-1-yl]-4-hydroxy-2-pyrrolidinyl)methyl ester
catgtattacttgacaaagag

SEQ ID NO: 2085 - RNA, 23 nt, synthetic construct
  source 1..23: mol_type = other RNA
  modified_base 1: mod_base = OTHER; note = 2'-O-methylcytidine-3'-phosphorothioate
  modified_base 2: mod_base = OTHER; note = 2'-deoxy-2'-fluorouridine-3'-phosphorothioate
  modified_base 3: mod_base = OTHER; note = 2'-O-methylcytidine-3'-phosphate
  modified_base 4: mod_base = OTHER; note = 2'-O-methyluridine-3'-phosphate
  modified_base 5: mod_base = OTHER; note = 2'-O-methyluridine-3'-phosphate
  modified_base 6: mod_base = OTHER; note = 2'-deoxy-2'-fluorouridine-3'-phosphate
  modified_base 7: mod_base = OTHER; note = 2'-O-methylguanosine-3'-phosphate
  modified_base 8: mod_base = OTHER; note = 2'-deoxy-2'-fluorouridine-3'-phosphate
  modified_base 9: mod_base = OTHER; note = 2'-deoxy-2'-fluorocytidine-3'-phosphate
  modified_base 10: mod_base = OTHER; note = 2'-O-methyladenosine-3'-phosphate
  modified_base 11: mod_base = OTHER; note = 2'-O-methyladenosine-3'-phosphate
  modified_base 12: mod_base = OTHER; note = 2'-O-methylguanosine-3'-phosphate
  modified_base 13: mod_base = OTHER; note = 2'-O-methyluridine-3'-phosphate
  modified_base 14: mod_base = OTHER; note = 2'-deoxy-2'-fluoroadenosine-3'-phosphate
  modified_base 15: mod_base = OTHER; note = 2'-O-methyladenosine-3'-phosphate
  modified_base 16: mod_base = OTHER; note = 2'-deoxy-2'-fluorouridine-3'-phosphate
  modified_base 17: mod_base = OTHER; note = 2'-O-methyladenosine-3'-phosphate
  modified_base 18: mod_base = OTHER; note = 2'-O-methylcytidine-3'-phosphate
  modified_base 19: mod_base = OTHER; note = 2'-O-methyladenosine-3'-phosphate
  modified_base 20: mod_base = OTHER; note = 2'-O-methyluridine-3'-phosphate
  modified_base 21: mod_base = OTHER; note = 2'-O-methylguanosine-3'-phosphorothioate
  modified_base 22: mod_base = OTHER; note = 2'-O-methylcytidine-3'-phosphorothioate
  modified_base 23: mod_base = OTHER; note = 2'-O-methyluridine
ctctttgtcaagtaatacatgct

SEQ ID NO: 2086 - RNA, 21 nt, synthetic construct
  source 1..21: mol_type = other RNA
  modified_base 1: mod_base = OTHER; note = 2'-O-methyluridine-3'-phosphorothioate
  modified_base 2: mod_base = OTHER; note = 2'-O-methyluridine-3'-phosphorothioate
  modified_base 3: mod_base = OTHER; note = 2'-O-methylcytidine-3'-phosphate
  modified_base 4: mod_base = OTHER; note = 2'-O-methyladenosine-3'-phosphate
  modified_base 5: mod_base = OTHER; note = 2'-O-methylguanosine-3'-phosphate
  modified_base 6: mod_base = OTHER; note = 2'-O-methylcytidine-3'-phosphate
  modified_base 7: mod_base = OTHER; note = 2'-deoxy-2'-fluoroadenosine-3'-phosphate
  modified_base 8: mod_base = OTHER; note = 2'-O-methyluridine-3'-phosphate
  modified_base 9: mod_base = OTHER; note = 2'-deoxy-2'-fluoroguanosine-3'-phosphate
  modified_base 10: mod_base = OTHER; note = 2'-deoxy-2'-fluorouridine-3'-phosphate
  modified_base 11: mod_base = OTHER; note = 2'-deoxy-2'-fluoroadenosine-3'-phosphate
  modified_base 12: mod_base = OTHER; note = 2'-O-methyluridine-3'-phosphate
  modified_base 13: mod_base = OTHER; note = 2'-O-methyluridine-3'-phosphate
  modified_base 14: mod_base = OTHER; note = 2'-O-methyladenosine-3'-phosphate
  modified_base 15: mod_base = OTHER; note = 2'-O-methylcytidine-3'-phosphate
  modified_base 16: mod_base = OTHER; note = 2'-O-methyluridine-3'-phosphate
  modified_base 17: mod_base = OTHER; note = 2'-O-methyluridine-3'-phosphate
  modified_base 18: mod_base = OTHER; note = 2'-O-methylguanosine-3'-phosphate
  modified_base 19: mod_base = OTHER; note = 2'-O-methyladenosine-3'-phosphate
  modified_base 20: mod_base = OTHER; note = 2'-O-methylcytidine-3'-phosphate
  modified_base 21: mod_base = OTHER; note = 2'-O-methyladenosine-3'-phosphate ((2S,4R)-1-[29-[[2-(acetylamino)-2-deoxy-beta-D-galactopyra nosyl]oxy]-14,14-bis[[3-[[3-[[5-[[2-(acetylamino)-2-deoxy-b eta-D-galactopyranosyl]oxy]-1-oxopentyl]amino]propyl]amino] -3-oxopropoxy]methyl]-1,12,19,25-tetraoxo-16-oxa-13,20,24-t riazanonacos-1-yl]-4-hydroxy-2-pyrrolidinyl)methyl ester
ttcagcatgtattacttgaca

SEQ ID NO: 2087 - RNA, 23 nt, synthetic construct
  source 1..23: mol_type = other RNA
  modified_base 1: mod_base = OTHER; note = 2'-O-methyluridine-3'-phosphorothioate
  modified_base 2: mod_base = OTHER; note = 2'-deoxy-2'-fluoroguanosine-3'-phosphorothioate
  modified_base 3: mod_base = OTHER; note = 2'-O-methyluridine-3'-phosphate
  modified_base 4: mod_base = OTHER; note = 2'-O-methylcytidine-3'-phosphate
  modified_base 5: mod_base = OTHER; note = 2'-O-methyladenosine-3'-phosphate
  modified_base 6: mod_base = OTHER; note = 2'-deoxy-2'-fluoroadenosine-3'-phosphate
  modified_base 7: mod_base = OTHER; note = 2'-O-methylguanosine-3'-phosphate
  modified_base 8: mod_base = OTHER; note = 2'-deoxy-2'-fluorouridine-3'-phosphate
  modified_base 9: mod_base = OTHER; note = 2'-deoxy-2'-fluoroadenosine-3'-phosphate
  modified_base 10: mod_base = OTHER; note = 2'-O-methyladenosine-3'-phosphate
  modified_base 11: mod_base = OTHER; note = 2'-O-methyluridine-3'-phosphate
  modified_base 12: mod_base = OTHER; note = 2'-O-methyladenosine-3'-phosphate
  modified_base 13: mod_base = OTHER; note = 2'-O-methylcytidine-3'-phosphate
  modified_base 14: mod_base = OTHER; note = 2'-deoxy-2'-fluoroadenosine-3'-phosphate
  modified_base 15: mod_base = OTHER; note = 2'-O-methyluridine-3'-phosphate
  modified_base 16: mod_base = OTHER; note = 2'-deoxy-2'-fluoroguanosine-3'-phosphate
  modified_base 17: mod_base = OTHER; note = 2'-O-methylcytidine-3'-phosphate
  modified_base 18: mod_base = OTHER; note = 2'-O-methyluridine-3'-phosphate
  modified_base 19: mod_base = OTHER; note = 2'-O-methylguanosine-3'-phosphate
  modified_base 20: mod_base = OTHER; note = 2'-O-methyladenosine-3'-phosphate
  modified_base 21: mod_base = OTHER; note = 2'-O-methyladenosine-3'-phosphorothioate
  modified_base 22: mod_base = OTHER; note = 2'-O-methyladenosine-3'-phosphorothioate
  modified_base 23: mod_base = OTHER; note = 2'-O-methyladenosine
tgtcaagtaatacatgctgaaaa

SEQ ID NO: 2088 - RNA, 21 nt, synthetic construct
  source 1..21: mol_type = other RNA
  modified_base 1: mod_base = OTHER; note = 2'-O-methyluridine-3'-phosphorothioate
  modified_base 2: mod_base = OTHER; note = 2'-O-methyluridine-3'-phosphorothioate
  modified_base 3: mod_base = OTHER; note = 2'-O-methyluridine-3'-phosphate
  modified_base 4: mod_base = OTHER; note = 2'-O-methylcytidine-3'-phosphate
  modified_base 5: mod_base = OTHER; note = 2'-O-methyladenosine-3'-phosphate
  modified_base 6: mod_base = OTHER; note = 2'-O-methylguanosine-3'-phosphate
  modified_base 7: mod_base = OTHER; note = 2'-deoxy-2'-fluorocytidine-3'-phosphate
  modified_base 8: mod_base = OTHER; note = 2'-O-methyladenosine-3'-phosphate
  modified_base 9: mod_base = OTHER; note = 2'-deoxy-2'-fluorouridine-3'-phosphate
  modified_base 10: mod_base = OTHER; note = 2'-deoxy-2'-fluoroguanosine-3'-phosphate
  modified_base 11: mod_base = OTHER; note = 2'-deoxy-2'-fluorouridine-3'-phosphate
  modified_base 12: mod_base = OTHER; note = 2'-O-methyladenosine-3'-phosphate
  modified_base 13: mod_base = OTHER; note = 2'-O-methyluridine-3'-phosphate
  modified_base 14: mod_base = OTHER; note = 2'-O-methyluridine-3'-phosphate
  modified_base 15: mod_base = OTHER; note = 2'-O-methyladenosine-3'-phosphate
  modified_base 16: mod_base = OTHER; note = 2'-O-methylcytidine-3'-phosphate
  modified_base 17: mod_base = OTHER; note = 2'-O-methyluridine-3'-phosphate
  modified_base 18: mod_base = OTHER; note = 2'-O-methyluridine-3'-phosphate
  modified_base 19: mod_base = OTHER; note = 2'-O-methylguanosine-3'-phosphate
  modified_base 20: mod_base = OTHER; note = 2'-O-methyladenosine-3'-phosphate
  modified_base 21: mod_base = OTHER; note = 2'-O-methylcytidine-3'-phosphate ((2S,4R)-1-[29-[[2-(acetylamino)-2-deoxy-beta-D-galactopyra nosyl]oxy]-14,14-bis[[3-[[3-[[5-[[2-(acetylamino)-2-deoxy-b eta-D-galactopyranosyl]oxy]-1-oxopentyl]amino]propyl]amino] -3-oxopropoxy]methyl]-1,12,19,25-tetraoxo-16-oxa-13,20,24-t riazanonacos-1-yl]-4-hydroxy-2-pyrrolidinyl)methyl ester
tttcagcatgtattacttgac

SEQ ID NO: 2089 - RNA, 23 nt, synthetic construct
  source 1..23: mol_type = other RNA
  modified_base 1: mod_base = OTHER; note = 2'-O-methylguanosine-3'-phosphorothioate
  modified_base 2: mod_base = OTHER; note = 2'-deoxy-2'-fluorouridine-3'-phosphorothioate
  modified_base 3: mod_base = OTHER; note = 2'-O-methylcytidine-3'-phosphate
  modified_base 4: mod_base = OTHER; note = 2'-O-methyladenosine-3'-phosphate
  modified_base 5: mod_base = OTHER; note = 2'-O-methyladenosine-3'-phosphate
  modified_base 6: mod_base = OTHER; note = 2'-deoxy-2'-fluoroguanosine-3'-phosphate
  modified_base 7: mod_base = OTHER; note = 2'-O-methyluridine-3'-phosphate
  modified_base 8: mod_base = OTHER; note = 2'-deoxy-2'-fluoroadenosine-3'-phosphate
  modified_base 9: mod_base = OTHER; note = 2'-deoxy-2'-fluoroadenosine-3'-phosphate
  modified_base 10: mod_base = OTHER; note = 2'-O-methyluridine-3'-phosphate
  modified_base 11: mod_base = OTHER; note = 2'-O-methyladenosine-3'-phosphate
  modified_base 12: mod_base = OTHER; note = 2'-O-methylcytidine-3'-phosphate
  modified_base 13: mod_base = OTHER; note = 2'-O-methyladenosine-3'-phosphate
  modified_base 14: mod_base = OTHER; note = 2'-deoxy-2'-fluorouridine-3'-phosphate
  modified_base 15: mod_base = OTHER; note = 2'-O-methylguanosine-3'-phosphate
  modified_base 16: mod_base = OTHER; note = 2'-deoxy-2'-fluorocytidine-3'-phosphate
  modified_base 17: mod_base = OTHER; note = 2'-O-methyluridine-3'-phosphate
  modified_base 18: mod_base = OTHER; note = 2'-O-methylguanosine-3'-phosphate
  modified_base 19: mod_base = OTHER; note = 2'-O-methyladenosine-3'-phosphate
  modified_base 20: mod_base = OTHER; note = 2'-O-methyladenosine-3'-phosphate
  modified_base 21: mod_base = OTHER; note = 2'-O-methyladenosine-3'-phosphorothioate
  modified_base 22: mod_base = OTHER; note = 2'-O-methyladenosine-3'-phosphorothioate
  modified_base 23: mod_base = OTHER; note = 2'-O-methyladenosine
gtcaagtaatacatgctgaaaaa

SEQ ID NO: 2090 - RNA, 21 nt, synthetic construct
  source 1..21: mol_type = other RNA
  modified_base 1: mod_base = OTHER; note = 2'-O-methyladenosine-3'-phosphorothioate
  modified_base 2: mod_base = OTHER; note = 2'-O-methyluridine-3'-phosphorothioate
  modified_base 3: mod_base = OTHER; note = 2'-O-methylguanosine-3'-phosphate
  modified_base 4: mod_base = OTHER; note = 2'-O-methyluridine-3'-phosphate
  modified_base 5: mod_base = OTHER; note = 2'-O-methyluridine-3'-phosphate
  modified_base 6: mod_base = OTHER; note = 2'-O-methyladenosine-3'-phosphate
  modified_base 7: mod_base = OTHER; note = 2'-deoxy-2'-fluorocytidine-3'-phosphate
  modified_base 8: mod_base = OTHER; note = 2'-O-methyluridine-3'-phosphate
  modified_base 9: mod_base = OTHER; note = 2'-deoxy-2'-fluorouridine-3'-phosphate
  modified_base 10: mod_base = OTHER; note = 2'-deoxy-2'-fluorocytidine-3'-phosphate
  modified_base 11: mod_base = OTHER; note = 2'-deoxy-2'-fluorouridine-3'-phosphate
  modified_base 12: mod_base = OTHER; note = 2'-O-methyluridine-3'-phosphate
  modified_base 13: mod_base = OTHER; note = 2'-O-methyladenosine-3'-phosphate
  modified_base 14: mod_base = OTHER; note = 2'-O-methylguanosine-3'-phosphate
  modified_base 15: mod_base = OTHER; note = 2'-O-methyladenosine-3'-phosphate
  modified_base 16: mod_base = OTHER; note = 2'-O-methylguanosine-3'-phosphate
  modified_base 17: mod_base = OTHER; note = 2'-O-methyladenosine-3'-phosphate
  modified_base 18: mod_base = OTHER; note = 2'-O-methylguanosine-3'-phosphate
  modified_base 19: mod_base = OTHER; note = 2'-O-methyladenosine-3'-phosphate
  modified_base 20: mod_base = OTHER; note = 2'-O-methyladenosine-3'-phosphate
  modified_base 21: mod_base = OTHER; note = 2'-O-methyladenosine-3'-phosphate ((2S,4R)-1-[29-[[2-(acetylamino)-2-deoxy-beta-D-galactopyra nosyl]oxy]-14,14-bis[[3-[[3-[[5-[[2-(acetylamino)-2-deoxy-b eta-D-galactopyranosyl]oxy]-1-oxopentyl]amino]propyl]amino] -3-oxopropoxy]methyl]-1,12,19,25-tetraoxo-16-oxa-13,20,24-t riazanonacos-1-yl]-4-hydroxy-2-pyrrolidinyl)methyl ester
atgttacttcttagagagaaa

SEQ ID NO: 2091 - RNA, 23 nt, synthetic construct
  source 1..23: mol_type = other RNA
  modified_base 1: mod_base = OTHER; note = 2'-O-methyluridine-3'-phosphorothioate
  modified_base 2: mod_base = OTHER; note = 2'-deoxy-2'-fluorouridine-3'-phosphorothioate
  modified_base 3: mod_base = OTHER; note = 2'-O-methyluridine-3'-phosphate
  modified_base 4: mod_base = OTHER; note = 2'-O-methylcytidine-3'-phosphate
  modified_base 5: mod_base = OTHER; note = 2'-O-methyluridine-3'-phosphate
  modified_base 6: mod_base = OTHER; note = 2'-deoxy-2'-fluorocytidine-3'-phosphate
  modified_base 7: mod_base = OTHER; note = 2'-O-methyluridine-3'-phosphate
  modified_base 8: mod_base = OTHER; note = 2'-deoxy-2'-fluorocytidine-3'-phosphate
  modified_base 9: mod_base = OTHER; note = 2'-deoxy-2'-fluorouridine-3'-phosphate
  modified_base 10: mod_base = OTHER; note = 2'-O-methyladenosine-3'-phosphate
  modified_base 11: mod_base = OTHER; note = 2'-O-methyladenosine-3'-phosphate
  modified_base 12: mod_base = OTHER; note = 2'-O-methylguanosine-3'-phosphate
  modified_base 13: mod_base = OTHER; note = 2'-O-methyladenosine-3'-phosphate
  modified_base 14: mod_base = OTHER; note = 2'-deoxy-2'-fluoroadenosine-3'-phosphate
  modified_base 15: mod_base = OTHER; note = 2'-O-methylguanosine-3'-phosphate
  modified_base 16: mod_base = OTHER; note = 2'-deoxy-2'-fluorouridine-3'-phosphate
  modified_base 17: mod_base = OTHER; note = 2'-O-methyladenosine-3'-phosphate
  modified_base 18: mod_base = OTHER; note = 2'-O-methyladenosine-3'-phosphate
  modified_base 19: mod_base = OTHER; note = 2'-O-methylcytidine-3'-phosphate
  modified_base 20: mod_base = OTHER; note = 2'-O-methyladenosine-3'-phosphate
  modified_base 21: mod_base = OTHER; note = 2'-O-methyluridine-3'-phosphorothioate
  modified_base 22: mod_base = OTHER; note = 2'-O-methyladenosine-3'-phosphorothioate
  modified_base 23: mod_base = OTHER; note = 2'-O-methylcytidine
tttctctctaagaagtaacatac

SEQ ID NO: 2092 - RNA, 21 nt, synthetic construct
  source 1..21: mol_type = other RNA
  modified_base 1: mod_base = OTHER; note = 2'-O-methyluridine-3'-phosphorothioate
  modified_base 2: mod_base = OTHER; note = 2'-O-methylguanosine-3'-phosphorothioate
  modified_base 3: mod_base = OTHER; note = 2'-O-methyluridine-3'-phosphate
  modified_base 4: mod_base = OTHER; note = 2'-O-methyluridine-3'-phosphate
  modified_base 5: mod_base = OTHER; note = 2'-O-methyladenosine-3'-phosphate
  modified_base 6: mod_base = OTHER; note = 2'-O-methylcytidine-3'-phosphate
  modified_base 7: mod_base = OTHER; note = 2'-deoxy-2'-fluorouridine-3'-phosphate
  modified_base 8: mod_base = OTHER; note = 2'-O-methyluridine-3'-phosphate
  modified_base 9: mod_base = OTHER; note = 2'-deoxy-2'-fluorocytidine-3'-phosphate
  modified_base 10: mod_base = OTHER; note = 2'-deoxy-2'-fluorouridine-3'-phosphate
  modified_base 11: mod_base = OTHER; note = 2'-deoxy-2'-fluorouridine-3'-phosphate
  modified_base 12: mod_base = OTHER; note = 2'-O-methyladenosine-3'-phosphate
  modified_base 13: mod_base = OTHER; note = 2'-O-methylguanosine-3'-phosphate
  modified_base 14: mod_base = OTHER; note = 2'-O-methyladenosine-3'-phosphate
  modified_base 15: mod_base = OTHER; note = 2'-O-methylguanosine-3'-phosphate
  modified_base 16: mod_base = OTHER; note = 2'-O-methyladenosine-3'-phosphate
  modified_base 17: mod_base = OTHER; note = 2'-O-methylguanosine-3'-phosphate
  modified_base 18: mod_base = OTHER; note = 2'-O-methyladenosine-3'-phosphate
  modified_base 19: mod_base = OTHER; note = 2'-O-methyladenosine-3'-phosphate
  modified_base 20: mod_base = OTHER; note = 2'-O-methyladenosine-3'-phosphate
  modified_base 21: mod_base = OTHER; note = 2'-O-methyluridine-3'-phosphate ((2S,4R)-1-[29-[[2-(acetylamino)-2-deoxy-beta-D-galactopyra nosyl]oxy]-14,14-bis[[3-[[3-[[5-[[2-(acetylamino)-2-deoxy-b eta-D-galactopyranosyl]oxy]-1-oxopentyl]amino]propyl]amino] -3-oxopropoxy]methyl]-1,12,19,25-tetraoxo-16-oxa-13,20,24-t riazanonacos-1-yl]-4-hydroxy-2-pyrrolidinyl)methyl ester
tgttacttcttagagagaaat

SEQ ID NO: 2093 - RNA, 23 nt, synthetic construct
  source 1..23: mol_type = other RNA
  modified_base 1: mod_base = OTHER; note = 2'-O-methyladenosine-3'-phosphorothioate
  modified_base 2: mod_base = OTHER; note = 2'-deoxy-2'-fluorouridine-3'-phosphorothioate
  modified_base 3: mod_base = OTHER; note = 2'-O-methyluridine-3'-phosphate
  modified_base 4: mod_base = OTHER; note = 2'-O-methyluridine-3'-phosphate
  modified_base 5: mod_base = OTHER; note = 2'-O-methylcytidine-3'-phosphate
  modified_base 6: mod_base = OTHER; note = 2'-deoxy-2'-fluorouridine-3'-phosphate
  modified_base 7: mod_base = OTHER; note = 2'-O-methylcytidine-3'-phosphate
  modified_base 8: mod_base = OTHER; note = 2'-deoxy-2'-fluorouridine-3'-phosphate
  modified_base 9: mod_base = OTHER; note = 2'-deoxy-2'-fluorocytidine-3'-phosphate
  modified_base 10: mod_base = OTHER; note = 2'-O-methyluridine-3'-phosphate
  modified_base 11: mod_base = OTHER; note = 2'-O-methyladenosine-3'-phosphate
  modified_base 12: mod_base = OTHER; note = 2'-O-methyladenosine-3'-phosphate
  modified_base 13: mod_base = OTHER; note = 2'-O-methylguanosine-3'-phosphate
  modified_base 14: mod_base = OTHER; note = 2'-deoxy-2'-fluoroadenosine-3'-phosphate
  modified_base 15: mod_base = OTHER; note = 2'-O-methyladenosine-3'-phosphate
  modified_base 16: mod_base = OTHER; note = 2'-deoxy-2'-fluoroguanosine-3'-phosphate
  modified_base 17: mod_base = OTHER; note = 2'-O-methyluridine-3'-phosphate
  modified_base 18: mod_base = OTHER; note = 2'-O-methyladenosine-3'-phosphate
  modified_base 19: mod_base = OTHER; note = 2'-O-methyladenosine-3'-phosphate
  modified_base 20: mod_base = OTHER; note = 2'-O-methylcytidine-3'-phosphate
  modified_base 21: mod_base = OTHER; note = 2'-O-methyladenosine-3'-phosphorothioate
  modified_base 22: mod_base = OTHER; note = 2'-O-methyluridine-3'-phosphorothioate
  modified_base 23: mod_base = OTHER; note = 2'-O-methyladenosine
atttctctctaagaagtaacata

SEQ ID NO: 2094 - RNA, 21 nt, synthetic construct
  source 1..21: mol_type = other RNA
  modified_base 1: mod_base = OTHER; note = 2'-O-methyladenosine-3'-phosphorothioate
  modified_base 2: mod_base = OTHER; note = 2'-O-methyluridine-3'-phosphorothioate
  modified_base 3: mod_base = OTHER; note = 2'-O-methylguanosine-3'-phosphate
  modified_base 4: mod_base = OTHER; note = 2'-O-methyluridine-3'-phosphate
  modified_base 5: mod_base = OTHER; note = 2'-O-methyladenosine-3'-phosphate
  modified_base 6: mod_base = OTHER; note = 2'-O-methyluridine-3'-phosphate
  modified_base 7: mod_base = OTHER; note = 2'-deoxy-2'-fluoroguanosine-3'-phosphate
  modified_base 8: mod_base = OTHER; note = 2'-O-methyluridine-3'-phosphate
  modified_base 9: mod_base = OTHER; note = 2'-deoxy-2'-fluorouridine-3'-phosphate
  modified_base 10: mod_base = OTHER; note = 2'-deoxy-2'-fluoroadenosine-3'-phosphate
  modified_base 11: mod_base = OTHER; note = 2'-deoxy-2'-fluorocytidine-3'-phosphate
  modified_base 12: mod_base = OTHER; note = 2'-O-methyluridine-3'-phosphate
  modified_base 13: mod_base = OTHER; note = 2'-O-methyluridine-3'-phosphate
  modified_base 14: mod_base = OTHER; note = 2'-O-methylcytidine-3'-phosphate
  modified_base 15: mod_base = OTHER; note = 2'-O-methyluridine-3'-phosphate
  modified_base 16: mod_base = OTHER; note = 2'-O-methyluridine-3'-phosphate
  modified_base 17: mod_base = OTHER; note = 2'-O-methyladenosine-3'-phosphate
  modified_base 18: mod_base = OTHER; note = 2'-O-methylguanosine-3'-phosphate
  modified_base 19: mod_base = OTHER; note = 2'-O-methyladenosine-3'-phosphate
  modified_base 20: mod_base = OTHER; note = 2'-O-methylguanosine-3'-phosphate
  modified_base 21: mod_base = OTHER; note = 2'-O-methyladenosine-3'-phosphate ((2S,4R)-1-[29-[[2-(acetylamino)-2-deoxy-beta-D-galactopyra nosyl]oxy]-14,14-bis[[3-[[3-[[5-[[2-(acetylamino)-2-deoxy-b eta-D-galactopyranosyl]oxy]-1-oxopentyl]amino]propyl]amino] -3-oxopropoxy]methyl]-1,12,19,25-tetraoxo-16-oxa-13,20,24-t riazanonacos-1-yl]-4-hydroxy-2-pyrrolidinyl)methyl ester
atgtatgttacttcttagaga

SEQ ID NO: 2095 - RNA, 23 nt, synthetic construct
  source 1..23: mol_type = other RNA
  modified_base 1: mod_base = OTHER; note = 2'-O-methyluridine-3'-phosphorothioate
  modified_base 2: mod_base = OTHER; note = 2'-deoxy-2'-fluorocytidine-3'-phosphorothioate
  modified_base 3: mod_base = OTHER; note = 2'-O-methyluridine-3'-phosphate
  modified_base 4: mod_base = OTHER; note = 2'-O-methylcytidine-3'-phosphate
  modified_base 5: mod_base = OTHER; note = 2'-O-methyluridine-3'-phosphate
  modified_base 6: mod_base = OTHER; note = 2'-deoxy-2'-fluoroadenosine-3'-phosphate
  modified_base 7: mod_base = OTHER; note = 2'-O-methyladenosine-3'-phosphate
  modified_base 8: mod_base = OTHER; note = 2'-deoxy-2'-fluoroguanosine-3'-phosphate
  modified_base 9: mod_base = OTHER; note = 2'-deoxy-2'-fluoroadenosine-3'-phosphate
  modified_base 10: mod_base = OTHER; note = 2'-O-methyladenosine-3'-phosphate
  modified_base 11: mod_base = OTHER; note = 2'-O-methylguanosine-3'-phosphate
  modified_base 12: mod_base = OTHER; note = 2'-O-methyluridine-3'-phosphate
  modified_base 13: mod_base = OTHER; note = 2'-O-methyladenosine-3'-phosphate
  modified_base 14: mod_base = OTHER; note = 2'-deoxy-2'-fluoroadenosine-3'-phosphate
  modified_base 15: mod_base = OTHER; note = 2'-O-methylcytidine-3'-phosphate
  modified_base 16: mod_base = OTHER; note = 2'-deoxy-2'-fluoroadenosine-3'-phosphate
  modified_base 17: mod_base = OTHER; note = 2'-O-methyluridine-3'-phosphate
  modified_base 18: mod_base = OTHER; note = 2'-O-methyladenosine-3'-phosphate
  modified_base 19: mod_base = OTHER; note = 2'-O-methylcytidine-3'-phosphate
  modified_base 20: mod_base = OTHER; note = 2'-O-methyladenosine-3'-phosphate
  modified_base 21: mod_base = OTHER; note = 2'-O-methyluridine-3'-phosphorothioate
  modified_base 22: mod_base = OTHER; note = 2'-O-methylcytidine-3'-phosphorothioate
  modified_base 23: mod_base = OTHER; note = 2'-O-methylcytidine
tctctaagaagtaacatacatcc

SEQ ID NO: 2096 - RNA, 21 nt, synthetic construct
  source 1..21: mol_type = other RNA
  modified_base 1: mod_base = OTHER; note = 2'-O-methylguanosine-3'-phosphorothioate
  modified_base 2: mod_base = OTHER; note = 2'-O-methyladenosine-3'-phosphorothioate
  modified_base 3: mod_base = OTHER; note = 2'-O-methyluridine-3'-phosphate
  modified_base 4: mod_base = OTHER; note = 2'-O-methylguanosine-3'-phosphate
  modified_base 5: mod_base = OTHER; note = 2'-O-methyluridine-3'-phosphate
  modified_base 6: mod_base = OTHER; note = 2'-O-methyladenosine-3'-phosphate
  modified_base 7: mod_base = OTHER; note = 2'-deoxy-2'-fluorouridine-3'-phosphate
  modified_base 8: mod_base = OTHER; note = 2'-O-methylguanosine-3'-phosphate
  modified_base 9: mod_base = OTHER; note = 2'-deoxy-2'-fluorouridine-3'-phosphate
  modified_base 10: mod_base = OTHER; note = 2'-deoxy-2'-fluorouridine-3'-phosphate
  modified_base 11: mod_base = OTHER; note = 2'-deoxy-2'-fluoroadenosine-3'-phosphate
  modified_base 12: mod_base = OTHER; note = 2'-O-methylcytidine-3'-phosphate
  modified_base 13: mod_base = OTHER; note = 2'-O-methyluridine-3'-phosphate
  modified_base 14: mod_base = OTHER; note = 2'-O-methyluridine-3'-phosphate
  modified_base 15: mod_base = OTHER; note = 2'-O-methylcytidine-3'-phosphate
  modified_base 16: mod_base = OTHER; note = 2'-O-methyluridine-3'-phosphate
  modified_base 17: mod_base = OTHER; note = 2'-O-methyluridine-3'-phosphate
  modified_base 18: mod_base = OTHER; note = 2'-O-methyladenosine-3'-phosphate
  modified_base 19: mod_base = OTHER; note = 2'-O-methylguanosine-3'-phosphate
  modified_base 20: mod_base = OTHER; note = 2'-O-methyladenosine-3'-phosphate
  modified_base 21: mod_base = OTHER; note = 2'-O-methylguanosine-3'-phosphate ((2S,4R)-1-[29-[[2-(acetylamino)-2-deoxy-beta-D-galactopyra nosyl]oxy]-14,14-bis[[3-[[3-[[5-[[2-(acetylamino)-2-deoxy-b eta-D-galactopyranosyl]oxy]-1-oxopentyl]amino]propyl]amino] -3-oxopropoxy]methyl]-1,12,19,25-tetraoxo-16-oxa-13,20,24-t riazanonacos-1-yl]-4-hydroxy-2-pyrrolidinyl)methyl ester
gatgtatgttacttcttagag

SEQ ID NO: 2097 - RNA, 23 nt, synthetic construct
  source 1..23: mol_type = other RNA
  modified_base 1: mod_base = OTHER; note = 2'-O-methylcytidine-3'-phosphorothioate
  modified_base 2: mod_base = OTHER; note = 2'-deoxy-2'-fluorouridine-3'-phosphorothioate
  modified_base 3: mod_base = OTHER; note = 2'-O-methylcytidine-3'-phosphate
  modified_base 4: mod_base = OTHER; note = 2'-O-methyluridine-3'-phosphate
  modified_base 5: mod_base = OTHER; note = 2'-O-methyladenosine-3'-phosphate
  modified_base 6: mod_base = OTHER; note = 2'-deoxy-2'-fluoroadenosine-3'-phosphate
  modified_base 7: mod_base = OTHER; note = 2'-O-methylguanosine-3'-phosphate
  modified_base 8: mod_base = OTHER; note = 2'-deoxy-2'-fluoroadenosine-3'-phosphate
  modified_base 9: mod_base = OTHER; note = 2'-deoxy-2'-fluoroadenosine-3'-phosphate
  modified_base 10: mod_base = OTHER; note = 2'-O-methylguanosine-3'-phosphate
  modified_base 11: mod_base = OTHER; note = 2'-O-methyluridine-3'-phosphate
  modified_base 12: mod_base = OTHER; note = 2'-O-methyladenosine-3'-phosphate
  modified_base 13: mod_base = OTHER; note = 2'-O-methyladenosine-3'-phosphate
  modified_base 14: mod_base = OTHER; note = 2'-deoxy-2'-fluorocytidine-3'-phosphate
  modified_base 15: mod_base = OTHER; note = 2'-O-methyladenosine-3'-phosphate
  modified_base 16: mod_base = OTHER; note = 2'-deoxy-2'-fluorouridine-3'-phosphate
  modified_base 17: mod_base = OTHER; note = 2'-O-methyladenosine-3'-phosphate
  modified_base 18: mod_base = OTHER; note = 2'-O-methylcytidine-3'-phosphate
  modified_base 19: mod_base = OTHER; note = 2'-O-methyladenosine-3'-phosphate
  modified_base 20: mod_base = OTHER; note = 2'-O-methyluridine-3'-phosphate
  modified_base 21: mod_base = OTHER; note = 2'-O-methylcytidine-3'-phosphorothioate
  modified_base 22: mod_base = OTHER; note = 2'-O-methylcytidine-3'-phosphorothioate
  modified_base 23: mod_base = OTHER; note = 2'-O-methyluridine
ctctaagaagtaacatacatcct

SEQ ID NO: 2098 - RNA, 21 nt, synthetic construct
  source 1..21: mol_type = other RNA
  modified_base 1: mod_base = OTHER; note = 2'-O-methyladenosine-3'-phosphorothioate
  modified_base 2: mod_base = OTHER; note = 2'-O-methylcytidine-3'-phosphorothioate
  modified_base 3: mod_base = OTHER; note = 2'-O-methyladenosine-3'-phosphate
  modified_base 4: mod_base = OTHER; note = 2'-O-methyladenosine-3'-phosphate
  modified_base 5: mod_base = OTHER; note = 2'-O-methylcytidine-3'-phosphate
  modified_base 6: mod_base = OTHER; note = 2'-O-methyluridine-3'-phosphate
  modified_base 7: mod_base = OTHER; note = 2'-deoxy-2'-fluorouridine-3'-phosphate
  modified_base 8: mod_base = OTHER; note = 2'-O-methyluridine-3'-phosphate
  modified_base 9: mod_base = OTHER; note = 2'-deoxy-2'-fluoroguanosine-3'-phosphate
  modified_base 10: mod_base = OTHER; note = 2'-deoxy-2'-fluoroadenosine-3'-phosphate
  modified_base 11: mod_base = OTHER; note = 2'-deoxy-2'-fluoroguanosine-3'-phosphate
  modified_base 12: mod_base = OTHER; note = 2'-O-methyladenosine-3'-phosphate
  modified_base 13: mod_base = OTHER; note = 2'-O-methyladenosine-3'-phosphate
  modified_base 14: mod_base = OTHER; note = 2'-O-methylguanosine-3'-phosphate
  modified_base 15: mod_base = OTHER; note = 2'-O-methylguanosine-3'-phosphate
  modified_base 16: mod_base = OTHER; note = 2'-O-methyluridine-3'-phosphate
  modified_base 17: mod_base = OTHER; note = 2'-O-methyladenosine-3'-phosphate
  modified_base 18: mod_base = OTHER; note = 2'-O-methylguanosine-3'-phosphate
  modified_base 19: mod_base = OTHER; note = 2'-O-methylcytidine-3'-phosphate
  modified_base 20: mod_base = OTHER; note = 2'-O-methyladenosine-3'-phosphate
  modified_base 21: mod_base = OTHER; note = 2'-O-methylcytidine-3'-phosphate ((2S,4R)-1-[29-[[2-(acetylamino)-2-deoxy-beta-D-galactopyra nosyl]oxy]-14,14-bis[[3-[[3-[[5-[[2-(acetylamino)-2-deoxy-b eta-D-galactopyranosyl]oxy]-1-oxopentyl]amino]propyl]amino] -3-oxopropoxy]methyl]-1,12,19,25-tetraoxo-16-oxa-13,20,24-t riazanonacos-1-yl]-4-hydroxy-2-pyrrolidinyl)methyl ester
acaactttgagaaggtagcac

SEQ ID NO: 2099 - RNA, 23 nt, synthetic construct
  source 1..23: mol_type = other RNA
  modified_base 1: mod_base = OTHER; note = 2'-O-methylguanosine-3'-phosphorothioate
  modified_base 2: mod_base = OTHER; note = 2'-deoxy-2'-fluorouridine-3'-phosphorothioate
  modified_base 3: mod_base = OTHER; note = 2'-O-methylguanosine-3'-phosphate
  modified_base 4: mod_base = OTHER; note = 2'-O-methylcytidine-3'-phosphate
  modified_base 5: mod_base = OTHER; note = 2'-O-methyluridine-3'-phosphate
  modified_base 6: mod_base = OTHER; note = 2'-deoxy-2'-fluoroadenosine-3'-phosphate
  modified_base 7: mod_base = OTHER; note = 2'-O-methylcytidine-3'-phosphate
  modified_base 8: mod_base = OTHER; note = 2'-deoxy-2'-fluorocytidine-3'-phosphate
  modified_base 9: mod_base = OTHER; note = 2'-deoxy-2'-fluorouridine-3'-phosphate
  modified_base 10: mod_base = OTHER; note = 2'-O-methyluridine-3'-phosphate
  modified_base 11: mod_base = OTHER; note = 2'-O-methylcytidine-3'-phosphate
  modified_base 12: mod_base = OTHER; note = 2'-O-methyluridine-3'-phosphate
  modified_base 13: mod_base = OTHER; note = 2'-O-methylcytidine-3'-phosphate
  modified_base 14: mod_base = OTHER; note = 2'-deoxy-2'-fluoroadenosine-3'-phosphate
  modified_base 15: mod_base = OTHER; note = 2'-O-methyladenosine-3'-phosphate
  modified_base 16: mod_base = OTHER; note = 2'-deoxy-2'-fluoroadenosine-3'-phosphate
  modified_base 17: mod_base = OTHER; note = 2'-O-methylguanosine-3'-phosphate
  modified_base 18: mod_base = OTHER; note = 2'-O-methyluridine-3'-phosphate
  modified_base 19: mod_base = OTHER; note = 2'-O-methyluridine-3'-phosphate
  modified_base 20: mod_base = OTHER; note = 2'-O-methylguanosine-3'-phosphate
  modified_base 21: mod_base = OTHER; note = 2'-O-methyluridine-3'-phosphorothioate
  modified_base 22: mod_base = OTHER; note = 2'-O-methylguanosine-3'-phosphorothioate
  modified_base 23: mod_base = OTHER; note = 2'-O-methyladenosine
gtgctaccttctcaaagttgtga

SEQ ID NO: 2100 - RNA, 21 nt, synthetic construct
  source 1..21: mol_type = other RNA
  modified_base 1: mod_base = OTHER; note = 2'-O-methylcytidine-3'-phosphorothioate
  modified_base 2: mod_base = OTHER; note = 2'-O-methyladenosine-3'-phosphorothioate
  modified_base 3: mod_base = OTHER; note = 2'-O-methyladenosine-3'-phosphate
  modified_base 4: mod_base = OTHER; note = 2'-O-methylcytidine-3'-phosphate
  modified_base 5: mod_base = OTHER; note = 2'-O-methyluridine-3'-phosphate
  modified_base 6: mod_base = OTHER; note = 2'-O-methyluridine-3'-phosphate
  modified_base 7: mod_base = OTHER; note = 2'-deoxy-2'-fluorouridine-3'-phosphate
  modified_base 8: mod_base = OTHER; note = 2'-O-methylguanosine-3'-phosphate
  modified_base 9: mod_base = OTHER; note = 2'-deoxy-2'-fluoroadenosine-3'-phosphate
  modified_base 10: mod_base = OTHER; note = 2'-deoxy-2'-fluoroguanosine-3'-phosphate
  modified_base 11: mod_base = OTHER; note = 2'-deoxy-2'-fluoroadenosine-3'-phosphate
  modified_base 12: mod_base = OTHER; note = 2'-O-methyladenosine-3'-phosphate
  modified_base 13: mod_base = OTHER; note = 2'-O-methylguanosine-3'-phosphate
  modified_base 14: mod_base = OTHER; note = 2'-O-methylguanosine-3'-phosphate
  modified_base 15: mod_base = OTHER; note = 2'-O-methyluridine-3'-phosphate
  modified_base 16: mod_base = OTHER; note = 2'-O-methyladenosine-3'-phosphate
  modified_base 17: mod_base = OTHER; note = 2'-O-methylguanosine-3'-phosphate
  modified_base 18: mod_base = OTHER; note = 2'-O-methylcytidine-3'-phosphate
  modified_base 19: mod_base = OTHER; note = 2'-O-methyladenosine-3'-phosphate
  modified_base 20: mod_base = OTHER; note = 2'-O-methylcytidine-3'-phosphate
  modified_base 21: mod_base = OTHER; note = 2'-O-methyluridine-3'-phosphate ((2S,4R)-1-[29-[[2-(acetylamino)-2-deoxy-beta-D-galactopyra nosyl]oxy]-14,14-bis[[3-[[3-[[5-[[2-(acetylamino)-2-deoxy-b eta-D-galactopyranosyl]oxy]-1-oxopentyl]amino]propyl]amino] -3-oxopropoxy]methyl]-1,12,19,25-tetraoxo-16-oxa-13,20,24-t riazanonacos-1-yl]-4-hydroxy-2-pyrrolidinyl)methyl ester
caactttgagaaggtagcact

SEQ ID NO: 2101 - RNA, 23 nt, synthetic construct
  source 1..23: mol_type = other RNA
  modified_base 1: mod_base = OTHER; note = 2'-O-methyladenosine-3'-phosphorothioate
  modified_base 2: mod_base = OTHER; note = 2'-deoxy-2'-fluoroguanosine-3'-phosphorothioate
  modified_base 3: mod_base = OTHER; note = 2'-O-methyluridine-3'-phosphate
  modified_base 4: mod_base = OTHER; note = 2'-O-methylguanosine-3'-phosphate
  modified_base 5: mod_base = OTHER; note = 2'-O-methylcytidine-3'-phosphate
  modified_base 6: mod_base = OTHER; note = 2'-deoxy-2'-fluorouridine-3'-phosphate
  modified_base 7: mod_base = OTHER; note = 2'-O-methyladenosine-3'-phosphate
  modified_base 8: mod_base = OTHER; note = 2'-deoxy-2'-fluorocytidine-3'-phosphate
  modified_base 9: mod_base = OTHER; note = 2'-deoxy-2'-fluorocytidine-3'-phosphate
  modified_base 10: mod_base = OTHER; note = 2'-O-methyluridine-3'-phosphate
  modified_base 11: mod_base = OTHER; note = 2'-O-methyluridine-3'-phosphate
  modified_base 12: mod_base = OTHER; note = 2'-O-methylcytidine-3'-phosphate
  modified_base 13: mod_base = OTHER; note = 2'-O-methyluridine-3'-phosphate
  modified_base 14: mod_base = OTHER; note = 2'-deoxy-2'-fluorocytidine-3'-phosphate
  modified_base 15: mod_base = OTHER; note = 2'-O-methyladenosine-3'-phosphate
  modified_base 16: mod_base = OTHER; note = 2'-deoxy-2'-fluoroadenosine-3'-phosphate
  modified_base 17: mod_base = OTHER; note = 2'-O-methyladenosine-3'-phosphate
  modified_base 18: mod_base = OTHER; note = 2'-O-methylguanosine-3'-phosphate
  modified_base 19: mod_base = OTHER; note = 2'-O-methyluridine-3'-phosphate
  modified_base 20: mod_base = OTHER; note = 2'-O-methyluridine-3'-phosphate
  modified_base 21: mod_base = OTHER; note = 2'-O-methylguanosine-3'-phosphorothioate
  modified_base 22: mod_base = OTHER; note = 2'-O-methyluridine-3'-phosphorothioate
  modified_base 23: mod_base = OTHER; note = 2'-O-methylguanosine
agtgctaccttctcaaagttgtg

SEQ ID NO: 2102 - RNA, 21 nt, synthetic construct
  source 1..21: mol_type = other RNA
  modified_base 1: mod_base = OTHER; note = 2'-O-methyladenosine-3'-phosphorothioate
  modified_base 2: mod_base = OTHER; note = 2'-O-methyluridine-3'-phosphorothioate
  modified_base 3: mod_base = OTHER; note = 2'-O-methyluridine-3'-phosphate
  modified_base 4: mod_base = OTHER; note = 2'-O-methylcytidine-3'-phosphate
  modified_base 5: mod_base = OTHER; note = 2'-O-methyladenosine-3'-phosphate
  modified_base 6: mod_base = OTHER; note = 2'-O-methylcytidine-3'-phosphate
  modified_base 7: mod_base = OTHER; note = 2'-deoxy-2'-fluoroadenosine-3'-phosphate
  modified_base 8: mod_base = OTHER; note = 2'-O-methyladenosine-3'-phosphate
  modified_base 9: mod_base = OTHER; note = 2'-deoxy-2'-fluorocytidine-3'-phosphate
  modified_base 10: mod_base = OTHER; note = 2'-deoxy-2'-fluorouridine-3'-phosphate
  modified_base 11: mod_base = OTHER; note = 2'-deoxy-2'-fluorouridine-3'-phosphate
  modified_base 12: mod_base = OTHER; note = 2'-O-methyluridine-3'-phosphate
  modified_base 13: mod_base = OTHER; note = 2'-O-methylguanosine-3'-phosphate
  modified_base 14: mod_base = OTHER; note = 2'-O-methyladenosine-3'-phosphate
  modified_base 15: mod_base = OTHER; note = 2'-O-methylguanosine-3'-phosphate
  modified_base 16: mod_base = OTHER; note = 2'-O-methyladenosine-3'-phosphate
  modified_base 17: mod_base = OTHER; note = 2'-O-methyladenosine-3'-phosphate
  modified_base 18: mod_base = OTHER; note = 2'-O-methylguanosine-3'-phosphate
  modified_base 19: mod_base = OTHER; note = 2'-O-methylguanosine-3'-phosphate
  modified_base 20: mod_base = OTHER; note = 2'-O-methyluridine-3'-phosphate
  modified_base 21: mod_base = OTHER; note = 2'-O-methyladenosine-3'-phosphate ((2S,4R)-1-[29-[[2-(acetylamino)-2-deoxy-beta-D-galactopyra nosyl]oxy]-14,14-bis[[3-[[3-[[5-[[2-(acetylamino)-2-deoxy-b eta-D-galactopyranosyl]oxy]-1-oxopentyl]amino]propyl]amino] -3-oxopropoxy]methyl]-1,12,19,25-tetraoxo-16-oxa-13,20,24-t riazanonacos-1-yl]-4-hydroxy-2-pyrrolidinyl)methyl ester
attcacaactttgagaaggta

SEQ ID NO: 2103 - RNA, 23 nt, synthetic construct
  source 1..23: mol_type = other RNA
  modified_base 1: mod_base = OTHER; note = 2'-O-methyluridine-3'-phosphorothioate
  modified_base 2: mod_base = OTHER; note = 2'-deoxy-2'-fluoroadenosine-3'-phosphorothioate
  modified_base 3: mod_base = OTHER; note = 2'-O-methylcytidine-3'-phosphate
  modified_base 4: mod_base = OTHER; note = 2'-O-methylcytidine-3'-phosphate
  modified_base 5: mod_base = OTHER; note = 2'-O-methyluridine-3'-phosphate
  modified_base 6: mod_base = OTHER; note = 2'-deoxy-2'-fluorouridine-3'-phosphate
  modified_base 7: mod_base = OTHER; note = 2'-O-methylcytidine-3'-phosphate
  modified_base 8: mod_base = OTHER; note = 2'-deoxy-2'-fluorouridine-3'-phosphate
  modified_base 9: mod_base = OTHER; note = 2'-deoxy-2'-fluorocytidine-3'-phosphate
  modified_base 10: mod_base = OTHER; note = 2'-O-methyladenosine-3'-phosphate
  modified_base 11: mod_base = OTHER; note = 2'-O-methyladenosine-3'-phosphate
  modified_base 12: mod_base = OTHER; note = 2'-O-methyladenosine-3'-phosphate
  modified_base 13: mod_base = OTHER; note = 2'-O-methylguanosine-3'-phosphate
  modified_base 14: mod_base = OTHER; note = 2'-deoxy-2'-fluorouridine-3'-phosphate
  modified_base 15: mod_base = OTHER; note = 2'-O-methyluridine-3'-phosphate
  modified_base 16: mod_base = OTHER; note = 2'-deoxy-2'-fluoroguanosine-3'-phosphate
  modified_base 17: mod_base = OTHER; note = 2'-O-methyluridine-3'-phosphate
  modified_base 18: mod_base = OTHER; note = 2'-O-methylguanosine-3'-phosphate
  modified_base 19: mod_base = OTHER; note = 2'-O-methyladenosine-3'-phosphate
  modified_base 20: mod_base = OTHER; note = 2'-O-methyladenosine-3'-phosphate
  modified_base 21: mod_base = OTHER; note = 2'-O-methyluridine-3'-phosphorothioate
  modified_base 22: mod_base = OTHER; note = 2'-O-methylcytidine-3'-phosphorothioate
  modified_base 23: mod_base = OTHER; note = 2'-O-methyladenosine
taccttctcaaagttgtgaatca

SEQ ID NO: 2104 - RNA, 21 nt, synthetic construct
  source 1..21: mol_type = other RNA
  modified_base 1: mod_base = OTHER; note = 2'-O-methylguanosine-3'-phosphorothioate
  modified_base 2: mod_base = OTHER; note = 2'-O-methyladenosine-3'-phosphorothioate
  modified_base 3: mod_base = OTHER; note = 2'-O-methyluridine-3'-phosphate
  modified_base 4: mod_base = OTHER; note = 2'-O-methyluridine-3'-phosphate
  modified_base 5: mod_base = OTHER; note = 2'-O-methylcytidine-3'-phosphate
  modified_base 6: mod_base = OTHER; note = 2'-O-methyladenosine-3'-phosphate
  modified_base 7: mod_base = OTHER; note = 2'-deoxy-2'-fluorocytidine-3'-phosphate
  modified_base 8: mod_base = OTHER; note = 2'-O-methyladenosine-3'-phosphate
  modified_base 9: mod_base = OTHER; note = 2'-deoxy-2'-fluoroadenosine-3'-phosphate
  modified_base 10: mod_base = OTHER; note = 2'-deoxy-2'-fluorocytidine-3'-phosphate
  modified_base 11: mod_base = OTHER; note = 2'-deoxy-2'-fluorouridine-3'-phosphate
  modified_base 12: mod_base = OTHER; note = 2'-O-methyluridine-3'-phosphate
  modified_base 13: mod_base = OTHER; note = 2'-O-methyluridine-3'-phosphate
  modified_base 14: mod_base = OTHER; note = 2'-O-methylguanosine-3'-phosphate
  modified_base 15: mod_base = OTHER; note = 2'-O-methyladenosine-3'-phosphate
  modified_base 16: mod_base = OTHER; note = 2'-O-methylguanosine-3'-phosphate
  modified_base 17: mod_base = OTHER; note = 2'-O-methyladenosine-3'-phosphate
  modified_base 18: mod_base = OTHER; note = 2'-O-methyladenosine-3'-phosphate
  modified_base 19: mod_base = OTHER; note = 2'-O-methylguanosine-3'-phosphate
  modified_base 20: mod_base = OTHER; note = 2'-O-methylguanosine-3'-phosphate
  modified_base 21: mod_base = OTHER; note = 2'-O-methyluridine-3'-phosphate ((2S,4R)-1-[29-[[2-(acetylamino)-2-deoxy-beta-D-galactopyra nosyl]oxy]-14,14-bis[[3-[[3-[[5-[[2-(acetylamino)-2-deoxy-b eta-D-galactopyranosyl]oxy]-1-oxopentyl]amino]propyl]amino] -3-oxopropoxy]methyl]-1,12,19,25-tetraoxo-16-oxa-13,20,24-t riazanonacos-1-yl]-4-hydroxy-2-pyrrolidinyl)methyl ester
gattcacaactttgagaaggt

SEQ ID NO: 2105 - RNA, 23 nt, synthetic construct
  source 1..23: mol_type = other RNA
  modified_base 1: mod_base = OTHER; note = 2'-O-methyladenosine-3'-phosphorothioate
  modified_base 2: mod_base = OTHER; note = 2'-deoxy-2'-fluorocytidine-3'-phosphorothioate
  modified_base 3: mod_base = OTHER; note = 2'-O-methylcytidine-3'-phosphate
  modified_base 4: mod_base = OTHER; note = 2'-O-methyluridine-3'-phosphate
  modified_base 5: mod_base = OTHER; note = 2'-O-methyluridine-3'-phosphate
  modified_base 6: mod_base = OTHER; note = 2'-deoxy-2'-fluorocytidine-3'-phosphate
  modified_base 7: mod_base = OTHER; note = 2'-O-methyluridine-3'-phosphate
  modified_base 8: mod_base = OTHER; note = 2'-deoxy-2'-fluorocytidine-3'-phosphate
  modified_base 9: mod_base = OTHER; note = 2'-deoxy-2'-fluoroadenosine-3'-phosphate
  modified_base 10: mod_base = OTHER; note = 2'-O-methyladenosine-3'-phosphate
  modified_base 11: mod_base = OTHER; note = 2'-O-methyladenosine-3'-phosphate
  modified_base 12: mod_base = OTHER; note = 2'-O-methylguanosine-3'-phosphate
  modified_base 13: mod_base = OTHER; note = 2'-O-methyluridine-3'-phosphate
  modified_base 14: mod_base = OTHER; note = 2'-deoxy-2'-fluorouridine-3'-phosphate
  modified_base 15: mod_base = OTHER; note = 2'-O-methylguanosine-3'-phosphate
  modified_base 16: mod_base = OTHER; note = 2'-deoxy-2'-fluorouridine-3'-phosphate
  modified_base 17: mod_base = OTHER; note = 2'-O-methylguanosine-3'-phosphate
  modified_base 18: mod_base = OTHER; note = 2'-O-methyladenosine-3'-phosphate
  modified_base 19: mod_base = OTHER; note = 2'-O-methyladenosine-3'-phosphate
  modified_base 20: mod_base = OTHER; note = 2'-O-methyluridine-3'-phosphate
  modified_base 21: mod_base = OTHER; note = 2'-O-methylcytidine-3'-phosphorothioate
  modified_base 22: mod_base = OTHER; note = 2'-O-methyladenosine-3'-phosphorothioate
  modified_base 23: mod_base = OTHER; note = 2'-O-methylguanosine
accttctcaaagttgtgaatcag

SEQ ID NO: 2106 - RNA, 21 nt, synthetic construct
  source 1..21: mol_type = other RNA
  modified_base 1: mod_base = OTHER; note = 2'-O-methyladenosine-3'-phosphorothioate
  modified_base 2: mod_base = OTHER; note = 2'-O-methyladenosine-3'-phosphorothioate
  modified_base 3: mod_base = OTHER; note = 2'-O-methylcytidine-3'-phosphate
  modified_base 4: mod_base = OTHER; note = 2'-O-methyladenosine-3'-phosphate
  modified_base 5: mod_base = OTHER; note = 2'-O-methyluridine-3'-phosphate
  modified_base 6: mod_base = OTHER; note = 2'-O-methylguanosine-3'-phosphate
  modified_base 7: mod_base = OTHER; note = 2'-deoxy-2'-fluorocytidine-3'-phosphate
  modified_base 8: mod_base = OTHER; note = 2'-O-methyluridine-3'-phosphate
  modified_base 9: mod_base = OTHER; note = 2'-deoxy-2'-fluoroadenosine-3'-phosphate
  modified_base 10: mod_base = OTHER; note = 2'-deoxy-2'-fluoroadenosine-3'-phosphate
  modified_base 11: mod_base = OTHER; note = 2'-deoxy-2'-fluoroadenosine-3'-phosphate
  modified_base 12: mod_base = OTHER; note = 2'-O-methyluridine-3'-phosphate
  modified_base 13: mod_base = OTHER; note = 2'-O-methylcytidine-3'-phosphate
  modified_base 14: mod_base = OTHER; note = 2'-O-methyladenosine-3'-phosphate
  modified_base 15: mod_base = OTHER; note = 2'-O-methylguanosine-3'-phosphate
  modified_base 16: mod_base = OTHER; note = 2'-O-methyluridine-3'-phosphate
  modified_base 17: mod_base = OTHER; note = 2'-O-methyladenosine-3'-phosphate
  modified_base 18: mod_base = OTHER; note = 2'-O-methylcytidine-3'-phosphate
  modified_base 19: mod_base = OTHER; note = 2'-O-methyluridine-3'-phosphate
  modified_base 20: mod_base = OTHER; note = 2'-O-methyluridine-3'-phosphate
  modified_base 21: mod_base = OTHER; note = 2'-O-methylcytidine-3'-phosphate ((2S,4R)-1-[29-[[2-(acetylamino)-2-deoxy-beta-D-galactopyra nosyl]oxy]-14,14-bis[[3-[[3-[[5-[[2-(acetylamino)-2-deoxy-b eta-D-galactopyranosyl]oxy]-1-oxopentyl]amino]propyl]amino] -3-oxopropoxy]methyl]-1,12,19,25-tetraoxo-16-oxa-13,20,24-t riazanonacos-1-yl]-4-hydroxy-2-pyrrolidinyl)methyl ester
aacatgctaaatcagtacttc

SEQ ID NO: 2107 - RNA, 23 nt, synthetic construct
  source 1..23: mol_type = other RNA
  modified_base 1: mod_base = OTHER; note = 2'-O-methylguanosine-3'-phosphorothioate
  modified_base 2: mod_base = OTHER; note = 2'-deoxy-2'-fluoroadenosine-3'-phosphorothioate
  modified_base 3: mod_base = OTHER; note = 2'-O-methyladenosine-3'-phosphate
  modified_base 4: mod_base = OTHER; note = 2'-O-methylguanosine-3'-phosphate
  modified_base 5: mod_base = OTHER; note = 2'-O-methyluridine-3'-phosphate
  modified_base 6: mod_base = OTHER; note = 2'-deoxy-2'-fluoroadenosine-3'-phosphate
  modified_base 7: mod_base = OTHER; note = 2'-O-methylcytidine-3'-phosphate
  modified_base 8: mod_base = OTHER; note = 2'-deoxy-2'-fluorouridine-3'-phosphate
  modified_base 9: mod_base = OTHER; note = 2'-deoxy-2'-fluoroguanosine-3'-phosphate
  modified_base 10: mod_base = OTHER; note = 2'-O-methyladenosine-3'-phosphate
  modified_base 11: mod_base = OTHER; note = 2'-O-methyluridine-3'-phosphate
  modified_base 12: mod_base = OTHER; note = 2'-O-methyluridine-3'-phosphate
  modified_base 13: mod_base = OTHER; note = 2'-O-methyluridine-3'-phosphate
  modified_base 14: mod_base = OTHER; note = 2'-deoxy-2'-fluoroadenosine-3'-phosphate
  modified_base 15: mod_base = OTHER; note = 2'-O-methylguanosine-3'-phosphate
  modified_base 16: mod_base = OTHER; note = 2'-deoxy-2'-fluorocytidine-3'-phosphate
  modified_base 17: mod_base = OTHER; note = 2'-O-methyladenosine-3'-phosphate
  modified_base 18: mod_base = OTHER; note = 2'-O-methyluridine-3'-phosphate
  modified_base 19: mod_base = OTHER; note = 2'-O-methylguanosine-3'-phosphate
  modified_base 20: mod_base = OTHER; note = 2'-O-methyluridine-3'-phosphate
  modified_base 21: mod_base = OTHER; note = 2'-O-methyluridine-3'-phosphorothioate
  modified_base 22: mod_base = OTHER; note = 2'-O-methylguanosine-3'-phosphorothioate
  modified_base 23: mod_base = OTHER; note = 2'-O-methyluridine
gaagtactgatttagcatgttgt

SEQ ID NO: 2108 - RNA, 21 nt, synthetic construct
  source 1..21: mol_type = other RNA
  modified_base 1: mod_base = OTHER; note = 2'-O-methyladenosine-3'-phosphorothioate
  modified_base 2: mod_base = OTHER; note = 2'-O-methylcytidine-3'-phosphorothioate
  modified_base 3: mod_base = OTHER; note = 2'-O-methyladenosine-3'-phosphate
  modified_base 4: mod_base = OTHER; note = 2'-O-methyluridine-3'-phosphate
  modified_base 5: mod_base = OTHER; note = 2'-O-methylguanosine-3'-phosphate
  modified_base 6: mod_base = OTHER; note = 2'-O-methylcytidine-3'-phosphate
  modified_base 7: mod_base = OTHER; note = 2'-deoxy-2'-fluorouridine-3'-phosphate
  modified_base 8: mod_base = OTHER; note = 2'-O-methyladenosine-3'-phosphate
  modified_base 9: mod_base = OTHER; note = 2'-deoxy-2'-fluoroadenosine-3'-phosphate
  modified_base 10: mod_base = OTHER; note = 2'-deoxy-2'-fluoroadenosine-3'-phosphate
  modified_base 11: mod_base = OTHER; note = 2'-deoxy-2'-fluorouridine-3'-phosphate
  modified_base 12: mod_base = OTHER; note = 2'-O-methylcytidine-3'-phosphate
  modified_base 13: mod_base = OTHER; note = 2'-O-methyladenosine-3'-phosphate
  modified_base 14: mod_base = OTHER; note = 2'-O-methylguanosine-3'-phosphate
  modified_base 15: mod_base = OTHER; note = 2'-O-methyluridine-3'-phosphate
  modified_base 16: mod_base = OTHER; note = 2'-O-methyladenosine-3'-phosphate
  modified_base 17: mod_base = OTHER; note = 2'-O-methylcytidine-3'-phosphate
  modified_base 18: mod_base = OTHER; note = 2'-O-methyluridine-3'-phosphate
  modified_base 19: mod_base = OTHER; note = 2'-O-methyluridine-3'-phosphate
  modified_base 20: mod_base = OTHER; note = 2'-O-methylcytidine-3'-phosphate
  modified_base 21: mod_base = OTHER; note = 2'-O-methylcytidine-3'-phosphate ((2S,4R)-1-[29-[[2-(acetylamino)-2-deoxy-beta-D-galactopyra nosyl]oxy]-14,14-bis[[3-[[3-[[5-[[2-(acetylamino)-2-deoxy-b eta-D-galactopyranosyl]oxy]-1-oxopentyl]amino]propyl]amino] -3-oxopropoxy]methyl]-1,12,19,25-tetraoxo-16-oxa-13,20,24-t riazanonacos-1-yl]-4-hydroxy-2-pyrrolidinyl)methyl ester
acatgctaaatcagtacttcc

SEQ ID NO: 2109 - RNA, 23 nt, synthetic construct
  source 1..23: mol_type = other RNA
  modified_base 1: mod_base = OTHER; note = 2'-O-methylguanosine-3'-phosphorothioate
  modified_base 2: mod_base = OTHER; note = 2'-deoxy-2'-fluoroguanosine-3'-phosphorothioate
  modified_base 3: mod_base = OTHER; note = 2'-O-methyladenosine-3'-phosphate
  modified_base 4: mod_base = OTHER; note = 2'-O-methyladenosine-3'-phosphate
  modified_base 5: mod_base = OTHER; note = 2'-O-methylguanosine-3'-phosphate
  modified_base 6: mod_base = OTHER; note = 2'-deoxy-2'-fluorouridine-3'-phosphate
  modified_base 7: mod_base = OTHER; note = 2'-O-methyladenosine-3'-phosphate
  modified_base 8: mod_base = OTHER; note = 2'-deoxy-2'-fluorocytidine-3'-phosphate
  modified_base 9: mod_base = OTHER; note = 2'-deoxy-2'-fluorouridine-3'-phosphate
  modified_base 10: mod_base = OTHER; note = 2'-O-methylguanosine-3'-phosphate
  modified_base 11: mod_base = OTHER; note = 2'-O-methyladenosine-3'-phosphate
  modified_base 12: mod_base = OTHER; note = 2'-O-methyluridine-3'-phosphate
  modified_base 13: mod_base = OTHER; note = 2'-O-methyluridine-3'-phosphate
  modified_base 14: mod_base = OTHER; note = 2'-deoxy-2'-fluorouridine-3'-phosphate
  modified_base 15: mod_base = OTHER; note = 2'-O-methyladenosine-3'-phosphate
  modified_base 16: mod_base = OTHER; note = 2'-deoxy-2'-fluoroguanosine-3'-phosphate
  modified_base 17: mod_base = OTHER; note = 2'-O-methylcytidine-3'-phosphate
  modified_base 18: mod_base = OTHER; note = 2'-O-methyladenosine-3'-phosphate
  modified_base 19: mod_base = OTHER; note = 2'-O-methyluridine-3'-phosphate
  modified_base 20: mod_base = OTHER; note = 2'-O-methylguanosine-3'-phosphate
  modified_base 21: mod_base = OTHER; note = 2'-O-methyluridine-3'-phosphorothioate
  modified_base 22: mod_base = OTHER; note = 2'-O-methyluridine-3'-phosphorothioate
  modified_base 23: mod_base = OTHER; note = 2'-O-methylguanosine
ggaagtactgatttagcatgttg

SEQ ID NO: 2110 - RNA, 21 nt, synthetic construct
  source 1..21: mol_type = other RNA
  modified_base 1: mod_base = OTHER; note = 2'-O-methylguanosine-3'-phosphorothioate
  modified_base 2: mod_base = OTHER; note = 2'-O-methyladenosine-3'-phosphorothioate
  modified_base 3: mod_base = OTHER; note = 2'-O-methyladenosine-3'-phosphate
  modified_base 4: mod_base = OTHER; note = 2'-O-methylcytidine-3'-phosphate
  modified_base 5: mod_base = OTHER; note = 2'-O-methyladenosine-3'-phosphate
  modified_base 6: mod_base = OTHER; note = 2'-O-methyladenosine-3'-phosphate
  modified_base 7: mod_base = OTHER; note = 2'-deoxy-2'-fluorocytidine-3'-phosphate
  modified_base 8: mod_base = OTHER; note = 2'-O-methyladenosine-3'-phosphate
  modified_base 9: mod_base = OTHER; note = 2'-deoxy-2'-fluorouridine-3'-phosphate
  modified_base 10: mod_base = OTHER; note = 2'-deoxy-2'-fluoroguanosine-3'-phosphate
  modified_base 11: mod_base = OTHER; note = 2'-deoxy-2'-fluorocytidine-3'-phosphate
  modified_base 12: mod_base = OTHER; note = 2'-O-methyluridine-3'-phosphate
  modified_base 13: mod_base = OTHER; note = 2'-O-methyladenosine-3'-phosphate
  modified_base 14: mod_base = OTHER; note = 2'-O-methyladenosine-3'-phosphate
  modified_base 15: mod_base = OTHER; note = 2'-O-methyladenosine-3'-phosphate
  modified_base 16: mod_base = OTHER; note = 2'-O-methyluridine-3'-phosphate
  modified_base 17: mod_base = OTHER; note = 2'-O-methylcytidine-3'-phosphate
  modified_base 18: mod_base = OTHER; note = 2'-O-methyladenosine-3'-phosphate
  modified_base 19: mod_base = OTHER; note = 2'-O-methylguanosine-3'-phosphate
  modified_base 20: mod_base = OTHER; note = 2'-O-methyluridine-3'-phosphate
  modified_base 21: mod_base = OTHER; note = 2'-O-methyladenosine-3'-phosphate ((2S,4R)-1-[29-[[2-(acetylamino)-2-deoxy-beta-D-galactopyra nosyl]oxy]-14,14-bis[[3-[[3-[[5-[[2-(acetylamino)-2-deoxy-b eta-D-galactopyranosyl]oxy]-1-oxopentyl]amino]propyl]amino] -3-oxopropoxy]methyl]-1,12,19,25-tetraoxo-16-oxa-13,20,24-t riazanonacos-1-yl]-4-hydroxy-2-pyrrolidinyl)methyl ester
gaacaacatgctaaatcagta

SEQ ID NO: 2111 - RNA, 23 nt, synthetic construct
  source 1..23: mol_type = other RNA
  modified_base 1: mod_base = OTHER; note = 2'-O-methyluridine-3'-phosphorothioate
  modified_base 2: mod_base = OTHER; note = 2'-deoxy-2'-fluoroadenosine-3'-phosphorothioate
  modified_base 3: mod_base = OTHER; note = 2'-O-methylcytidine-3'-phosphate
  modified_base 4: mod_base = OTHER; note = 2'-O-methyluridine-3'-phosphate
  modified_base 5: mod_base = OTHER; note = 2'-O-methylguanosine-3'-phosphate
  modified_base 6: mod_base = OTHER; note = 2'-deoxy-2'-fluoroadenosine-3'-phosphate
  modified_base 7: mod_base = OTHER; note = 2'-O-methyluridine-3'-phosphate
  modified_base 8: mod_base = OTHER; note = 2'-deoxy-2'-fluorouridine-3'-phosphate
  modified_base 9: mod_base = OTHER; note = 2'-deoxy-2'-fluorouridine-3'-phosphate
  modified_base 10: mod_base = OTHER; note = 2'-O-methyladenosine-3'-phosphate
  modified_base 11: mod_base = OTHER; note = 2'-O-methylguanosine-3'-phosphate
  modified_base 12: mod_base = OTHER; note = 2'-O-methylcytidine-3'-phosphate
  modified_base 13: mod_base = OTHER; note = 2'-O-methyladenosine-3'-phosphate
  modified_base 14: mod_base = OTHER; note = 2'-deoxy-2'-fluorouridine-3'-phosphate
  modified_base 15: mod_base = OTHER; note = 2'-O-methylguanosine-3'-phosphate
  modified_base 16: mod_base = OTHER; note = 2'-deoxy-2'-fluorouridine-3'-phosphate
  modified_base 17: mod_base = OTHER; note = 2'-O-methyluridine-3'-phosphate
  modified_base 18: mod_base = OTHER; note = 2'-O-methylguanosine-3'-phosphate
  modified_base 19: mod_base = OTHER; note = 2'-O-methyluridine-3'-phosphate
  modified_base 20: mod_base = OTHER; note = 2'-O-methyluridine-3'-phosphate
  modified_base 21: mod_base = OTHER; note = 2'-O-methylcytidine-3'-phosphorothioate
  modified_base 22: mod_base = OTHER; note = 2'-O-methyladenosine-3'-phosphorothioate
  modified_base 23: mod_base = OTHER; note = 2'-O-methyluridine
tactgatttagcatgttgttcat

SEQ ID NO: 2112 - RNA, 21 nt, synthetic construct
  source 1..21: mol_type = other RNA
  modified_base 1: mod_base = OTHER; note = 2'-O-methyluridine-3'-phosphorothioate
  modified_base 2: mod_base = OTHER; note = 2'-O-methylguanosine-3'-phosphorothioate
  modified_base 3: mod_base = OTHER; note = 2'-O-methyladenosine-3'-phosphate
  modified_base 4: mod_base = OTHER; note = 2'-O-methyladenosine-3'-phosphate
  modified_base 5: mod_base = OTHER; note = 2'-O-methylcytidine-3'-phosphate
  modified_base 6: mod_base = OTHER; note = 2'-O-methyladenosine-3'-phosphate
  modified_base 7: mod_base = OTHER; note = 2'-deoxy-2'-fluoroadenosine-3'-phosphate
  modified_base 8: mod_base = OTHER; note = 2'-O-methylcytidine-3'-phosphate
  modified_base 9: mod_base = OTHER; note = 2'-deoxy-2'-fluoroadenosine-3'-phosphate
  modified_base 10: mod_base = OTHER; note = 2'-deoxy-2'-fluorouridine-3'-phosphate
  modified_base 11: mod_base = OTHER; note = 2'-deoxy-2'-fluoroguanosine-3'-phosphate
  modified_base 12: mod_base = OTHER; note = 2'-O-methylcytidine-3'-phosphate
  modified_base 13: mod_base = OTHER; note = 2'-O-methyluridine-3'-phosphate
  modified_base 14: mod_base = OTHER; note = 2'-O-methyladenosine-3'-phosphate
  modified_base 15: mod_base = OTHER; note = 2'-O-methyladenosine-3'-phosphate
  modified_base 16: mod_base = OTHER; note = 2'-O-methyladenosine-3'-phosphate
  modified_base 17: mod_base = OTHER; note = 2'-O-methyluridine-3'-phosphate
  modified_base 18: mod_base = OTHER; note = 2'-O-methylcytidine-3'-phosphate
  modified_base 19: mod_base = OTHER; note = 2'-O-methyladenosine-3'-phosphate
  modified_base 20: mod_base = OTHER; note = 2'-O-methylguanosine-3'-phosphate
  modified_base 21: mod_base = OTHER; note = 2'-O-methyluridine-3'-phosphate ((2S,4R)-1-[29-[[2-(acetylamino)-2-deoxy-beta-D-galactopyra nosyl]oxy]-14,14-bis[[3-[[3-[[5-[[2-(acetylamino)-2-deoxy-b eta-D-galactopyranosyl]oxy]-1-oxopentyl]amino]propyl]amino] -3-oxopropoxy]methyl]-1,12,19,25-tetraoxo-16-oxa-13,20,24-t riazanonacos-1-yl]-4-hydroxy-2-pyrrolidinyl)methyl ester
tgaacaacatgctaaatcagt

SEQ ID NO: 2113 - RNA, 23 nt, synthetic construct
  source 1..23: mol_type = other RNA
  modified_base 1: mod_base = OTHER; note = 2'-O-methyladenosine-3'-phosphorothioate
  modified_base 2: mod_base = OTHER; note = 2'-deoxy-2'-fluorocytidine-3'-phosphorothioate
  modified_base 3: mod_base = OTHER; note = 2'-O-methyluridine-3'-phosphate
  modified_base 4: mod_base = OTHER; note = 2'-O-methylguanosine-3'-phosphate
  modified_base 5: mod_base = OTHER; note = 2'-O-methyladenosine-3'-phosphate
  modified_base 6: mod_base = OTHER; note = 2'-deoxy-2'-fluorouridine-3'-phosphate
  modified_base 7: mod_base = OTHER; note = 2'-O-methyluridine-3'-phosphate
  modified_base 8: mod_base = OTHER; note = 2'-deoxy-2'-fluorouridine-3'-phosphate
  modified_base 9: mod_base = OTHER; note = 2'-deoxy-2'-fluoroadenosine-3'-phosphate
  modified_base 10: mod_base = OTHER; note = 2'-O-methylguanosine-3'-phosphate
  modified_base 11: mod_base = OTHER; note = 2'-O-methylcytidine-3'-phosphate
  modified_base 12: mod_base = OTHER; note = 2'-O-methyladenosine-3'-phosphate
  modified_base 13: mod_base = OTHER; note = 2'-O-methyluridine-3'-phosphate
  modified_base 14: mod_base = OTHER; note = 2'-deoxy-2'-fluoroguanosine-3'-phosphate
  modified_base 15: mod_base = OTHER; note = 2'-O-methyluridine-3'-phosphate
  modified_base 16: mod_base = OTHER; note = 2'-deoxy-2'-fluorouridine-3'-phosphate
  modified_base 17: mod_base = OTHER; note = 2'-O-methylguanosine-3'-phosphate
  modified_base 18: mod_base = OTHER; note = 2'-O-methyluridine-3'-phosphate
  modified_base 19: mod_base = OTHER; note = 2'-O-methyluridine-3'-phosphate
  modified_base 20: mod_base = OTHER; note = 2'-O-methylcytidine-3'-phosphate
  modified_base 21: mod_base = OTHER; note = 2'-O-methyladenosine-3'-phosphorothioate
  modified_base 22: mod_base = OTHER; note = 2'-O-methyluridine-3'-phosphorothioate
  modified_base 23: mod_base = OTHER; note = 2'-O-methyladenosine
actgatttagcatgttgttcata

SEQ ID NO: 2114 - RNA, 21 nt, synthetic construct
  source 1..21: mol_type = other RNA
  modified_base 1: mod_base = OTHER; note = 2'-O-methyladenosine-3'-phosphorothioate
  modified_base 2: mod_base = OTHER; note = 2'-O-methyladenosine-3'-phosphorothioate
  modified_base 3: mod_base = OTHER; note = 2'-O-methyladenosine-3'-phosphate
  modified_base 4: mod_base = OTHER; note = 2'-O-methylcytidine-3'-phosphate
  modified_base 5: mod_base = OTHER; note = 2'-O-methylcytidine-3'-phosphate
  modified_base 6: mod_base = OTHER; note = 2'-O-methyladenosine-3'-phosphate
  modified_base 7: mod_base = OTHER; note = 2'-deoxy-2'-fluoroguanosine-3'-phosphate
  modified_base 8: mod_base = OTHER; note = 2'-O-methyluridine-3'-phosphate
  modified_base 9: mod_base = OTHER; note = 2'-deoxy-2'-fluoroadenosine-3'-phosphate
  modified_base 10: mod_base = OTHER; note = 2'-deoxy-2'-fluorocytidine-3'-phosphate
  modified_base 11: mod_base = OTHER; note = 2'-deoxy-2'-fluorouridine-3'-phosphate
  modified_base 12: mod_base = OTHER; note = 2'-O-methyluridine-3'-phosphate
  modified_base 13: mod_base = OTHER; note = 2'-O-methyluridine-3'-phosphate
  modified_base 14: mod_base = OTHER; note = 2'-O-methyladenosine-3'-phosphate
  modified_base 15: mod_base = OTHER; note = 2'-O-methyluridine-3'-phosphate
  modified_base 16: mod_base = OTHER; note = 2'-O-methylcytidine-3'-phosphate
  modified_base 17: mod_base = OTHER; note = 2'-O-methyladenosine-3'-phosphate
  modified_base 18: mod_base = OTHER; note = 2'-O-methyluridine-3'-phosphate
  modified_base 19: mod_base = OTHER; note = 2'-O-methyluridine-3'-phosphate
  modified_base 20: mod_base = OTHER; note = 2'-O-methyluridine-3'-phosphate
  modified_base 21: mod_base = OTHER; note = 2'-O-methyluridine-3'-phosphate ((2S,4R)-1-[29-[[2-(acetylamino)-2-deoxy-beta-D-galactopyra nosyl]oxy]-14,14-bis[[3-[[3-[[5-[[2-(acetylamino)-2-deoxy-b eta-D-galactopyranosyl]oxy]-1-oxopentyl]amino]propyl]amino] -3-oxopropoxy]methyl]-1,12,19,25-tetraoxo-16-oxa-13,20,24-t riazanonacos-1-yl]-4-hydroxy-2-pyrrolidinyl)methyl ester
aaaccagtactttatcatttt

SEQ ID NO: 2115 - RNA, 23 nt, synthetic construct
  source 1..23: mol_type = other RNA
  modified_base 1: mod_base = OTHER; note = 2'-O-methyladenosine-3'-phosphorothioate
  modified_base 2: mod_base = OTHER; note = 2'-deoxy-2'-fluoroadenosine-3'-phosphorothioate
  modified_base 3: mod_base = OTHER; note = 2'-O-methyladenosine-3'-phosphate
  modified_base 4: mod_base = OTHER; note = 2'-O-methyladenosine-3'-phosphate
  modified_base 5: mod_base = OTHER; note = 2'-O-methyluridine-3'-phosphate
  modified_base 6: mod_base = OTHER; note = 2'-deoxy-2'-fluoroguanosine-3'-phosphate
  modified_base 7: mod_base = OTHER; note = 2'-O-methyladenosine-3'-phosphate
  modified_base 8: mod_base = OTHER; note = 2'-deoxy-2'-fluorouridine-3'-phosphate
  modified_base 9: mod_base = OTHER; note = 2'-deoxy-2'-fluoroadenosine-3'-phosphate
  modified_base 10: mod_base = OTHER; note = 2'-O-methyladenosine-3'-phosphate
  modified_base 11: mod_base = OTHER; note = 2'-O-methyladenosine-3'-phosphate
  modified_base 12: mod_base = OTHER; note = 2'-O-methylguanosine-3'-phosphate
  modified_base 13: mod_base = OTHER; note = 2'-O-methyluridine-3'-phosphate
  modified_base 14: mod_base = OTHER; note = 2'-deoxy-2'-fluoroadenosine-3'-phosphate
  modified_base 15: mod_base = OTHER; note = 2'-O-methylcytidine-3'-phosphate
  modified_base 16: mod_base = OTHER; note = 2'-deoxy-2'-fluorouridine-3'-phosphate
  modified_base 17: mod_base = OTHER; note = 2'-O-methylguanosine-3'-phosphate
  modified_base 18: mod_base = OTHER; note = 2'-O-methylguanosine-3'-phosphate
  modified_base 19: mod_base = OTHER; note = 2'-O-methyluridine-3'-phosphate
  modified_base 20: mod_base = OTHER; note = 2'-O-methyluridine-3'-phosphate
  modified_base 21: mod_base = OTHER; note = 2'-O-methyluridine-3'-phosphorothioate
  modified_base 22: mod_base = OTHER; note = 2'-O-methylcytidine-3'-phosphorothioate
  modified_base 23: mod_base = OTHER; note = 2'-O-methyladenosine
aaaatgataaagtactggtttca

SEQ ID NO: 2116 - RNA, 21 nt, synthetic construct
  source 1..21: mol_type = other RNA
  modified_base 1: mod_base = OTHER; note = 2'-O-methyladenosine-3'-phosphorothioate
  modified_base 2: mod_base = OTHER; note = 2'-O-methyladenosine-3'-phosphorothioate
  modified_base 3: mod_base = OTHER; note = 2'-O-methylcytidine-3'-phosphate
  modified_base 4: mod_base = OTHER; note = 2'-O-methylcytidine-3'-phosphate
  modified_base 5: mod_base = OTHER; note = 2'-O-methyladenosine-3'-phosphate
  modified_base 6: mod_base = OTHER; note = 2'-O-methylguanosine-3'-phosphate
  modified_base 7: mod_base = OTHER; note = 2'-deoxy-2'-fluorouridine-3'-phosphate
  modified_base 8: mod_base = OTHER; note = 2'-O-methyladenosine-3'-phosphate
  modified_base 9: mod_base = OTHER; note = 2'-deoxy-2'-fluorocytidine-3'-phosphate
  modified_base 10: mod_base = OTHER; note = 2'-deoxy-2'-fluorouridine-3'-phosphate
  modified_base 11: mod_base = OTHER; note = 2'-deoxy-2'-fluorouridine-3'-phosphate
  modified_base 12: mod_base = OTHER; note = 2'-O-methyluridine-3'-phosphate
  modified_base 13: mod_base = OTHER; note = 2'-O-methyladenosine-3'-phosphate
  modified_base 14: mod_base = OTHER; note = 2'-O-methyluridine-3'-phosphate
  modified_base 15: mod_base = OTHER; note = 2'-O-methylcytidine-3'-phosphate
  modified_base 16: mod_base = OTHER; note = 2'-O-methyladenosine-3'-phosphate
  modified_base 17: mod_base = OTHER; note = 2'-O-methyluridine-3'-phosphate
  modified_base 18: mod_base = OTHER; note = 2'-O-methyluridine-3'-phosphate
  modified_base 19: mod_base = OTHER; note = 2'-O-methyluridine-3'-phosphate
  modified_base 20: mod_base = OTHER; note = 2'-O-methyluridine-3'-phosphate
  modified_base 21: mod_base = OTHER; note = 2'-O-methylcytidine-3'-phosphate ((2S,4R)-1-[29-[[2-(acetylamino)-2-deoxy-beta-D-galactopyra nosyl]oxy]-14,14-bis[[3-[[3-[[5-[[2-(acetylamino)-2-deoxy-b eta-D-galactopyranosyl]oxy]-1-oxopentyl]amino]propyl]amino] -3-oxopropoxy]methyl]-1,12,19,25-tetraoxo-16-oxa-13,20,24-t riazanonacos-1-yl]-4-hydroxy-2-pyrrolidinyl)methyl ester
aaccagtactttatcattttc

SEQ ID NO: 2117 - RNA, 23 nt, synthetic construct
  source 1..23: mol_type = other RNA
  modified_base 1: mod_base = OTHER; note = 2'-O-methylguanosine-3'-phosphorothioate
  modified_base 2: mod_base = OTHER; note = 2'-deoxy-2'-fluoroadenosine-3'-phosphorothioate
  modified_base 3: mod_base = OTHER; note = 2'-O-methyladenosine-3'-phosphate
  modified_base 4: mod_base = OTHER; note = 2'-O-methyladenosine-3'-phosphate
  modified_base 5: mod_base = OTHER; note = 2'-O-methyladenosine-3'-phosphate
  modified_base 6: mod_base = OTHER; note = 2'-deoxy-2'-fluorouridine-3'-phosphate
  modified_base 7: mod_base = OTHER; note = 2'-O-methylguanosine-3'-phosphate
  modified_base 8: mod_base = OTHER; note = 2'-deoxy-2'-fluoroadenosine-3'-phosphate
  modified_base 9: mod_base = OTHER; note = 2'-deoxy-2'-fluorouridine-3'-phosphate
  modified_base 10: mod_base = OTHER; note = 2'-O-methyladenosine-3'-phosphate
  modified_base 11: mod_base = OTHER; note = 2'-O-methyladenosine-3'-phosphate
  modified_base 12: mod_base = OTHER; note = 2'-O-methyladenosine-3'-phosphate
  modified_base 13: mod_base = OTHER; note = 2'-O-methylguanosine-3'-phosphate
  modified_base 14: mod_base = OTHER; note = 2'-deoxy-2'-fluorouridine-3'-phosphate
  modified_base 15: mod_base = OTHER; note = 2'-O-methyladenosine-3'-phosphate
  modified_base 16: mod_base = OTHER; note = 2'-deoxy-2'-fluorocytidine-3'-phosphate
  modified_base 17: mod_base = OTHER; note = 2'-O-methyluridine-3'-phosphate
  modified_base 18: mod_base = OTHER; note = 2'-O-methylguanosine-3'-phosphate
  modified_base 19: mod_base = OTHER; note = 2'-O-methylguanosine-3'-phosphate
  modified_base 20: mod_base = OTHER; note = 2'-O-methyluridine-3'-phosphate
  modified_base 21: mod_base = OTHER; note = 2'-O-methyluridine-3'-phosphorothioate
  modified_base 22: mod_base = OTHER; note = 2'-O-methyluridine-3'-phosphorothioate
  modified_base 23: mod_base = OTHER; note = 2'-O-methylcytidine
gaaaatgataaagtactggtttc

SEQ ID NO: 2118 - RNA, 21 nt, synthetic construct
  source 1..21: mol_type = other RNA
  modified_base 1: mod_base = OTHER; note = 2'-O-methyluridine-3'-phosphorothioate
  modified_base 2: mod_base = OTHER; note = 2'-O-methyluridine-3'-phosphorothioate
  modified_base 3: mod_base = OTHER; note = 2'-O-methyluridine-3'-phosphate
  modified_base 4: mod_base = OTHER; note = 2'-O-methylguanosine-3'-phosphate
  modified_base 5: mod_base = OTHER; note = 2'-O-methyladenosine-3'-phosphate
  modified_base 6: mod_base = OTHER; note = 2'-O-methyladenosine-3'-phosphate
  modified_base 7: mod_base = OTHER; note = 2'-deoxy-2'-fluoroadenosine-3'-phosphate
  modified_base 8: mod_base = OTHER; note = 2'-O-methylcytidine-3'-phosphate
  modified_base 9: mod_base = OTHER; note = 2'-deoxy-2'-fluorocytidine-3'-phosphate
  modified_base 10: mod_base = OTHER; note = 2'-deoxy-2'-fluoroadenosine-3'-phosphate
  modified_base 11: mod_base = OTHER; note = 2'-deoxy-2'-fluoroguanosine-3'-phosphate
  modified_base 12: mod_base = OTHER; note = 2'-O-methyluridine-3'-phosphate
  modified_base 13: mod_base = OTHER; note = 2'-O-methyladenosine-3'-phosphate
  modified_base 14: mod_base = OTHER; note = 2'-O-methylcytidine-3'-phosphate
  modified_base 15: mod_base = OTHER; note = 2'-O-methyluridine-3'-phosphate
  modified_base 16: mod_base = OTHER; note = 2'-O-methyluridine-3'-phosphate
  modified_base 17: mod_base = OTHER; note = 2'-O-methyluridine-3'-phosphate
  modified_base 18: mod_base = OTHER; note = 2'-O-methyladenosine-3'-phosphate
  modified_base 19: mod_base = OTHER; note = 2'-O-methyluridine-3'-phosphate
  modified_base 20: mod_base = OTHER; note = 2'-O-methylcytidine-3'-phosphate
  modified_base 21: mod_base = OTHER; note = 2'-O-methyladenosine-3'-phosphate ((2S,4R)-1-[29-[[2-(acetylamino)-2-deoxy-beta-D-galactopyra nosyl]oxy]-14,14-bis[[3-[[3-[[5-[[2-(acetylamino)-2-deoxy-b eta-D-galactopyranosyl]oxy]-1-oxopentyl]amino]propyl]amino] -3-oxopropoxy]methyl]-1,12,19,25-tetraoxo-16-oxa-13,20,24-t riazanonacos-1-yl]-4-hydroxy-2-pyrrolidinyl)methyl ester
tttgaaaccagtactttatca

SEQ ID NO: 2119 - RNA, 23 nt, synthetic construct
  source 1..23: mol_type = other RNA
  modified_base 1: mod_base = OTHER; note = 2'-O-methyluridine-3'-phosphorothioate
  modified_base 2: mod_base = OTHER; note = 2'-deoxy-2'-fluoroguanosine-3'-phosphorothioate
  modified_base 3: mod_base = OTHER; note = 2'-O-methyladenosine-3'-phosphate
  modified_base 4: mod_base = OTHER; note = 2'-O-methyluridine-3'-phosphate
  modified_base 5: mod_base = OTHER; note = 2'-O-methyladenosine-3'-phosphate
  modified_base 6: mod_base = OTHER; note = 2'-deoxy-2'-fluoroadenosine-3'-phosphate
  modified_base 7: mod_base = OTHER; note = 2'-O-methyladenosine-3'-phosphate
  modified_base 8: mod_base = OTHER; note = 2'-deoxy-2'-fluoroguanosine-3'-phosphate
  modified_base 9: mod_base = OTHER; note = 2'-deoxy-2'-fluorouridine-3'-phosphate
  modified_base 10: mod_base = OTHER; note = 2'-O-methyladenosine-3'-phosphate
  modified_base 11: mod_base = OTHER; note = 2'-O-methylcytidine-3'-phosphate
  modified_base 12: mod_base = OTHER; note = 2'-O-methyluridine-3'-phosphate
  modified_base 13: mod_base = OTHER; note = 2'-O-methylguanosine-3'-phosphate
  modified_base 14: mod_base = OTHER; note = 2'-deoxy-2'-fluoroguanosine-3'-phosphate
  modified_base 15: mod_base = OTHER; note = 2'-O-methyluridine-3'-phosphate
  modified_base 16: mod_base = OTHER; note = 2'-deoxy-2'-fluorouridine-3'-phosphate
  modified_base 17: mod_base = OTHER; note = 2'-O-methyluridine-3'-phosphate
  modified_base 18: mod_base = OTHER; note = 2'-O-methylcytidine-3'-phosphate
  modified_base 19: mod_base = OTHER; note = 2'-O-methyladenosine-3'-phosphate
  modified_base 20: mod_base = OTHER; note = 2'-O-methyladenosine-3'-phosphate
  modified_base 21: mod_base = OTHER; note = 2'-O-methyladenosine-3'-phosphorothioate
  modified_base 22: mod_base = OTHER; note = 2'-O-methyladenosine-3'-phosphorothioate
  modified_base 23: mod_base = OTHER; note = 2'-O-methyluridine
tgataaagtactggtttcaaaat

SEQ ID NO: 2120 - RNA, 21 nt, synthetic construct
  source 1..21: mol_type = other RNA
  modified_base 1: mod_base = OTHER; note = 2'-O-methyluridine-3'-phosphorothioate
  modified_base 2: mod_base = OTHER; note = 2'-O-methyluridine-3'-phosphorothioate
  modified_base 3: mod_base = OTHER; note = 2'-O-methyluridine-3'-phosphate
  modified_base 4: mod_base = OTHER; note = 2'-O-methyluridine-3'-phosphate
  modified_base 5: mod_base = OTHER; note = 2'-O-methylguanosine-3'-phosphate
  modified_base 6: mod_base = OTHER; note = 2'-O-methyladenosine-3'-phosphate
  modified_base 7: mod_base = OTHER; note = 2'-deoxy-2'-fluoroadenosine-3'-phosphate
  modified_base 8: mod_base = OTHER; note = 2'-O-methyladenosine-3'-phosphate
  modified_base 9: mod_base = OTHER; note = 2'-deoxy-2'-fluorocytidine-3'-phosphate
  modified_base 10: mod_base = OTHER; note = 2'-deoxy-2'-fluorocytidine-3'-phosphate
  modified_base 11: mod_base = OTHER; note = 2'-deoxy-2'-fluoroadenosine-3'-phosphate
  modified_base 12: mod_base = OTHER; note = 2'-O-methylguanosine-3'-phosphate
  modified_base 13: mod_base = OTHER; note = 2'-O-methyluridine-3'-phosphate
  modified_base 14: mod_base = OTHER; note = 2'-O-methyladenosine-3'-phosphate
  modified_base 15: mod_base = OTHER; note = 2'-O-methylcytidine-3'-phosphate
  modified_base 16: mod_base = OTHER; note = 2'-O-methyluridine-3'-phosphate
  modified_base 17: mod_base = OTHER; note = 2'-O-methyluridine-3'-phosphate
  modified_base 18: mod_base = OTHER; note = 2'-O-methyluridine-3'-phosphate
  modified_base 19: mod_base = OTHER; note = 2'-O-methyladenosine-3'-phosphate
  modified_base 20: mod_base = OTHER; note = 2'-O-methyluridine-3'-phosphate
  modified_base 21: mod_base = OTHER; note = 2'-O-methylcytidine-3'-phosphate ((2S,4R)-1-[29-[[2-(acetylamino)-2-deoxy-beta-D-galactopyra nosyl]oxy]-14,14-bis[[3-[[3-[[5-[[2-(acetylamino)-2-deoxy-b eta-D-galactopyranosyl]oxy]-1-oxopentyl]amino]propyl]amino] -3-oxopropoxy]methyl]-1,12,19,25-tetraoxo-16-oxa-13,20,24-t riazanonacos-1-yl]-4-hydroxy-2-pyrrolidinyl)methyl ester
ttttgaaaccagtactttatc

SEQ ID NO: 2121 - RNA, 23 nt, synthetic construct
  source 1..23: mol_type = other RNA
  modified_base 1: mod_base = OTHER; note = 2'-O-methylguanosine-3'-phosphorothioate
  modified_base 2: mod_base = OTHER; note = 2'-deoxy-2'-fluoroadenosine-3'-phosphorothioate
  modified_base 3: mod_base = OTHER; note = 2'-O-methyluridine-3'-phosphate
  modified_base 4: mod_base = OTHER; note = 2'-O-methyladenosine-3'-phosphate
  modified_base 5: mod_base = OTHER; note = 2'-O-methyladenosine-3'-phosphate
  modified_base 6: mod_base = OTHER; note = 2'-deoxy-2'-fluoroadenosine-3'-phosphate
  modified_base 7: mod_base = OTHER; note = 2'-O-methylguanosine-3'-phosphate
  modified_base 8: mod_base = OTHER; note = 2'-deoxy-2'-fluorouridine-3'-phosphate
  modified_base 9: mod_base = OTHER; note = 2'-deoxy-2'-fluoroadenosine-3'-phosphate
  modified_base 10: mod_base = OTHER; note = 2'-O-methylcytidine-3'-phosphate
  modified_base 11: mod_base = OTHER; note = 2'-O-methyluridine-3'-phosphate
  modified_base 12: mod_base = OTHER; note = 2'-O-methylguanosine-3'-phosphate
  modified_base 13: mod_base = OTHER; note = 2'-O-methylguanosine-3'-phosphate
  modified_base 14: mod_base = OTHER; note = 2'-deoxy-2'-fluorouridine-3'-phosphate
  modified_base 15: mod_base = OTHER; note = 2'-O-methyluridine-3'-phosphate
  modified_base 16: mod_base = OTHER; note = 2'-deoxy-2'-fluorouridine-3'-phosphate
  modified_base 17: mod_base = OTHER; note = 2'-O-methylcytidine-3'-phosphate
  modified_base 18: mod_base = OTHER; note = 2'-O-methyladenosine-3'-phosphate
  modified_base 19: mod_base = OTHER; note = 2'-O-methyladenosine-3'-phosphate
  modified_base 20: mod_base = OTHER; note = 2'-O-methyladenosine-3'-phosphate
  modified_base 21: mod_base = OTHER; note = 2'-O-methyladenosine-3'-phosphorothioate
  modified_base 22: mod_base = OTHER; note = 2'-O-methyluridine-3'-phosphorothioate
  modified_base 23: mod_base = OTHER; note = 2'-O-methyluridine
gataaagtactggtttcaaaatt

SEQ ID NO: 2122 - RNA, 21 nt, synthetic construct
  source 1..21: mol_type = other RNA
  modified_base 1: mod_base = OTHER; note = 2'-O-methylguanosine-3'-phosphorothioate
  modified_base 2: mod_base = OTHER; note = 2'-O-methyladenosine-3'-phosphorothioate
  modified_base 3: mod_base = OTHER; note = 2'-O-methylguanosine-3'-phosphate
  modified_base 4: mod_base = OTHER; note = 2'-O-methyladenosine-3'-phosphate
  modified_base 5: mod_base = OTHER; note = 2'-O-methyladenosine-3'-phosphate
  modified_base 6: mod_base = OTHER; note = 2'-O-methylguanosine-3'-phosphate
  modified_base 7: mod_base = OTHER; note = 2'-deoxy-2'-fluoroadenosine-3'-phosphate
  modified_base 8: mod_base = OTHER; note = 2'-O-methyluridine-3'-phosphate
  modified_base 9: mod_base = OTHER; note = 2'-deoxy-2'-fluoroguanosine-3'-phosphate
  modified_base 10: mod_base = OTHER; note = 2'-deoxy-2'-fluoroguanosine-3'-phosphate
  modified_base 11: mod_base = OTHER; note = 2'-deoxy-2'-fluoroguanosine-3'-phosphate
  modified_base 12: mod_base = OTHER; note = 2'-O-methylcytidine-3'-phosphate
  modified_base 13: mod_base = OTHER; note = 2'-O-methyluridine-3'-phosphate
  modified_base 14: mod_base = OTHER; note = 2'-O-methyladenosine-3'-phosphate
  modified_base 15: mod_base = OTHER; note = 2'-O-methylcytidine-3'-phosphate
  modified_base 16: mod_base = OTHER; note = 2'-O-methyladenosine-3'-phosphate
  modified_base 17: mod_base = OTHER; note = 2'-O-methyladenosine-3'-phosphate
  modified_base 18: mod_base = OTHER; note = 2'-O-methylguanosine-3'-phosphate
  modified_base 19: mod_base = OTHER; note = 2'-O-methylguanosine-3'-phosphate
  modified_base 20: mod_base = OTHER; note = 2'-O-methylcytidine-3'-phosphate
  modified_base 21: mod_base = OTHER; note = 2'-O-methylcytidine-3'-phosphate ((2S,4R)-1-[29-[[2-(acetylamino)-2-deoxy-beta-D-galactopyra nosyl]oxy]-14,14-bis[[3-[[3-[[5-[[2-(acetylamino)-2-deoxy-b eta-D-galactopyranosyl]oxy]-1-oxopentyl]amino]propyl]amino] -3-oxopropoxy]methyl]-1,12,19,25-tetraoxo-16-oxa-13,20,24-t riazanonacos-1-yl]-4-hydroxy-2-pyrrolidinyl)methyl ester
gagaagatgggctacaaggcc

SEQ ID NO: 2123 - RNA, 23 nt, synthetic construct
  source 1..23: mol_type = other RNA
  modified_base 1: mod_base = OTHER; note = 2'-O-methylguanosine-3'-phosphorothioate
  modified_base 2: mod_base = OTHER; note = 2'-deoxy-2'-fluoroguanosine-3'-phosphorothioate
  modified_base 3: mod_base = OTHER; note = 2'-O-methylcytidine-3'-phosphate
  modified_base 4: mod_base = OTHER; note = 2'-O-methylcytidine-3'-phosphate
  modified_base 5: mod_base = OTHER; note = 2'-O-methyluridine-3'-phosphate
  modified_base 6: mod_base = OTHER; note = 2'-deoxy-2'-fluorouridine-3'-phosphate
  modified_base 7: mod_base = OTHER; note = 2'-O-methylguanosine-3'-phosphate
  modified_base 8: mod_base = OTHER; note = 2'-deoxy-2'-fluorouridine-3'-phosphate
  modified_base 9: mod_base = OTHER; note = 2'-deoxy-2'-fluoroadenosine-3'-phosphate
  modified_base 10: mod_base = OTHER; note = 2'-O-methylguanosine-3'-phosphate
  modified_base 11: mod_base = OTHER; note = 2'-O-methylcytidine-3'-phosphate
  modified_base 12: mod_base = OTHER; note = 2'-O-methylcytidine-3'-phosphate
  modified_base 13: mod_base = OTHER; note = 2'-O-methylcytidine-3'-phosphate
  modified_base 14: mod_base = OTHER; note = 2'-deoxy-2'-fluoroadenosine-3'-phosphate
  modified_base 15: mod_base = OTHER; note = 2'-O-methyluridine-3'-phosphate
  modified_base 16: mod_base = OTHER; note = 2'-deoxy-2'-fluorocytidine-3'-phosphate
  modified_base 17: mod_base = OTHER; note = 2'-O-methyluridine-3'-phosphate
  modified_base 18: mod_base = OTHER; note = 2'-O-methyluridine-3'-phosphate
  modified_base 19: mod_base = OTHER; note = 2'-O-methylcytidine-3'-phosphate
  modified_base 20: mod_base = OTHER; note = 2'-O-methyluridine-3'-phosphate
  modified_base 21: mod_base = OTHER; note = 2'-O-methylcytidine-3'-phosphorothioate
  modified_base 22: mod_base = OTHER; note = 2'-O-methyluridine-3'-phosphorothioate
  modified_base 23: mod_base = OTHER; note = 2'-O-methylguanosine
ggccttgtagcccatcttctctg

SEQ ID NO: 2124 - RNA, 21 nt, synthetic construct
  source 1..21: mol_type = other RNA
  modified_base 1: mod_base = OTHER; note = 2'-O-methyladenosine-3'-phosphorothioate
  modified_base 2: mod_base = OTHER; note = 2'-O-methylguanosine-3'-phosphorothioate
  modified_base 3: mod_base = OTHER; note = 2'-O-methyladenosine-3'-phosphate
  modified_base 4: mod_base = OTHER; note = 2'-O-methyladenosine-3'-phosphate
  modified_base 5: mod_base = OTHER; note = 2'-O-methylguanosine-3'-phosphate
  modified_base 6: mod_base = OTHER; note = 2'-O-methyladenosine-3'-phosphate
  modified_base 7: mod_base = OTHER; note = 2'-deoxy-2'-fluorouridine-3'-phosphate
  modified_base 8: mod_base = OTHER; note = 2'-O-methylguanosine-3'-phosphate
  modified_base 9: mod_base = OTHER; note = 2'-deoxy-2'-fluoroguanosine-3'-phosphate
  modified_base 10: mod_base = OTHER; note = 2'-deoxy-2'-fluoroguanosine-3'-phosphate
  modified_base 11: mod_base = OTHER; note = 2'-deoxy-2'-fluorocytidine-3'-phosphate
  modified_base 12: mod_base = OTHER; note = 2'-O-methyluridine-3'-phosphate
  modified_base 13: mod_base = OTHER; note = 2'-O-methyladenosine-3'-phosphate
  modified_base 14: mod_base = OTHER; note = 2'-O-methylcytidine-3'-phosphate
  modified_base 15: mod_base = OTHER; note = 2'-O-methyladenosine-3'-phosphate
  modified_base 16: mod_base = OTHER; note = 2'-O-methyladenosine-3'-phosphate
  modified_base 17: mod_base = OTHER; note = 2'-O-methylguanosine-3'-phosphate
  modified_base 18: mod_base = OTHER; note = 2'-O-methylguanosine-3'-phosphate
  modified_base 19: mod_base = OTHER; note = 2'-O-methylcytidine-3'-phosphate
  modified_base 20: mod_base = OTHER; note = 2'-O-methylcytidine-3'-phosphate
  modified_base 21: mod_base = OTHER; note = 2'-O-methyladenosine-3'-phosphate ((2S,4R)-1-[29-[[2-(acetylamino)-2-deoxy-beta-D-galactopyra nosyl]oxy]-14,14-bis[[3-[[3-[[5-[[2-(acetylamino)-2-deoxy-b eta-D-galactopyranosyl]oxy]-1-oxopentyl]amino]propyl]amino] -3-oxopropoxy]methyl]-1,12,19,25-tetraoxo-16-oxa-13,20,24-t riazanonacos-1-yl]-4-hydroxy-2-pyrrolidinyl)methyl ester
agaagatgggctacaaggcca

SEQ ID NO: 2125 - RNA, 23 nt, synthetic construct
  source 1..23: mol_type = other RNA
  modified_base 1: mod_base = OTHER; note = 2'-O-methyluridine-3'-phosphorothioate
  modified_base 2: mod_base = OTHER; note = 2'-deoxy-2'-fluoroguanosine-3'-phosphorothioate
  modified_base 3: mod_base = OTHER; note = 2'-O-methylguanosine-3'-phosphate
  modified_base 4: mod_base = OTHER; note = 2'-O-methylcytidine-3'-phosphate
  modified_base 5: mod_base = OTHER; note = 2'-O-methylcytidine-3'-phosphate
  modified_base 6: mod_base = OTHER; note = 2'-deoxy-2'-fluorouridine-3'-phosphate
  modified_base 7: mod_base = OTHER; note = 2'-O-methyluridine-3'-phosphate
  modified_base 8: mod_base = OTHER; note = 2'-deoxy-2'-fluoroguanosine-3'-phosphate
  modified_base 9: mod_base = OTHER; note = 2'-deoxy-2'-fluorouridine-3'-phosphate
  modified_base 10: mod_base = OTHER; note = 2'-O-methyladenosine-3'-phosphate
  modified_base 11: mod_base = OTHER; note = 2'-O-methylguanosine-3'-phosphate
  modified_base 12: mod_base = OTHER; note = 2'-O-methylcytidine-3'-phosphate
  modified_base 13: mod_base = OTHER; note = 2'-O-methylcytidine-3'-phosphate
  modified_base 14: mod_base = OTHER; note = 2'-deoxy-2'-fluorocytidine-3'-phosphate
  modified_base 15: mod_base = OTHER; note = 2'-O-methyladenosine-3'-phosphate
  modified_base 16: mod_base = OTHER; note = 2'-deoxy-2'-fluorouridine-3'-phosphate
  modified_base 17: mod_base = OTHER; note = 2'-O-methylcytidine-3'-phosphate
  modified_base 18: mod_base = OTHER; note = 2'-O-methyluridine-3'-phosphate
  modified_base 19: mod_base = OTHER; note = 2'-O-methyluridine-3'-phosphate
  modified_base 20: mod_base = OTHER; note = 2'-O-methylcytidine-3'-phosphate
  modified_base 21: mod_base = OTHER; note = 2'-O-methyluridine-3'-phosphorothioate
  modified_base 22: mod_base = OTHER; note = 2'-O-methylcytidine-3'-phosphorothioate
  modified_base 23: mod_base = OTHER; note = 2'-O-methyluridine
tggccttgtagcccatcttctct

SEQ ID NO: 2126 - RNA, 21 nt, synthetic construct
  source 1..21: mol_type = other RNA
  modified_base 1: mod_base = OTHER; note = 2'-O-methylguanosine-3'-phosphorothioate
  modified_base 2: mod_base = OTHER; note = 2'-O-methylguanosine-3'-phosphorothioate
  modified_base 3: mod_base = OTHER; note = 2'-O-methylcytidine-3'-phosphate
  modified_base 4: mod_base = OTHER; note = 2'-O-methyladenosine-3'-phosphate
  modified_base 5: mod_base = OTHER; note = 2'-O-methylguanosine-3'-phosphate
  modified_base 6: mod_base = OTHER; note = 2'-O-methyladenosine-3'-phosphate
  modified_base 7: mod_base = OTHER; note = 2'-deoxy-2'-fluoroguanosine-3'-phosphate
  modified_base 8: mod_base = OTHER; note = 2'-O-methyladenosine-3'-phosphate
  modified_base 9: mod_base = OTHER; note = 2'-deoxy-2'-fluoroadenosine-3'-phosphate
  modified_base 10: mod_base = OTHER; note = 2'-deoxy-2'-fluoroguanosine-3'-phosphate
  modified_base 11: mod_base = OTHER; note = 2'-deoxy-2'-fluoroadenosine-3'-phosphate
  modified_base 12: mod_base = OTHER; note = 2'-O-methyluridine-3'-phosphate
  modified_base 13: mod_base = OTHER; note = 2'-O-methylguanosine-3'-phosphate
  modified_base 14: mod_base = OTHER; note = 2'-O-methylguanosine-3'-phosphate
  modified_base 15: mod_base = OTHER; note = 2'-O-methylguanosine-3'-phosphate
  modified_base 16: mod_base = OTHER; note = 2'-O-methylcytidine-3'-phosphate
  modified_base 17: mod_base = OTHER; note = 2'-O-methyluridine-3'-phosphate
  modified_base 18: mod_base = OTHER; note = 2'-O-methyladenosine-3'-phosphate
  modified_base 19: mod_base = OTHER; note = 2'-O-methylcytidine-3'-phosphate
  modified_base 20: mod_base = OTHER; note = 2'-O-methyladenosine-3'-phosphate
  modified_base 21: mod_base = OTHER; note = 2'-O-methyladenosine-3'-phosphate ((2S,4R)-1-[29-[[2-(acetylamino)-2-deoxy-beta-D-galactopyra nosyl]oxy]-14,14-bis[[3-[[3-[[5-[[2-(acetylamino)-2-deoxy-b eta-D-galactopyranosyl]oxy]-1-oxopentyl]amino]propyl]amino] -3-oxopropoxy]methyl]-1,12,19,25-tetraoxo-16-oxa-13,20,24-t riazanonacos-1-yl]-4-hydroxy-2-pyrrolidinyl)methyl ester
ggcagagaagatgggctacaa

SEQ ID NO: 2127 - RNA, 23 nt, synthetic construct
  source 1..23: mol_type = other RNA
  modified_base 1: mod_base = OTHER; note = 2'-O-methyluridine-3'-phosphorothioate
  modified_base 2: mod_base = OTHER; note = 2'-deoxy-2'-fluorouridine-3'-phosphorothioate
  modified_base 3: mod_base = OTHER; note = 2'-O-methylguanosine-3'-phosphate
  modified_base 4: mod_base = OTHER; note = 2'-O-methyluridine-3'-phosphate
  modified_base 5: mod_base = OTHER; note = 2'-O-methyladenosine-3'-phosphate
  modified_base 6: mod_base = OTHER; note = 2'-deoxy-2'-fluoroguanosine-3'-phosphate
  modified_base 7: mod_base = OTHER; note = 2'-O-methylcytidine-3'-phosphate
  modified_base 8: mod_base = OTHER; note = 2'-deoxy-2'-fluorocytidine-3'-phosphate
  modified_base 9: mod_base = OTHER; note = 2'-deoxy-2'-fluorocytidine-3'-phosphate
  modified_base 10: mod_base = OTHER; note = 2'-O-methyladenosine-3'-phosphate
  modified_base 11: mod_base = OTHER; note = 2'-O-methyluridine-3'-phosphate
  modified_base 12: mod_base = OTHER; note = 2'-O-methylcytidine-3'-phosphate
  modified_base 13: mod_base = OTHER; note = 2'-O-methyluridine-3'-phosphate
  modified_base 14: mod_base = OTHER; note = 2'-deoxy-2'-fluorouridine-3'-phosphate
  modified_base 15: mod_base = OTHER; note = 2'-O-methylcytidine-3'-phosphate
  modified_base 16: mod_base = OTHER; note = 2'-deoxy-2'-fluorouridine-3'-phosphate
  modified_base 17: mod_base = OTHER; note = 2'-O-methylcytidine-3'-phosphate
  modified_base 18: mod_base = OTHER; note = 2'-O-methyluridine-3'-phosphate
  modified_base 19: mod_base = OTHER; note = 2'-O-methylguanosine-3'-phosphate
  modified_base 20: mod_base = OTHER; note = 2'-O-methylcytidine-3'-phosphate
  modified_base 21: mod_base = OTHER; note = 2'-O-methylcytidine-3'-phosphorothioate
  modified_base 22: mod_base = OTHER; note = 2'-O-methyluridine-3'-phosphorothioate
  modified_base 23: mod_base = OTHER; note = 2'-O-methylguanosine
ttgtagcccatcttctctgcctg

SEQ ID NO: 2128 - RNA, 21 nt, synthetic construct
  source 1..21: mol_type = other RNA
  modified_base 1: mod_base = OTHER; note = 2'-O-methyladenosine-3'-phosphorothioate
  modified_base 2: mod_base = OTHER; note = 2'-O-methylguanosine-3'-phosphorothioate
  modified_base 3: mod_base = OTHER; note = 2'-O-methylguanosine-3'-phosphate
  modified_base 4: mod_base = OTHER; note = 2'-O-methylcytidine-3'-phosphate
  modified_base 5: mod_base = OTHER; note = 2'-O-methyladenosine-3'-phosphate
  modified_base 6: mod_base = OTHER; note = 2'-O-methylguanosine-3'-phosphate
  modified_base 7: mod_base = OTHER; note = 2'-deoxy-2'-fluoroadenosine-3'-phosphate
  modified_base 8: mod_base = OTHER; note = 2'-O-methylguanosine-3'-phosphate
  modified_base 9: mod_base = OTHER; note = 2'-deoxy-2'-fluoroadenosine-3'-phosphate
  modified_base 10: mod_base = OTHER; note = 2'-deoxy-2'-fluoroadenosine-3'-phosphate
  modified_base 11: mod_base = OTHER; note = 2'-deoxy-2'-fluoroguanosine-3'-phosphate
  modified_base 12: mod_base = OTHER; note = 2'-O-methyladenosine-3'-phosphate
  modified_base 13: mod_base = OTHER; note = 2'-O-methyluridine-3'-phosphate
  modified_base 14: mod_base = OTHER; note = 2'-O-methylguanosine-3'-phosphate
  modified_base 15: mod_base = OTHER; note = 2'-O-methylguanosine-3'-phosphate
  modified_base 16: mod_base = OTHER; note = 2'-O-methylguanosine-3'-phosphate
  modified_base 17: mod_base = OTHER; note = 2'-O-methylcytidine-3'-phosphate
  modified_base 18: mod_base = OTHER; note = 2'-O-methyluridine-3'-phosphate
  modified_base 19: mod_base = OTHER; note = 2'-O-methyladenosine-3'-phosphate
  modified_base 20: mod_base = OTHER; note = 2'-O-methylcytidine-3'-phosphate
  modified_base 21: mod_base = OTHER; note = 2'-O-methyladenosine-3'-phosphate ((2S,4R)-1-[29-[[2-(acetylamino)-2-deoxy-beta-D-galactopyra nosyl]oxy]-14,14-bis[[3-[[3-[[5-[[2-(acetylamino)-2-deoxy-b eta-D-galactopyranosyl]oxy]-1-oxopentyl]amino]propyl]amino] -3-oxopropoxy]methyl]-1,12,19,25-tetraoxo-16-oxa-13,20,24-t riazanonacos-1-yl]-4-hydroxy-2-pyrrolidinyl)methyl ester
aggcagagaagatgggctaca

SEQ ID NO: 2129 - RNA, 23 nt, synthetic construct
  source 1..23: mol_type = other RNA
  modified_base 1: mod_base = OTHER; note = 2'-O-methyluridine-3'-phosphorothioate
  modified_base 2: mod_base = OTHER; note = 2'-deoxy-2'-fluoroguanosine-3'-phosphorothioate
  modified_base 3: mod_base = OTHER; note = 2'-O-methyluridine-3'-phosphate
  modified_base 4: mod_base = OTHER; note = 2'-O-methyladenosine-3'-phosphate
  modified_base 5: mod_base = OTHER; note = 2'-O-methylguanosine-3'-phosphate
  modified_base 6: mod_base = OTHER; note = 2'-deoxy-2'-fluorocytidine-3'-phosphate
  modified_base 7: mod_base = OTHER; note = 2'-O-methylcytidine-3'-phosphate
  modified_base 8: mod_base = OTHER; note = 2'-deoxy-2'-fluorocytidine-3'-phosphate
  modified_base 9: mod_base = OTHER; note = 2'-deoxy-2'-fluoroadenosine-3'-phosphate
  modified_base 10: mod_base = OTHER; note = 2'-O-methyluridine-3'-phosphate
  modified_base 11: mod_base = OTHER; note = 2'-O-methylcytidine-3'-phosphate
  modified_base 12: mod_base = OTHER; note = 2'-O-methyluridine-3'-phosphate
  modified_base 13: mod_base = OTHER; note = 2'-O-methyluridine-3'-phosphate
  modified_base 14: mod_base = OTHER; note = 2'-deoxy-2'-fluorocytidine-3'-phosphate
  modified_base 15: mod_base = OTHER; note = 2'-O-methyluridine-3'-phosphate
  modified_base 16: mod_base = OTHER; note = 2'-deoxy-2'-fluorocytidine-3'-phosphate
  modified_base 17: mod_base = OTHER; note = 2'-O-methyluridine-3'-phosphate
  modified_base 18: mod_base = OTHER; note = 2'-O-methylguanosine-3'-phosphate
  modified_base 19: mod_base = OTHER; note = 2'-O-methylcytidine-3'-phosphate
  modified_base 20: mod_base = OTHER; note = 2'-O-methylcytidine-3'-phosphate
  modified_base 21: mod_base = OTHER; note = 2'-O-methyluridine-3'-phosphorothioate
  modified_base 22: mod_base = OTHER; note = 2'-O-methylguanosine-3'-phosphorothioate
  modified_base 23: mod_base = OTHER; note = 2'-O-methylcytidine
tgtagcccatcttctctgcctgc

SEQ ID NO: 2130 - RNA, 21 nt, synthetic construct
  source 1..21: mol_type = other RNA
  modified_base 1: mod_base = OTHER; note = 2'-O-methyladenosine-3'-phosphorothioate
  modified_base 2: mod_base = OTHER; note = 2'-O-methyladenosine-3'-phosphorothioate
  modified_base 3: mod_base = OTHER; note = 2'-O-methylcytidine-3'-phosphate
  modified_base 4: mod_base = OTHER; note = 2'-O-methylguanosine-3'-phosphate
  modified_base 5: mod_base = OTHER; note = 2'-O-methylguanosine-3'-phosphate
  modified_base 6: mod_base = OTHER; note = 2'-O-methylguanosine-3'-phosphate
  modified_base 7: mod_base = OTHER; note = 2'-deoxy-2'-fluorocytidine-3'-phosphate
  modified_base 8: mod_base = OTHER; note = 2'-O-methyladenosine-3'-phosphate
  modified_base 9: mod_base = OTHER; note = 2'-deoxy-2'-fluorouridine-3'-phosphate
  modified_base 10: mod_base = OTHER; note = 2'-deoxy-2'-fluoroguanosine-3'-phosphate
  modified_base 11: mod_base = OTHER; note = 2'-deoxy-2'-fluoroadenosine-3'-phosphate
  modified_base 12: mod_base = OTHER; note = 2'-O-methyluridine-3'-phosphate
  modified_base 13: mod_base = OTHER; note = 2'-O-methylguanosine-3'-phosphate
  modified_base 14: mod_base = OTHER; note = 2'-O-methyluridine-3'-phosphate
  modified_base 15: mod_base = OTHER; note = 2'-O-methyluridine-3'-phosphate
  modified_base 16: mod_base = OTHER; note = 2'-O-methylguanosine-3'-phosphate
  modified_base 17: mod_base = OTHER; note = 2'-O-methyladenosine-3'-phosphate
  modified_base 18: mod_base = OTHER; note = 2'-O-methylguanosine-3'-phosphate
  modified_base 19: mod_base = OTHER; note = 2'-O-methyluridine-3'-phosphate
  modified_base 20: mod_base = OTHER; note = 2'-O-methyluridine-3'-phosphate
  modified_base 21: mod_base = OTHER; note = 2'-O-methylcytidine-3'-phosphate ((2S,4R)-1-[29-[[2-(acetylamino)-2-deoxy-beta-D-galactopyra nosyl]oxy]-14,14-bis[[3-[[3-[[5-[[2-(acetylamino)-2-deoxy-b eta-D-galactopyranosyl]oxy]-1-oxopentyl]amino]propyl]amino] -3-oxopropoxy]methyl]-1,12,19,25-tetraoxo-16-oxa-13,20,24-t riazanonacos-1-yl]-4-hydroxy-2-pyrrolidinyl)methyl ester
aacgggcatgatgttgagttc

SEQ ID NO: 2131 - RNA, 23 nt, synthetic construct
  source 1..23: mol_type = other RNA
  modified_base 1: mod_base = OTHER; note = 2'-O-methylguanosine-3'-phosphorothioate
  modified_base 2: mod_base = OTHER; note = 2'-deoxy-2'-fluoroadenosine-3'-phosphorothioate
  modified_base 3: mod_base = OTHER; note = 2'-O-methyladenosine-3'-phosphate
  modified_base 4: mod_base = OTHER; note = 2'-O-methylcytidine-3'-phosphate
  modified_base 5: mod_base = OTHER; note = 2'-O-methyluridine-3'-phosphate
  modified_base 6: mod_base = OTHER; note = 2'-deoxy-2'-fluorocytidine-3'-phosphate
  modified_base 7: mod_base = OTHER; note = 2'-O-methyladenosine-3'-phosphate
  modified_base 8: mod_base = OTHER; note = 2'-deoxy-2'-fluoroadenosine-3'-phosphate
  modified_base 9: mod_base = OTHER; note = 2'-deoxy-2'-fluorocytidine-3'-phosphate
  modified_base 10: mod_base = OTHER; note = 2'-O-methyladenosine-3'-phosphate
  modified_base 11: mod_base = OTHER; note = 2'-O-methyluridine-3'-phosphate
  modified_base 12: mod_base = OTHER; note = 2'-O-methylcytidine-3'-phosphate
  modified_base 13: mod_base = OTHER; note = 2'-O-methyladenosine-3'-phosphate
  modified_base 14: mod_base = OTHER; note = 2'-deoxy-2'-fluorouridine-3'-phosphate
  modified_base 15: mod_base = OTHER; note = 2'-O-methylguanosine-3'-phosphate
  modified_base 16: mod_base = OTHER; note = 2'-deoxy-2'-fluorocytidine-3'-phosphate
  modified_base 17: mod_base = OTHER; note = 2'-O-methylcytidine-3'-phosphate
  modified_base 18: mod_base = OTHER; note = 2'-O-methylcytidine-3'-phosphate
  modified_base 19: mod_base = OTHER; note = 2'-O-methylguanosine-3'-phosphate
  modified_base 20: mod_base = OTHER; note = 2'-O-methyluridine-3'-phosphate
  modified_base 21: mod_base = OTHER; note = 2'-O-methyluridine-3'-phosphorothioate
  modified_base 22: mod_base = OTHER; note = 2'-O-methylcytidine-3'-phosphorothioate
  modified_base 23: mod_base = OTHER; note = 2'-O-methylcytidine
gaactcaacatcatgcccgttcc

SEQ ID NO: 2132 - RNA, 21 nt, synthetic construct
  source 1..21: mol_type = other RNA
  modified_base 1: mod_base = OTHER; note = 2'-O-methyladenosine-3'-phosphorothioate
  modified_base 2: mod_base = OTHER; note = 2'-O-methylcytidine-3'-phosphorothioate
  modified_base 3: mod_base = OTHER; note = 2'-O-methylguanosine-3'-phosphate
  modified_base 4: mod_base = OTHER; note = 2'-O-methylguanosine-3'-phosphate
  modified_base 5: mod_base = OTHER; note = 2'-O-methylguanosine-3'-phosphate
  modified_base 6: mod_base = OTHER; note = 2'-O-methylcytidine-3'-phosphate
  modified_base 7: mod_base = OTHER; note = 2'-deoxy-2'-fluoroadenosine-3'-phosphate
  modified_base 8: mod_base = OTHER; note = 2'-O-methyluridine-3'-phosphate
  modified_base 9: mod_base = OTHER; note = 2'-deoxy-2'-fluoroguanosine-3'-phosphate
  modified_base 10: mod_base = OTHER; note = 2'-deoxy-2'-fluoroadenosine-3'-phosphate
  modified_base 11: mod_base = OTHER; note = 2'-deoxy-2'-fluorouridine-3'-phosphate
  modified_base 12: mod_base = OTHER; note = 2'-O-methylguanosine-3'-phosphate
  modified_base 13: mod_base = OTHER; note = 2'-O-methyluridine-3'-phosphate
  modified_base 14: mod_base = OTHER; note = 2'-O-methyluridine-3'-phosphate
  modified_base 15: mod_base = OTHER; note = 2'-O-methylguanosine-3'-phosphate
  modified_base 16: mod_base = OTHER; note = 2'-O-methyladenosine-3'-phosphate
  modified_base 17: mod_base = OTHER; note = 2'-O-methylguanosine-3'-phosphate
  modified_base 18: mod_base = OTHER; note = 2'-O-methyluridine-3'-phosphate
  modified_base 19: mod_base = OTHER; note = 2'-O-methyluridine-3'-phosphate
  modified_base 20: mod_base = OTHER; note = 2'-O-methylcytidine-3'-phosphate
  modified_base 21: mod_base = OTHER; note = 2'-O-methylcytidine-3'-phosphate ((2S,4R)-1-[29-[[2-(acetylamino)-2-deoxy-beta-D-galactopyra nosyl]oxy]-14,14-bis[[3-[[3-[[5-[[2-(acetylamino)-2-deoxy-b eta-D-galactopyranosyl]oxy]-1-oxopentyl]amino]propyl]amino] -3-oxopropoxy]methyl]-1,12,19,25-tetraoxo-16-oxa-13,20,24-t riazanonacos-1-yl]-4-hydroxy-2-pyrrolidinyl)methyl ester
acgggcatgatgttgagttcc

SEQ ID NO: 2133 - RNA, 23 nt, synthetic construct
  source 1..23: mol_type = other RNA
  modified_base 1: mod_base = OTHER; note = 2'-O-methylguanosine-3'-phosphorothioate
  modified_base 2: mod_base = OTHER; note = 2'-deoxy-2'-fluoroguanosine-3'-phosphorothioate
  modified_base 3: mod_base = OTHER; note = 2'-O-methyladenosine-3'-phosphate
  modified_base 4: mod_base = OTHER; note = 2'-O-methyladenosine-3'-phosphate
  modified_base 5: mod_base = OTHER; note = 2'-O-methylcytidine-3'-phosphate
  modified_base 6: mod_base = OTHER; note = 2'-deoxy-2'-fluorouridine-3'-phosphate
  modified_base 7: mod_base = OTHER; note = 2'-O-methylcytidine-3'-phosphate
  modified_base 8: mod_base = OTHER; note = 2'-deoxy-2'-fluoroadenosine-3'-phosphate
  modified_base 9: mod_base = OTHER; note = 2'-deoxy-2'-fluoroadenosine-3'-phosphate
  modified_base 10: mod_base = OTHER; note = 2'-O-methylcytidine-3'-phosphate
  modified_base 11: mod_base = OTHER; note = 2'-O-methyladenosine-3'-phosphate
  modified_base 12: mod_base = OTHER; note = 2'-O-methyluridine-3'-phosphate
  modified_base 13: mod_base = OTHER; note = 2'-O-methylcytidine-3'-phosphate
  modified_base 14: mod_base = OTHER; note = 2'-deoxy-2'-fluoroadenosine-3'-phosphate
  modified_base 15: mod_base = OTHER; note = 2'-O-methyluridine-3'-phosphate
  modified_base 16: mod_base = OTHER; note = 2'-deoxy-2'-fluoroguanosine-3'-phosphate
  modified_base 17: mod_base = OTHER; note = 2'-O-methylcytidine-3'-phosphate
  modified_base 18: mod_base = OTHER; note = 2'-O-methylcytidine-3'-phosphate
  modified_base 19: mod_base = OTHER; note = 2'-O-methylcytidine-3'-phosphate
  modified_base 20: mod_base = OTHER; note = 2'-O-methylguanosine-3'-phosphate
  modified_base 21: mod_base = OTHER; note = 2'-O-methyluridine-3'-phosphorothioate
  modified_base 22: mod_base = OTHER; note = 2'-O-methyluridine-3'-phosphorothioate
  modified_base 23: mod_base = OTHER; note = 2'-O-methylcytidine
ggaactcaacatcatgcccgttc

SEQ ID NO: 2134 - RNA, 21 nt, synthetic construct
  source 1..21: mol_type = other RNA
  modified_base 1: mod_base = OTHER; note = 2'-O-methyluridine-3'-phosphorothioate
  modified_base 2: mod_base = OTHER; note = 2'-O-methylguanosine-3'-phosphorothioate
  modified_base 3: mod_base = OTHER; note = 2'-O-methylguanosine-3'-phosphate
  modified_base 4: mod_base = OTHER; note = 2'-O-methylguanosine-3'-phosphate
  modified_base 5: mod_base = OTHER; note = 2'-O-methyladenosine-3'-phosphate
  modified_base 6: mod_base = OTHER; note = 2'-O-methyladenosine-3'-phosphate
  modified_base 7: mod_base = OTHER; note = 2'-deoxy-2'-fluorocytidine-3'-phosphate
  modified_base 8: mod_base = OTHER; note = 2'-O-methylguanosine-3'-phosphate
  modified_base 9: mod_base = OTHER; note = 2'-deoxy-2'-fluoroguanosine-3'-phosphate
  modified_base 10: mod_base = OTHER; note = 2'-deoxy-2'-fluoroguanosine-3'-phosphate
  modified_base 11: mod_base = OTHER; note = 2'-deoxy-2'-fluorocytidine-3'-phosphate
  modified_base 12: mod_base = OTHER; note = 2'-O-methyladenosine-3'-phosphate
  modified_base 13: mod_base = OTHER; note = 2'-O-methyluridine-3'-phosphate
  modified_base 14: mod_base = OTHER; note = 2'-O-methylguanosine-3'-phosphate
  modified_base 15: mod_base = OTHER; note = 2'-O-methyladenosine-3'-phosphate
  modified_base 16: mod_base = OTHER; note = 2'-O-methyluridine-3'-phosphate
  modified_base 17: mod_base = OTHER; note = 2'-O-methylguanosine-3'-phosphate
  modified_base 18: mod_base = OTHER; note = 2'-O-methyluridine-3'-phosphate
  modified_base 19: mod_base = OTHER; note = 2'-O-methyluridine-3'-phosphate
  modified_base 20: mod_base = OTHER; note = 2'-O-methylguanosine-3'-phosphate
  modified_base 21: mod_base = OTHER; note = 2'-O-methyladenosine-3'-phosphate ((2S,4R)-1-[29-[[2-(acetylamino)-2-deoxy-beta-D-galactopyra nosyl]oxy]-14,14-bis[[3-[[3-[[5-[[2-(acetylamino)-2-deoxy-b eta-D-galactopyranosyl]oxy]-1-oxopentyl]amino]propyl]amino] -3-oxopropoxy]methyl]-1,12,19,25-tetraoxo-16-oxa-13,20,24-t riazanonacos-1-yl]-4-hydroxy-2-pyrrolidinyl)methyl ester
tgggaacgggcatgatgttga

SEQ ID NO: 2135 - RNA, 23 nt, synthetic construct
  source 1..23: mol_type = other RNA
  modified_base 1: mod_base = OTHER; note = 2'-O-methyluridine-3'-phosphorothioate
  modified_base 2: mod_base = OTHER; note = 2'-deoxy-2'-fluorocytidine-3'-phosphorothioate
  modified_base 3: mod_base = OTHER; note = 2'-O-methyladenosine-3'-phosphate
  modified_base 4: mod_base = OTHER; note = 2'-O-methyladenosine-3'-phosphate
  modified_base 5: mod_base = OTHER; note = 2'-O-methylcytidine-3'-phosphate
  modified_base 6: mod_base = OTHER; note = 2'-deoxy-2'-fluoroadenosine-3'-phosphate
  modified_base 7: mod_base = OTHER; note = 2'-O-methyluridine-3'-phosphate
  modified_base 8: mod_base = OTHER; note = 2'-deoxy-2'-fluorocytidine-3'-phosphate
  modified_base 9: mod_base = OTHER; note = 2'-deoxy-2'-fluoroadenosine-3'-phosphate
  modified_base 10: mod_base = OTHER; note = 2'-O-methyluridine-3'-phosphate
  modified_base 11: mod_base = OTHER; note = 2'-O-methylguanosine-3'-phosphate
  modified_base 12: mod_base = OTHER; note = 2'-O-methylcytidine-3'-phosphate
  modified_base 13: mod_base = OTHER; note = 2'-O-methylcytidine-3'-phosphate
  modified_base 14: mod_base = OTHER; note = 2'-deoxy-2'-fluorocytidine-3'-phosphate
  modified_base 15: mod_base = OTHER; note = 2'-O-methylguanosine-3'-phosphate
  modified_base 16: mod_base = OTHER; note = 2'-deoxy-2'-fluorouridine-3'-phosphate
  modified_base 17: mod_base = OTHER; note = 2'-O-methyluridine-3'-phosphate
  modified_base 18: mod_base = OTHER; note = 2'-O-methylcytidine-3'-phosphate
  modified_base 19: mod_base = OTHER; note = 2'-O-methylcytidine-3'-phosphate
  modified_base 20: mod_base = OTHER; note = 2'-O-methylcytidine-3'-phosphate
  modified_base 21: mod_base = OTHER; note = 2'-O-methyladenosine-3'-phosphorothioate
  modified_base 22: mod_base = OTHER; note = 2'-O-methylguanosine-3'-phosphorothioate
  modified_base 23: mod_base = OTHER; note = 2'-O-methylguanosine
tcaacatcatgcccgttcccagg

SEQ ID NO: 2136 - RNA, 21 nt, synthetic construct
  source 1..21: mol_type = other RNA
  modified_base 1: mod_base = OTHER; note = 2'-O-methylcytidine-3'-phosphorothioate
  modified_base 2: mod_base = OTHER; note = 2'-O-methyluridine-3'-phosphorothioate
  modified_base 3: mod_base = OTHER; note = 2'-O-methylguanosine-3'-phosphate
  modified_base 4: mod_base = OTHER; note = 2'-O-methylguanosine-3'-phosphate
  modified_base 5: mod_base = OTHER; note = 2'-O-methylguanosine-3'-phosphate
  modified_base 6: mod_base = OTHER; note = 2'-O-methyladenosine-3'-phosphate
  modified_base 7: mod_base = OTHER; note = 2'-deoxy-2'-fluoroadenosine-3'-phosphate
  modified_base 8: mod_base = OTHER; note = 2'-O-methylcytidine-3'-phosphate
  modified_base 9: mod_base = OTHER; note = 2'-deoxy-2'-fluoroguanosine-3'-phosphate
  modified_base 10: mod_base = OTHER; note = 2'-deoxy-2'-fluoroguanosine-3'-phosphate
  modified_base 11: mod_base = OTHER; note = 2'-deoxy-2'-fluoroguanosine-3'-phosphate
  modified_base 12: mod_base = OTHER; note = 2'-O-methylcytidine-3'-phosphate
  modified_base 13: mod_base = OTHER; note = 2'-O-methyladenosine-3'-phosphate
  modified_base 14: mod_base = OTHER; note = 2'-O-methyluridine-3'-phosphate
  modified_base 15: mod_base = OTHER; note = 2'-O-methylguanosine-3'-phosphate
  modified_base 16: mod_base = OTHER; note = 2'-O-methyladenosine-3'-phosphate
  modified_base 17: mod_base = OTHER; note = 2'-O-methyluridine-3'-phosphate
  modified_base 18: mod_base = OTHER; note = 2'-O-methylguanosine-3'-phosphate
  modified_base 19: mod_base = OTHER; note = 2'-O-methyluridine-3'-phosphate
  modified_base 20: mod_base = OTHER; note = 2'-O-methyluridine-3'-phosphate
  modified_base 21: mod_base = OTHER; note = 2'-O-methylguanosine-3'-phosphate ((2S,4R)-1-[29-[[2-(acetylamino)-2-deoxy-beta-D-galactopyra nosyl]oxy]-14,14-bis[[3-[[3-[[5-[[2-(acetylamino)-2-deoxy-b eta-D-galactopyranosyl]oxy]-1-oxopentyl]amino]propyl]amino] -3-oxopropoxy]methyl]-1,12,19,25-tetraoxo-16-oxa-13,20,24-t riazanonacos-1-yl]-4-hydroxy-2-pyrrolidinyl)methyl ester
ctgggaacgggcatgatgttg

SEQ ID NO: 2137 - RNA, 23 nt, synthetic construct
  source 1..23: mol_type = other RNA
  modified_base 1: mod_base = OTHER; note = 2'-O-methylcytidine-3'-phosphorothioate
  modified_base 2: mod_base = OTHER; note = 2'-deoxy-2'-fluoroadenosine-3'-phosphorothioate
  modified_base 3: mod_base = OTHER; note = 2'-O-methyladenosine-3'-phosphate
  modified_base 4: mod_base = OTHER; note = 2'-O-methylcytidine-3'-phosphate
  modified_base 5: mod_base = OTHER; note = 2'-O-methyladenosine-3'-phosphate
  modified_base 6: mod_base = OTHER; note = 2'-deoxy-2'-fluorouridine-3'-phosphate
  modified_base 7: mod_base = OTHER; note = 2'-O-methylcytidine-3'-phosphate
  modified_base 8: mod_base = OTHER; note = 2'-deoxy-2'-fluoroadenosine-3'-phosphate
  modified_base 9: mod_base = OTHER; note = 2'-deoxy-2'-fluorouridine-3'-phosphate
  modified_base 10: mod_base = OTHER; note = 2'-O-methylguanosine-3'-phosphate
  modified_base 11: mod_base = OTHER; note = 2'-O-methylcytidine-3'-phosphate
  modified_base 12: mod_base = OTHER; note = 2'-O-methylcytidine-3'-phosphate
  modified_base 13: mod_base = OTHER; note = 2'-O-methylcytidine-3'-phosphate
  modified_base 14: mod_base = OTHER; note = 2'-deoxy-2'-fluoroguanosine-3'-phosphate
  modified_base 15: mod_base = OTHER; note = 2'-O-methyluridine-3'-phosphate
  modified_base 16: mod_base = OTHER; note = 2'-deoxy-2'-fluorouridine-3'-phosphate
  modified_base 17: mod_base = OTHER; note = 2'-O-methylcytidine-3'-phosphate
  modified_base 18: mod_base = OTHER; note = 2'-O-methylcytidine-3'-phosphate
  modified_base 19: mod_base = OTHER; note = 2'-O-methylcytidine-3'-phosphate
  modified_base 20: mod_base = OTHER; note = 2'-O-methyladenosine-3'-phosphate
  modified_base 21: mod_base = OTHER; note = 2'-O-methylguanosine-3'-phosphorothioate
  modified_base 22: mod_base = OTHER; note = 2'-O-methylguanosine-3'-phosphorothioate
  modified_base 23: mod_base = OTHER; note = 2'-O-methylguanosine
caacatcatgcccgttcccaggg

SEQ ID NO: 2138 - RNA, 21 nt, synthetic construct
  source 1..21: mol_type = other RNA
  modified_base 1: mod_base = OTHER; note = 2'-O-methyladenosine-3'-phosphorothioate
  modified_base 2: mod_base = OTHER; note = 2'-O-methyluridine-3'-phosphorothioate
  modified_base 3: mod_base = OTHER; note = 2'-O-methylguanosine-3'-phosphate
  modified_base 4: mod_base = OTHER; note = 2'-O-methyluridine-3'-phosphate
  modified_base 5: mod_base = OTHER; note = 2'-O-methylguanosine-3'-phosphate
  modified_base 6: mod_base = OTHER; note = 2'-O-methylguanosine-3'-phosphate
  modified_base 7: mod_base = OTHER; note = 2'-deoxy-2'-fluorocytidine-3'-phosphate
  modified_base 8: mod_base = OTHER; note = 2'-O-methyluridine-3'-phosphate
  modified_base 9: mod_base = OTHER; note = 2'-deoxy-2'-fluoroadenosine-3'-phosphate
  modified_base 10: mod_base = OTHER; note = 2'-deoxy-2'-fluoroadenosine-3'-phosphate
  modified_base 11: mod_base = OTHER; note = 2'-deoxy-2'-fluoroadenosine-3'-phosphate
  modified_base 12: mod_base = OTHER; note = 2'-O-methylguanosine-3'-phosphate
  modified_base 13: mod_base = OTHER; note = 2'-O-methylcytidine-3'-phosphate
  modified_base 14: mod_base = OTHER; note = 2'-O-methyladenosine-3'-phosphate
  modified_base 15: mod_base = OTHER; note = 2'-O-methyladenosine-3'-phosphate
  modified_base 16: mod_base = OTHER; note = 2'-O-methyluridine-3'-phosphate
  modified_base 17: mod_base = OTHER; note = 2'-O-methyladenosine-3'-phosphate
  modified_base 18: mod_base = OTHER; note = 2'-O-methylguanosine-3'-phosphate
  modified_base 19: mod_base = OTHER; note = 2'-O-methyladenosine-3'-phosphate
  modified_base 20: mod_base = OTHER; note = 2'-O-methylcytidine-3'-phosphate
  modified_base 21: mod_base = OTHER; note = 2'-O-methylcytidine-3'-phosphate ((2S,4R)-1-[29-[[2-(acetylamino)-2-deoxy-beta-D-galactopyra nosyl]oxy]-14,14-bis[[3-[[3-[[5-[[2-(acetylamino)-2-deoxy-b eta-D-galactopyranosyl]oxy]-1-oxopentyl]amino]propyl]amino] -3-oxopropoxy]methyl]-1,12,19,25-tetraoxo-16-oxa-13,20,24-t riazanonacos-1-yl]-4-hydroxy-2-pyrrolidinyl)methyl ester
atgtggctaaagcaatagacc

SEQ ID NO: 2139 - RNA, 23 nt, synthetic construct
  source 1..23: mol_type = other RNA
  modified_base 1: mod_base = OTHER; note = 2'-O-methylguanosine-3'-phosphorothioate
  modified_base 2: mod_base = OTHER; note = 2'-deoxy-2'-fluoroguanosine-3'-phosphorothioate
  modified_base 3: mod_base = OTHER; note = 2'-O-methyluridine-3'-phosphate
  modified_base 4: mod_base = OTHER; note = 2'-O-methylcytidine-3'-phosphate
  modified_base 5: mod_base = OTHER; note = 2'-O-methyluridine-3'-phosphate
  modified_base 6: mod_base = OTHER; note = 2'-deoxy-2'-fluoroadenosine-3'-phosphate
  modified_base 7: mod_base = OTHER; note = 2'-O-methyluridine-3'-phosphate
  modified_base 8: mod_base = OTHER; note = 2'-deoxy-2'-fluorouridine-3'-phosphate
  modified_base 9: mod_base = OTHER; note = 2'-deoxy-2'-fluoroguanosine-3'-phosphate
  modified_base 10: mod_base = OTHER; note = 2'-O-methylcytidine-3'-phosphate
  modified_base 11: mod_base = OTHER; note = 2'-O-methyluridine-3'-phosphate
  modified_base 12: mod_base = OTHER; note = 2'-O-methyluridine-3'-phosphate
  modified_base 13: mod_base = OTHER; note = 2'-O-methyluridine-3'-phosphate
  modified_base 14: mod_base = OTHER; note = 2'-deoxy-2'-fluoroadenosine-3'-phosphate
  modified_base 15: mod_base = OTHER; note = 2'-O-methylguanosine-3'-phosphate
  modified_base 16: mod_base = OTHER; note = 2'-deoxy-2'-fluorocytidine-3'-phosphate
  modified_base 17: mod_base = OTHER; note = 2'-O-methylcytidine-3'-phosphate
  modified_base 18: mod_base = OTHER; note = 2'-O-methyladenosine-3'-phosphate
  modified_base 19: mod_base = OTHER; note = 2'-O-methylcytidine-3'-phosphate
  modified_base 20: mod_base = OTHER; note = 2'-O-methyladenosine-3'-phosphate
  modified_base 21: mod_base = OTHER; note = 2'-O-methyluridine-3'-phosphorothioate
  modified_base 22: mod_base = OTHER; note = 2'-O-methyladenosine-3'-phosphorothioate
  modified_base 23: mod_base = OTHER; note = 2'-O-methyluridine
ggtctattgctttagccacatat

SEQ ID NO: 2140 - RNA, 21 nt, synthetic construct
  source 1..21: mol_type = other RNA
  modified_base 1: mod_base = OTHER; note = 2'-O-methyluridine-3'-phosphorothioate
  modified_base 2: mod_base = OTHER; note = 2'-O-methylguanosine-3'-phosphorothioate
  modified_base 3: mod_base = OTHER; note = 2'-O-methyluridine-3'-phosphate
  modified_base 4: mod_base = OTHER; note = 2'-O-methylguanosine-3'-phosphate
  modified_base 5: mod_base = OTHER; note = 2'-O-methylguanosine-3'-phosphate
  modified_base 6: mod_base = OTHER; note = 2'-O-methylcytidine-3'-phosphate
  modified_base 7: mod_base = OTHER; note = 2'-deoxy-2'-fluorouridine-3'-phosphate
  modified_base 8: mod_base = OTHER; note = 2'-O-methyladenosine-3'-phosphate
  modified_base 9: mod_base = OTHER; note = 2'-deoxy-2'-fluoroadenosine-3'-phosphate
  modified_base 10: mod_base = OTHER; note = 2'-deoxy-2'-fluoroadenosine-3'-phosphate
  modified_base 11: mod_base = OTHER; note = 2'-deoxy-2'-fluoroguanosine-3'-phosphate
  modified_base 12: mod_base = OTHER; note = 2'-O-methylcytidine-3'-phosphate
  modified_base 13: mod_base = OTHER; note = 2'-O-methyladenosine-3'-phosphate
  modified_base 14: mod_base = OTHER; note = 2'-O-methyladenosine-3'-phosphate
  modified_base 15: mod_base = OTHER; note = 2'-O-methyluridine-3'-phosphate
  modified_base 16: mod_base = OTHER; note = 2'-O-methyladenosine-3'-phosphate
  modified_base 17: mod_base = OTHER; note = 2'-O-methylguanosine-3'-phosphate
  modified_base 18: mod_base = OTHER; note = 2'-O-methyladenosine-3'-phosphate
  modified_base 19: mod_base = OTHER; note = 2'-O-methylcytidine-3'-phosphate
  modified_base 20: mod_base = OTHER; note = 2'-O-methylcytidine-3'-phosphate
  modified_base 21: mod_base = OTHER; note = 2'-O-methylcytidine-3'-phosphate ((2S,4R)-1-[29-[[2-(acetylamino)-2-deoxy-beta-D-galactopyra nosyl]oxy]-14,14-bis[[3-[[3-[[5-[[2-(acetylamino)-2-deoxy-b eta-D-galactopyranosyl]oxy]-1-oxopentyl]amino]propyl]amino] -3-oxopropoxy]methyl]-1,12,19,25-tetraoxo-16-oxa-13,20,24-t riazanonacos-1-yl]-4-hydroxy-2-pyrrolidinyl)methyl ester
tgtggctaaagcaatagaccc

SEQ ID NO: 2141 - RNA, 23 nt, synthetic construct
  source 1..23: mol_type = other RNA
  modified_base 1: mod_base = OTHER; note = 2'-O-methylguanosine-3'-phosphorothioate
  modified_base 2: mod_base = OTHER; note = 2'-deoxy-2'-fluoroguanosine-3'-phosphorothioate
  modified_base 3: mod_base = OTHER; note = 2'-O-methylguanosine-3'-phosphate
  modified_base 4: mod_base = OTHER; note = 2'-O-methyluridine-3'-phosphate
  modified_base 5: mod_base = OTHER; note = 2'-O-methylcytidine-3'-phosphate
  modified_base 6: mod_base = OTHER; note = 2'-deoxy-2'-fluorouridine-3'-phosphate
  modified_base 7: mod_base = OTHER; note = 2'-O-methyladenosine-3'-phosphate
  modified_base 8: mod_base = OTHER; note = 2'-deoxy-2'-fluorouridine-3'-phosphate
  modified_base 9: mod_base = OTHER; note = 2'-deoxy-2'-fluorouridine-3'-phosphate
  modified_base 10: mod_base = OTHER; note = 2'-O-methylguanosine-3'-phosphate
  modified_base 11: mod_base = OTHER; note = 2'-O-methylcytidine-3'-phosphate
  modified_base 12: mod_base = OTHER; note = 2'-O-methyluridine-3'-phosphate
  modified_base 13: mod_base = OTHER; note = 2'-O-methyluridine-3'-phosphate
  modified_base 14: mod_base = OTHER; note = 2'-deoxy-2'-fluorouridine-3'-phosphate
  modified_base 15: mod_base = OTHER; note = 2'-O-methyladenosine-3'-phosphate
  modified_base 16: mod_base = OTHER; note = 2'-deoxy-2'-fluoroguanosine-3'-phosphate
  modified_base 17: mod_base = OTHER; note = 2'-O-methylcytidine-3'-phosphate
  modified_base 18: mod_base = OTHER; note = 2'-O-methylcytidine-3'-phosphate
  modified_base 19: mod_base = OTHER; note = 2'-O-methyladenosine-3'-phosphate
  modified_base 20: mod_base = OTHER; note = 2'-O-methylcytidine-3'-phosphate
  modified_base 21: mod_base = OTHER; note = 2'-O-methyladenosine-3'-phosphorothioate
  modified_base 22: mod_base = OTHER; note = 2'-O-methyluridine-3'-phosphorothioate
  modified_base 23: mod_base = OTHER; note = 2'-O-methyladenosine
gggtctattgctttagccacata

SEQ ID NO: 2142 - RNA, 21 nt, synthetic construct
  source 1..21: mol_type = other RNA
  modified_base 1: mod_base = OTHER; note = 2'-O-methylguanosine-3'-phosphorothioate
  modified_base 2: mod_base = OTHER; note = 2'-O-methylcytidine-3'-phosphorothioate
  modified_base 3: mod_base = OTHER; note = 2'-O-methyladenosine-3'-phosphate
  modified_base 4: mod_base = OTHER; note = 2'-O-methyluridine-3'-phosphate
  modified_base 5: mod_base = OTHER; note = 2'-O-methyladenosine-3'-phosphate
  modified_base 6: mod_base = OTHER; note = 2'-O-methyluridine-3'-phosphate
  modified_base 7: mod_base = OTHER; note = 2'-deoxy-2'-fluoroguanosine-3'-phosphate
  modified_base 8: mod_base = OTHER; note = 2'-O-methyluridine-3'-phosphate
  modified_base 9: mod_base = OTHER; note = 2'-deoxy-2'-fluoroguanosine-3'-phosphate
  modified_base 10: mod_base = OTHER; note = 2'-deoxy-2'-fluoroguanosine-3'-phosphate
  modified_base 11: mod_base = OTHER; note = 2'-deoxy-2'-fluorocytidine-3'-phosphate
  modified_base 12: mod_base = OTHER; note = 2'-O-methyluridine-3'-phosphate
  modified_base 13: mod_base = OTHER; note = 2'-O-methyladenosine-3'-phosphate
  modified_base 14: mod_base = OTHER; note = 2'-O-methyladenosine-3'-phosphate
  modified_base 15: mod_base = OTHER; note = 2'-O-methyladenosine-3'-phosphate
  modified_base 16: mod_base = OTHER; note = 2'-O-methylguanosine-3'-phosphate
  modified_base 17: mod_base = OTHER; note = 2'-O-methylcytidine-3'-phosphate
  modified_base 18: mod_base = OTHER; note = 2'-O-methyladenosine-3'-phosphate
  modified_base 19: mod_base = OTHER; note = 2'-O-methyladenosine-3'-phosphate
  modified_base 20: mod_base = OTHER; note = 2'-O-methyluridine-3'-phosphate
  modified_base 21: mod_base = OTHER; note = 2'-O-methyladenosine-3'-phosphate ((2S,4R)-1-[29-[[2-(acetylamino)-2-deoxy-beta-D-galactopyra nosyl]oxy]-14,14-bis[[3-[[3-[[5-[[2-(acetylamino)-2-deoxy-b eta-D-galactopyranosyl]oxy]-1-oxopentyl]amino]propyl]amino] -3-oxopropoxy]methyl]-1,12,19,25-tetraoxo-16-oxa-13,20,24-t riazanonacos-1-yl]-4-hydroxy-2-pyrrolidinyl)methyl ester
gcatatgtggctaaagcaata

SEQ ID NO: 2143 - RNA, 23 nt, synthetic construct
  source 1..23: mol_type = other RNA
  modified_base 1: mod_base = OTHER; note = 2'-O-methyluridine-3'-phosphorothioate
  modified_base 2: mod_base = OTHER; note = 2'-deoxy-2'-fluoroadenosine-3'-phosphorothioate
  modified_base 3: mod_base = OTHER; note = 2'-O-methyluridine-3'-phosphate
  modified_base 4: mod_base = OTHER; note = 2'-O-methyluridine-3'-phosphate
  modified_base 5: mod_base = OTHER; note = 2'-O-methylguanosine-3'-phosphate
  modified_base 6: mod_base = OTHER; note = 2'-deoxy-2'-fluorocytidine-3'-phosphate
  modified_base 7: mod_base = OTHER; note = 2'-O-methyluridine-3'-phosphate
  modified_base 8: mod_base = OTHER; note = 2'-deoxy-2'-fluorouridine-3'-phosphate
  modified_base 9: mod_base = OTHER; note = 2'-deoxy-2'-fluorouridine-3'-phosphate
  modified_base 10: mod_base = OTHER; note = 2'-O-methyladenosine-3'-phosphate
  modified_base 11: mod_base = OTHER; note = 2'-O-methylguanosine-3'-phosphate
  modified_base 12: mod_base = OTHER; note = 2'-O-methylcytidine-3'-phosphate
  modified_base 13: mod_base = OTHER; note = 2'-O-methylcytidine-3'-phosphate
  modified_base 14: mod_base = OTHER; note = 2'-deoxy-2'-fluoroadenosine-3'-phosphate
  modified_base 15: mod_base = OTHER; note = 2'-O-methylcytidine-3'-phosphate
  modified_base 16: mod_base = OTHER; note = 2'-deoxy-2'-fluoroadenosine-3'-phosphate
  modified_base 17: mod_base = OTHER; note = 2'-O-methyluridine-3'-phosphate
  modified_base 18: mod_base = OTHER; note = 2'-O-methyladenosine-3'-phosphate
  modified_base 19: mod_base = OTHER; note = 2'-O-methyluridine-3'-phosphate
  modified_base 20: mod_base = OTHER; note = 2'-O-methylguanosine-3'-phosphate
  modified_base 21: mod_base = OTHER; note = 2'-O-methylcytidine-3'-phosphorothioate
  modified_base 22: mod_base = OTHER; note = 2'-O-methyladenosine-3'-phosphorothioate
  modified_base 23: mod_base = OTHER; note = 2'-O-methylguanosine
tattgctttagccacatatgcag

SEQ ID NO: 2144 - RNA, 21 nt, synthetic construct
  source 1..21: mol_type = other RNA
  modified_base 1: mod_base = OTHER; note = 2'-O-methyluridine-3'-phosphorothioate
  modified_base 2: mod_base = OTHER; note = 2'-O-methylguanosine-3'-phosphorothioate
  modified_base 3: mod_base = OTHER; note = 2'-O-methylcytidine-3'-phosphate
  modified_base 4: mod_base = OTHER; note = 2'-O-methyladenosine-3'-phosphate
  modified_base 5: mod_base = OTHER; note = 2'-O-methyluridine-3'-phosphate
  modified_base 6: mod_base = OTHER; note = 2'-O-methyladenosine-3'-phosphate
  modified_base 7: mod_base = OTHER; note = 2'-deoxy-2'-fluorouridine-3'-phosphate
  modified_base 8: mod_base = OTHER; note = 2'-O-methylguanosine-3'-phosphate
  modified_base 9: mod_base = OTHER; note = 2'-deoxy-2'-fluorouridine-3'-phosphate
  modified_base 10: mod_base = OTHER; note = 2'-deoxy-2'-fluoroguanosine-3'-phosphate
  modified_base 11: mod_base = OTHER; note = 2'-deoxy-2'-fluoroguanosine-3'-phosphate
  modified_base 12: mod_base = OTHER; note = 2'-O-methylcytidine-3'-phosphate
  modified_base 13: mod_base = OTHER; note = 2'-O-methyluridine-3'-phosphate
  modified_base 14: mod_base = OTHER; note = 2'-O-methyladenosine-3'-phosphate
  modified_base 15: mod_base = OTHER; note = 2'-O-methyladenosine-3'-phosphate
  modified_base 16: mod_base = OTHER; note = 2'-O-methyladenosine-3'-phosphate
  modified_base 17: mod_base = OTHER; note = 2'-O-methylguanosine-3'-phosphate
  modified_base 18: mod_base = OTHER; note = 2'-O-methylcytidine-3'-phosphate
  modified_base 19: mod_base = OTHER; note = 2'-O-methyladenosine-3'-phosphate
  modified_base 20: mod_base = OTHER; note = 2'-O-methyladenosine-3'-phosphate
  modified_base 21: mod_base = OTHER; note = 2'-O-methyluridine-3'-phosphate ((2S,4R)-1-[29-[[2-(acetylamino)-2-deoxy-beta-D-galactopyra nosyl]oxy]-14,14-bis[[3-[[3-[[5-[[2-(acetylamino)-2-deoxy-b eta-D-galactopyranosyl]oxy]-1-oxopentyl]amino]propyl]amino] -3-oxopropoxy]methyl]-1,12,19,25-tetraoxo-16-oxa-13,20,24-t riazanonacos-1-yl]-4-hydroxy-2-pyrrolidinyl)methyl ester
tgcatatgtggctaaagcaat

SEQ ID NO: 2145 - RNA, 23 nt, synthetic construct
  source 1..23: mol_type = other RNA
  modified_base 1: mod_base = OTHER; note = 2'-O-methyladenosine-3'-phosphorothioate
  modified_base 2: mod_base = OTHER; note = 2'-deoxy-2'-fluorouridine-3'-phosphorothioate
  modified_base 3: mod_base = OTHER; note = 2'-O-methyluridine-3'-phosphate
  modified_base 4: mod_base = OTHER; note = 2'-O-methylguanosine-3'-phosphate
  modified_base 5: mod_base = OTHER; note = 2'-O-methylcytidine-3'-phosphate
  modified_base 6: mod_base = OTHER; note = 2'-deoxy-2'-fluorouridine-3'-phosphate
  modified_base 7: mod_base = OTHER; note = 2'-O-methyluridine-3'-phosphate
  modified_base 8: mod_base = OTHER; note = 2'-deoxy-2'-fluorouridine-3'-phosphate
  modified_base 9: mod_base = OTHER; note = 2'-deoxy-2'-fluoroadenosine-3'-phosphate
  modified_base 10: mod_base = OTHER; note = 2'-O-methylguanosine-3'-phosphate
  modified_base 11: mod_base = OTHER; note = 2'-O-methylcytidine-3'-phosphate
  modified_base 12: mod_base = OTHER; note = 2'-O-methylcytidine-3'-phosphate
  modified_base 13: mod_base = OTHER; note = 2'-O-methyladenosine-3'-phosphate
  modified_base 14: mod_base = OTHER; note = 2'-deoxy-2'-fluorocytidine-3'-phosphate
  modified_base 15: mod_base = OTHER; note = 2'-O-methyladenosine-3'-phosphate
  modified_base 16: mod_base = OTHER; note = 2'-deoxy-2'-fluorouridine-3'-phosphate
  modified_base 17: mod_base = OTHER; note = 2'-O-methyladenosine-3'-phosphate
  modified_base 18: mod_base = OTHER; note = 2'-O-methyluridine-3'-phosphate
  modified_base 19: mod_base = OTHER; note = 2'-O-methylguanosine-3'-phosphate
  modified_base 20: mod_base = OTHER; note = 2'-O-methylcytidine-3'-phosphate
  modified_base 21: mod_base = OTHER; note = 2'-O-methyladenosine-3'-phosphorothioate
  modified_base 22: mod_base = OTHER; note = 2'-O-methylguanosine-3'-phosphorothioate
  modified_base 23: mod_base = OTHER; note = 2'-O-methylcytidine
attgctttagccacatatgcagc

SEQ ID NO: 2146 - RNA, 21 nt, synthetic construct
  source 1..21: mol_type = other RNA
  modified_base 1: mod_base = OTHER; note = 2'-O-methyladenosine-3'-phosphorothioate
  modified_base 2: mod_base = OTHER; note = 2'-O-methylguanosine-3'-phosphorothioate
  modified_base 3: mod_base = OTHER; note = 2'-O-methylguanosine-3'-phosphate
  modified_base 4: mod_base = OTHER; note = 2'-O-methyladenosine-3'-phosphate
  modified_base 5: mod_base = OTHER; note = 2'-O-methyluridine-3'-phosphate
  modified_base 6: mod_base = OTHER; note = 2'-O-methylguanosine-3'-phosphate
  modified_base 7: mod_base = OTHER; note = 2'-deoxy-2'-fluorocytidine-3'-phosphate
  modified_base 8: mod_base = OTHER; note = 2'-O-methyluridine-3'-phosphate
  modified_base 9: mod_base = OTHER; note = 2'-deoxy-2'-fluorocytidine-3'-phosphate
  modified_base 10: mod_base = OTHER; note = 2'-deoxy-2'-fluorocytidine-3'-phosphate
  modified_base 11: mod_base = OTHER; note = 2'-deoxy-2'-fluoroguanosine-3'-phosphate
  modified_base 12: mod_base = OTHER; note = 2'-O-methylguanosine-3'-phosphate
  modified_base 13: mod_base = OTHER; note = 2'-O-methyladenosine-3'-phosphate
  modified_base 14: mod_base = OTHER; note = 2'-O-methyladenosine-3'-phosphate
  modified_base 15: mod_base = OTHER; note = 2'-O-methyluridine-3'-phosphate
  modified_base 16: mod_base = OTHER; note = 2'-O-methylguanosine-3'-phosphate
  modified_base 17: mod_base = OTHER; note = 2'-O-methyluridine-3'-phosphate
  modified_base 18: mod_base = OTHER; note = 2'-O-methyluridine-3'-phosphate
  modified_base 19: mod_base = OTHER; note = 2'-O-methylguanosine-3'-phosphate
  modified_base 20: mod_base = OTHER; note = 2'-O-methylcytidine-3'-phosphate
  modified_base 21: mod_base = OTHER; note = 2'-O-methyluridine-3'-phosphate ((2S,4R)-1-[29-[[2-(acetylamino)-2-deoxy-beta-D-galactopyra nosyl]oxy]-14,14-bis[[3-[[3-[[5-[[2-(acetylamino)-2-deoxy-b eta-D-galactopyranosyl]oxy]-1-oxopentyl]amino]propyl]amino] -3-oxopropoxy]methyl]-1,12,19,25-tetraoxo-16-oxa-13,20,24-t riazanonacos-1-yl]-4-hydroxy-2-pyrrolidinyl)methyl ester
aggatgctccggaatgttgct

SEQ ID NO: 2147 - RNA, 23 nt, synthetic construct
  source 1..23: mol_type = other RNA
  modified_base 1: mod_base = OTHER; note = 2'-O-methyladenosine-3'-phosphorothioate
  modified_base 2: mod_base = OTHER; note = 2'-deoxy-2'-fluoroguanosine-3'-phosphorothioate
  modified_base 3: mod_base = OTHER; note = 2'-O-methylcytidine-3'-phosphate
  modified_base 4: mod_base = OTHER; note = 2'-O-methyladenosine-3'-phosphate
  modified_base 5: mod_base = OTHER; note = 2'-O-methyladenosine-3'-phosphate
  modified_base 6: mod_base = OTHER; note = 2'-deoxy-2'-fluorocytidine-3'-phosphate
  modified_base 7: mod_base = OTHER; note = 2'-O-methyladenosine-3'-phosphate
  modified_base 8: mod_base = OTHER; note = 2'-deoxy-2'-fluorouridine-3'-phosphate
  modified_base 9: mod_base = OTHER; note = 2'-deoxy-2'-fluorouridine-3'-phosphate
  modified_base 10: mod_base = OTHER; note = 2'-O-methylcytidine-3'-phosphate
  modified_base 11: mod_base = OTHER; note = 2'-O-methylcytidine-3'-phosphate
  modified_base 12: mod_base = OTHER; note = 2'-O-methylguanosine-3'-phosphate
  modified_base 13: mod_base = OTHER; note = 2'-O-methylguanosine-3'-phosphate
  modified_base 14: mod_base = OTHER; note = 2'-deoxy-2'-fluoroadenosine-3'-phosphate
  modified_base 15: mod_base = OTHER; note = 2'-O-methylguanosine-3'-phosphate
  modified_base 16: mod_base = OTHER; note = 2'-deoxy-2'-fluorocytidine-3'-phosphate
  modified_base 17: mod_base = OTHER; note = 2'-O-methyladenosine-3'-phosphate
  modified_base 18: mod_base = OTHER; note = 2'-O-methyluridine-3'-phosphate
  modified_base 19: mod_base = OTHER; note = 2'-O-methylcytidine-3'-phosphate
  modified_base 20: mod_base = OTHER; note = 2'-O-methylcytidine-3'-phosphate
  modified_base 21: mod_base = OTHER; note = 2'-O-methyluridine-3'-phosphorothioate
  modified_base 22: mod_base = OTHER; note = 2'-O-methyluridine-3'-phosphorothioate
  modified_base 23: mod_base = OTHER; note = 2'-O-methylguanosine
agcaacattccggagcatccttg

SEQ ID NO: 2148 - RNA, 21 nt, synthetic construct
  source 1..21: mol_type = other RNA
  modified_base 1: mod_base = OTHER; note = 2'-O-methylguanosine-3'-phosphorothioate
  modified_base 2: mod_base = OTHER; note = 2'-O-methylguanosine-3'-phosphorothioate
  modified_base 3: mod_base = OTHER; note = 2'-O-methyladenosine-3'-phosphate
  modified_base 4: mod_base = OTHER; note = 2'-O-methyluridine-3'-phosphate
  modified_base 5: mod_base = OTHER; note = 2'-O-methylguanosine-3'-phosphate
  modified_base 6: mod_base = OTHER; note = 2'-O-methylcytidine-3'-phosphate
  modified_base 7: mod_base = OTHER; note = 2'-deoxy-2'-fluorouridine-3'-phosphate
  modified_base 8: mod_base = OTHER; note = 2'-O-methylcytidine-3'-phosphate
  modified_base 9: mod_base = OTHER; note = 2'-deoxy-2'-fluorocytidine-3'-phosphate
  modified_base 10: mod_base = OTHER; note = 2'-deoxy-2'-fluoroguanosine-3'-phosphate
  modified_base 11: mod_base = OTHER; note = 2'-deoxy-2'-fluoroguanosine-3'-phosphate
  modified_base 12: mod_base = OTHER; note = 2'-O-methyladenosine-3'-phosphate
  modified_base 13: mod_base = OTHER; note = 2'-O-methyladenosine-3'-phosphate
  modified_base 14: mod_base = OTHER; note = 2'-O-methyluridine-3'-phosphate
  modified_base 15: mod_base = OTHER; note = 2'-O-methylguanosine-3'-phosphate
  modified_base 16: mod_base = OTHER; note = 2'-O-methyluridine-3'-phosphate
  modified_base 17: mod_base = OTHER; note = 2'-O-methyluridine-3'-phosphate
  modified_base 18: mod_base = OTHER; note = 2'-O-methylguanosine-3'-phosphate
  modified_base 19: mod_base = OTHER; note = 2'-O-methylcytidine-3'-phosphate
  modified_base 20: mod_base = OTHER; note = 2'-O-methyluridine-3'-phosphate
  modified_base 21: mod_base = OTHER; note = 2'-O-methylguanosine-3'-phosphate ((2S,4R)-1-[29-[[2-(acetylamino)-2-deoxy-beta-D-galactopyra nosyl]oxy]-14,14-bis[[3-[[3-[[5-[[2-(acetylamino)-2-deoxy-b eta-D-galactopyranosyl]oxy]-1-oxopentyl]amino]propyl]amino] -3-oxopropoxy]methyl]-1,12,19,25-tetraoxo-16-oxa-13,20,24-t riazanonacos-1-yl]-4-hydroxy-2-pyrrolidinyl)methyl ester
ggatgctccggaatgttgctg

SEQ ID NO: 2149 - RNA, 23 nt, synthetic construct
  source 1..23: mol_type = other RNA
  modified_base 1: mod_base = OTHER; note = 2'-O-methylcytidine-3'-phosphorothioate
  modified_base 2: mod_base = OTHER; note = 2'-deoxy-2'-fluoroadenosine-3'-phosphorothioate
  modified_base 3: mod_base = OTHER; note = 2'-O-methylguanosine-3'-phosphate
  modified_base 4: mod_base = OTHER; note = 2'-O-methylcytidine-3'-phosphate
  modified_base 5: mod_base = OTHER; note = 2'-O-methyladenosine-3'-phosphate
  modified_base 6: mod_base = OTHER; note = 2'-deoxy-2'-fluoroadenosine-3'-phosphate
  modified_base 7: mod_base = OTHER; note = 2'-O-methylcytidine-3'-phosphate
  modified_base 8: mod_base = OTHER; note = 2'-deoxy-2'-fluoroadenosine-3'-phosphate
  modified_base 9: mod_base = OTHER; note = 2'-deoxy-2'-fluorouridine-3'-phosphate
  modified_base 10: mod_base = OTHER; note = 2'-O-methyluridine-3'-phosphate
  modified_base 11: mod_base = OTHER; note = 2'-O-methylcytidine-3'-phosphate
  modified_base 12: mod_base = OTHER; note = 2'-O-methylcytidine-3'-phosphate
  modified_base 13: mod_base = OTHER; note = 2'-O-methylguanosine-3'-phosphate
  modified_base 14: mod_base = OTHER; note = 2'-deoxy-2'-fluoroguanosine-3'-phosphate
  modified_base 15: mod_base = OTHER; note = 2'-O-methyladenosine-3'-phosphate
  modified_base 16: mod_base = OTHER; note = 2'-deoxy-2'-fluoroguanosine-3'-phosphate
  modified_base 17: mod_base = OTHER; note = 2'-O-methylcytidine-3'-phosphate
  modified_base 18: mod_base = OTHER; note = 2'-O-methyladenosine-3'-phosphate
  modified_base 19: mod_base = OTHER; note = 2'-O-methyluridine-3'-phosphate
  modified_base 20: mod_base = OTHER; note = 2'-O-methylcytidine-3'-phosphate
  modified_base 21: mod_base = OTHER; note = 2'-O-methylcytidine-3'-phosphorothioate
  modified_base 22: mod_base = OTHER; note = 2'-O-methyluridine-3'-phosphorothioate
  modified_base 23: mod_base = OTHER; note = 2'-O-methyluridine
cagcaacattccggagcatcctt

SEQ ID NO: 2150 - RNA, 21 nt, synthetic construct
  source 1..21: mol_type = other RNA
  modified_base 1: mod_base = OTHER; note = 2'-O-methyluridine-3'-phosphorothioate
  modified_base 2: mod_base = OTHER; note = 2'-O-methylcytidine-3'-phosphorothioate
  modified_base 3: mod_base = OTHER; note = 2'-O-methylcytidine-3'-phosphate
  modified_base 4: mod_base = OTHER; note = 2'-O-methyladenosine-3'-phosphate
  modified_base 5: mod_base = OTHER; note = 2'-O-methyladenosine-3'-phosphate
  modified_base 6: mod_base = OTHER; note = 2'-O-methylguanosine-3'-phosphate
  modified_base 7: mod_base = OTHER; note = 2'-deoxy-2'-fluoroguanosine-3'-phosphate
  modified_base 8: mod_base = OTHER; note = 2'-O-methyladenosine-3'-phosphate
  modified_base 9: mod_base = OTHER; note = 2'-deoxy-2'-fluorouridine-3'-phosphate
  modified_base 10: mod_base = OTHER; note = 2'-deoxy-2'-fluoroguanosine-3'-phosphate
  modified_base 11: mod_base = OTHER; note = 2'-deoxy-2'-fluorocytidine-3'-phosphate
  modified_base 12: mod_base = OTHER; note = 2'-O-methyluridine-3'-phosphate
  modified_base 13: mod_base = OTHER; note = 2'-O-methylcytidine-3'-phosphate
  modified_base 14: mod_base = OTHER; note = 2'-O-methylcytidine-3'-phosphate
  modified_base 15: mod_base = OTHER; note = 2'-O-methylguanosine-3'-phosphate
  modified_base 16: mod_base = OTHER; note = 2'-O-methylguanosine-3'-phosphate
  modified_base 17: mod_base = OTHER; note = 2'-O-methyladenosine-3'-phosphate
  modified_base 18: mod_base = OTHER; note = 2'-O-methyladenosine-3'-phosphate
  modified_base 19: mod_base = OTHER; note = 2'-O-methyluridine-3'-phosphate
  modified_base 20: mod_base = OTHER; note = 2'-O-methylguanosine-3'-phosphate
  modified_base 21: mod_base = OTHER; note = 2'-O-methyluridine-3'-phosphate ((2S,4R)-1-[29-[[2-(acetylamino)-2-deoxy-beta-D-galactopyra nosyl]oxy]-14,14-bis[[3-[[3-[[5-[[2-(acetylamino)-2-deoxy-b eta-D-galactopyranosyl]oxy]-1-oxopentyl]amino]propyl]amino] -3-oxopropoxy]methyl]-1,12,19,25-tetraoxo-16-oxa-13,20,24-t riazanonacos-1-yl]-4-hydroxy-2-pyrrolidinyl)methyl ester
tccaaggatgctccggaatgt

SEQ ID NO: 2151 - RNA, 23 nt, synthetic construct
  source 1..23: mol_type = other RNA
  modified_base 1: mod_base = OTHER; note = 2'-O-methyladenosine-3'-phosphorothioate
  modified_base 2: mod_base = OTHER; note = 2'-deoxy-2'-fluorocytidine-3'-phosphorothioate
  modified_base 3: mod_base = OTHER; note = 2'-O-methyladenosine-3'-phosphate
  modified_base 4: mod_base = OTHER; note = 2'-O-methyluridine-3'-phosphate
  modified_base 5: mod_base = OTHER; note = 2'-O-methyluridine-3'-phosphate
  modified_base 6: mod_base = OTHER; note = 2'-deoxy-2'-fluorocytidine-3'-phosphate
  modified_base 7: mod_base = OTHER; note = 2'-O-methylcytidine-3'-phosphate
  modified_base 8: mod_base = OTHER; note = 2'-deoxy-2'-fluoroguanosine-3'-phosphate
  modified_base 9: mod_base = OTHER; note = 2'-deoxy-2'-fluoroguanosine-3'-phosphate
  modified_base 10: mod_base = OTHER; note = 2'-O-methyladenosine-3'-phosphate
  modified_base 11: mod_base = OTHER; note = 2'-O-methylguanosine-3'-phosphate
  modified_base 12: mod_base = OTHER; note = 2'-O-methylcytidine-3'-phosphate
  modified_base 13: mod_base = OTHER; note = 2'-O-methyladenosine-3'-phosphate
  modified_base 14: mod_base = OTHER; note = 2'-deoxy-2'-fluorouridine-3'-phosphate
  modified_base 15: mod_base = OTHER; note = 2'-O-methylcytidine-3'-phosphate
  modified_base 16: mod_base = OTHER; note = 2'-deoxy-2'-fluorocytidine-3'-phosphate
  modified_base 17: mod_base = OTHER; note = 2'-O-methyluridine-3'-phosphate
  modified_base 18: mod_base = OTHER; note = 2'-O-methyluridine-3'-phosphate
  modified_base 19: mod_base = OTHER; note = 2'-O-methylguanosine-3'-phosphate
  modified_base 20: mod_base = OTHER; note = 2'-O-methylguanosine-3'-phosphate
  modified_base 21: mod_base = OTHER; note = 2'-O-methyladenosine-3'-phosphorothioate
  modified_base 22: mod_base = OTHER; note = 2'-O-methyluridine-3'-phosphorothioate
  modified_base 23: mod_base = OTHER; note = 2'-O-methyladenosine
acattccggagcatccttggata

SEQ ID NO: 2152 - RNA, 21 nt, synthetic construct
  source 1..21: mol_type = other RNA
  modified_base 1: mod_base = OTHER; note = 2'-O-methyladenosine-3'-phosphorothioate
  modified_base 2: mod_base = OTHER; note = 2'-O-methyluridine-3'-phosphorothioate
  modified_base 3: mod_base = OTHER; note = 2'-O-methylcytidine-3'-phosphate
  modified_base 4: mod_base = OTHER; note = 2'-O-methylcytidine-3'-phosphate
  modified_base 5: mod_base = OTHER; note = 2'-O-methyladenosine-3'-phosphate
  modified_base 6: mod_base = OTHER; note = 2'-O-methyladenosine-3'-phosphate
  modified_base 7: mod_base = OTHER; note = 2'-deoxy-2'-fluoroguanosine-3'-phosphate
  modified_base 8: mod_base = OTHER; note = 2'-O-methylguanosine-3'-phosphate
  modified_base 9: mod_base = OTHER; note = 2'-deoxy-2'-fluoroadenosine-3'-phosphate
  modified_base 10: mod_base = OTHER; note = 2'-deoxy-2'-fluorouridine-3'-phosphate
  modified_base 11: mod_base = OTHER; note = 2'-deoxy-2'-fluoroguanosine-3'-phosphate
  modified_base 12: mod_base = OTHER; note = 2'-O-methylcytidine-3'-phosphate
  modified_base 13: mod_base = OTHER; note = 2'-O-methyluridine-3'-phosphate
  modified_base 14: mod_base = OTHER; note = 2'-O-methylcytidine-3'-phosphate
  modified_base 15: mod_base = OTHER; note = 2'-O-methylcytidine-3'-phosphate
  modified_base 16: mod_base = OTHER; note = 2'-O-methylguanosine-3'-phosphate
  modified_base 17: mod_base = OTHER; note = 2'-O-methylguanosine-3'-phosphate
  modified_base 18: mod_base = OTHER; note = 2'-O-methyladenosine-3'-phosphate
  modified_base 19: mod_base = OTHER; note = 2'-O-methyladenosine-3'-phosphate
  modified_base 20: mod_base = OTHER; note = 2'-O-methyluridine-3'-phosphate
  modified_base 21: mod_base = OTHER; note = 2'-O-methylguanosine-3'-phosphate ((2S,4R)-1-[29-[[2-(acetylamino)-2-deoxy-beta-D-galactopyra nosyl]oxy]-14,14-bis[[3-[[3-[[5-[[2-(acetylamino)-2-deoxy-b eta-D-galactopyranosyl]oxy]-1-oxopentyl]amino]propyl]amino] -3-oxopropoxy]methyl]-1,12,19,25-tetraoxo-16-oxa-13,20,24-t riazanonacos-1-yl]-4-hydroxy-2-pyrrolidinyl)methyl ester
atccaaggatgctccggaatg

SEQ ID NO: 2153 - RNA, 23 nt, synthetic construct
  source 1..23: mol_type = other RNA
  modified_base 1: mod_base = OTHER; note = 2'-O-methylcytidine-3'-phosphorothioate
  modified_base 2: mod_base = OTHER; note = 2'-deoxy-2'-fluoroadenosine-3'-phosphorothioate
  modified_base 3: mod_base = OTHER; note = 2'-O-methyluridine-3'-phosphate
  modified_base 4: mod_base = OTHER; note = 2'-O-methyluridine-3'-phosphate
  modified_base 5: mod_base = OTHER; note = 2'-O-methylcytidine-3'-phosphate
  modified_base 6: mod_base = OTHER; note = 2'-deoxy-2'-fluorocytidine-3'-phosphate
  modified_base 7: mod_base = OTHER; note = 2'-O-methylguanosine-3'-phosphate
  modified_base 8: mod_base = OTHER; note = 2'-deoxy-2'-fluoroguanosine-3'-phosphate
  modified_base 9: mod_base = OTHER; note = 2'-deoxy-2'-fluoroadenosine-3'-phosphate
  modified_base 10: mod_base = OTHER; note = 2'-O-methylguanosine-3'-phosphate
  modified_base 11: mod_base = OTHER; note = 2'-O-methylcytidine-3'-phosphate
  modified_base 12: mod_base = OTHER; note = 2'-O-methyladenosine-3'-phosphate
  modified_base 13: mod_base = OTHER; note = 2'-O-methyluridine-3'-phosphate
  modified_base 14: mod_base = OTHER; note = 2'-deoxy-2'-fluorocytidine-3'-phosphate
  modified_base 15: mod_base = OTHER; note = 2'-O-methylcytidine-3'-phosphate
  modified_base 16: mod_base = OTHER; note = 2'-deoxy-2'-fluorouridine-3'-phosphate
  modified_base 17: mod_base = OTHER; note = 2'-O-methyluridine-3'-phosphate
  modified_base 18: mod_base = OTHER; note = 2'-O-methylguanosine-3'-phosphate
  modified_base 19: mod_base = OTHER; note = 2'-O-methylguanosine-3'-phosphate
  modified_base 20: mod_base = OTHER; note = 2'-O-methyladenosine-3'-phosphate
  modified_base 21: mod_base = OTHER; note = 2'-O-methyluridine-3'-phosphorothioate
  modified_base 22: mod_base = OTHER; note = 2'-O-methyladenosine-3'-phosphorothioate
  modified_base 23: mod_base = OTHER; note = 2'-O-methylcytidine
cattccggagcatccttggatac

SEQ ID NO: 2154 - RNA, 21 nt, synthetic construct
  source 1..21: mol_type = other RNA
  modified_base 1: mod_base = OTHER; note = 2'-O-methyluridine-3'-phosphorothioate
  modified_base 2: mod_base = OTHER; note = 2'-O-methylcytidine-3'-phosphorothioate
  modified_base 3: mod_base = OTHER; note = 2'-O-methyladenosine-3'-phosphate
  modified_base 4: mod_base = OTHER; note = 2'-O-methylcytidine-3'-phosphate
  modified_base 5: mod_base = OTHER; note = 2'-O-methyladenosine-3'-phosphate
  modified_base 6: mod_base = OTHER; note = 2'-O-methyluridine-3'-phosphate
  modified_base 7: mod_base = OTHER; note = 2'-deoxy-2'-fluorocytidine-3'-phosphate
  modified_base 8: mod_base = OTHER; note = 2'-O-methyluridine-3'-phosphate
  modified_base 9: mod_base = OTHER; note = 2'-deoxy-2'-fluorouridine-3'-phosphate
  modified_base 10: mod_base = OTHER; note = 2'-deoxy-2'-fluorouridine-3'-phosphate
  modified_base 11: mod_base = OTHER; note = 2'-deoxy-2'-fluoroadenosine-3'-phosphate
  modified_base 12: mod_base = OTHER; note = 2'-O-methylguanosine-3'-phosphate
  modified_base 13: mod_base = OTHER; note = 2'-O-methyluridine-3'-phosphate
  modified_base 14: mod_base = OTHER; note = 2'-O-methylguanosine-3'-phosphate
  modified_base 15: mod_base = OTHER; note = 2'-O-methyluridine-3'-phosphate
  modified_base 16: mod_base = OTHER; note = 2'-O-methylcytidine-3'-phosphate
  modified_base 17: mod_base = OTHER; note = 2'-O-methyluridine-3'-phosphate
  modified_base 18: mod_base = OTHER; note = 2'-O-methylguanosine-3'-phosphate
  modified_base 19: mod_base = OTHER; note = 2'-O-methyladenosine-3'-phosphate
  modified_base 20: mod_base = OTHER; note = 2'-O-methyladenosine-3'-phosphate
  modified_base 21: mod_base = OTHER; note = 2'-O-methyluridine-3'-phosphate ((2S,4R)-1-[29-[[2-(acetylamino)-2-deoxy-beta-D-galactopyra nosyl]oxy]-14,14-bis[[3-[[3-[[5-[[2-(acetylamino)-2-deoxy-b eta-D-galactopyranosyl]oxy]-1-oxopentyl]amino]propyl]amino] -3-oxopropoxy]methyl]-1,12,19,25-tetraoxo-16-oxa-13,20,24-t riazanonacos-1-yl]-4-hydroxy-2-pyrrolidinyl)methyl ester
tcacatctttagtgtctgaat

SEQ ID NO: 2155 - RNA, 23 nt, synthetic construct
  source 1..23: mol_type = other RNA
  modified_base 1: mod_base = OTHER; note = 2'-O-methyladenosine-3'-phosphorothioate
  modified_base 2: mod_base = OTHER; note = 2'-deoxy-2'-fluorouridine-3'-phosphorothioate
  modified_base 3: mod_base = OTHER; note = 2'-O-methyluridine-3'-phosphate
  modified_base 4: mod_base = OTHER; note = 2'-O-methylcytidine-3'-phosphate
  modified_base 5: mod_base = OTHER; note = 2'-O-methyladenosine-3'-phosphate
  modified_base 6: mod_base = OTHER; note = 2'-deoxy-2'-fluoroguanosine-3'-phosphate
  modified_base 7: mod_base = OTHER; note = 2'-O-methyladenosine-3'-phosphate
  modified_base 8: mod_base = OTHER; note = 2'-deoxy-2'-fluorocytidine-3'-phosphate
  modified_base 9: mod_base = OTHER; note = 2'-deoxy-2'-fluoroadenosine-3'-phosphate
  modified_base 10: mod_base = OTHER; note = 2'-O-methylcytidine-3'-phosphate
  modified_base 11: mod_base = OTHER; note = 2'-O-methyluridine-3'-phosphate
  modified_base 12: mod_base = OTHER; note = 2'-O-methyladenosine-3'-phosphate
  modified_base 13: mod_base = OTHER; note = 2'-O-methyladenosine-3'-phosphate
  modified_base 14: mod_base = OTHER; note = 2'-deoxy-2'-fluoroadenosine-3'-phosphate
  modified_base 15: mod_base = OTHER; note = 2'-O-methylguanosine-3'-phosphate
  modified_base 16: mod_base = OTHER; note = 2'-deoxy-2'-fluoroadenosine-3'-phosphate
  modified_base 17: mod_base = OTHER; note = 2'-O-methyluridine-3'-phosphate
  modified_base 18: mod_base = OTHER; note = 2'-O-methylguanosine-3'-phosphate
  modified_base 19: mod_base = OTHER; note = 2'-O-methyluridine-3'-phosphate
  modified_base 20: mod_base = OTHER; note = 2'-O-methylguanosine-3'-phosphate
  modified_base 21: mod_base = OTHER; note = 2'-O-methyladenosine-3'-phosphorothioate
  modified_base 22: mod_base = OTHER; note = 2'-O-methyluridine-3'-phosphorothioate
  modified_base 23: mod_base = OTHER; note = 2'-O-methyluridine
attcagacactaaagatgtgatt

SEQ ID NO: 2156 - RNA, 21 nt, synthetic construct
  source 1..21: mol_type = other RNA
  modified_base 1: mod_base = OTHER; note = 2'-O-methylcytidine-3'-phosphorothioate
  modified_base 2: mod_base = OTHER; note = 2'-O-methyladenosine-3'-phosphorothioate
  modified_base 3: mod_base = OTHER; note = 2'-O-methylcytidine-3'-phosphate
  modified_base 4: mod_base = OTHER; note = 2'-O-methyladenosine-3'-phosphate
  modified_base 5: mod_base = OTHER; note = 2'-O-methyluridine-3'-phosphate
  modified_base 6: mod_base = OTHER; note = 2'-O-methylcytidine-3'-phosphate
  modified_base 7: mod_base = OTHER; note = 2'-deoxy-2'-fluorouridine-3'-phosphate
  modified_base 8: mod_base = OTHER; note = 2'-O-methyluridine-3'-phosphate
  modified_base 9: mod_base = OTHER; note = 2'-deoxy-2'-fluorouridine-3'-phosphate
  modified_base 10: mod_base = OTHER; note = 2'-deoxy-2'-fluoroadenosine-3'-phosphate
  modified_base 11: mod_base = OTHER; note = 2'-deoxy-2'-fluoroguanosine-3'-phosphate
  modified_base 12: mod_base = OTHER; note = 2'-O-methyluridine-3'-phosphate
  modified_base 13: mod_base = OTHER; note = 2'-O-methylguanosine-3'-phosphate
  modified_base 14: mod_base = OTHER; note = 2'-O-methyluridine-3'-phosphate
  modified_base 15: mod_base = OTHER; note = 2'-O-methylcytidine-3'-phosphate
  modified_base 16: mod_base = OTHER; note = 2'-O-methyluridine-3'-phosphate
  modified_base 17: mod_base = OTHER; note = 2'-O-methylguanosine-3'-phosphate
  modified_base 18: mod_base = OTHER; note = 2'-O-methyladenosine-3'-phosphate
  modified_base 19: mod_base = OTHER; note = 2'-O-methyladenosine-3'-phosphate
  modified_base 20: mod_base = OTHER; note = 2'-O-methyluridine-3'-phosphate
  modified_base 21: mod_base = OTHER; note = 2'-O-methyladenosine-3'-phosphate ((2S,4R)-1-[29-[[2-(acetylamino)-2-deoxy-beta-D-galactopyra nosyl]oxy]-14,14-bis[[3-[[3-[[5-[[2-(acetylamino)-2-deoxy-b eta-D-galactopyranosyl]oxy]-1-oxopentyl]amino]propyl]amino] -3-oxopropoxy]methyl]-1,12,19,25-tetraoxo-16-oxa-13,20,24-t riazanonacos-1-yl]-4-hydroxy-2-pyrrolidinyl)methyl ester
cacatctttagtgtctgaata

SEQ ID NO: 2157 - RNA, 23 nt, synthetic construct
  source 1..23: mol_type = other RNA
  modified_base 1: mod_base = OTHER; note = 2'-O-methyluridine-3'-phosphorothioate
  modified_base 2: mod_base = OTHER; note = 2'-deoxy-2'-fluoroadenosine-3'-phosphorothioate
  modified_base 3: mod_base = OTHER; note = 2'-O-methyluridine-3'-phosphate
  modified_base 4: mod_base = OTHER; note = 2'-O-methyluridine-3'-phosphate
  modified_base 5: mod_base = OTHER; note = 2'-O-methylcytidine-3'-phosphate
  modified_base 6: mod_base = OTHER; note = 2'-deoxy-2'-fluoroadenosine-3'-phosphate
  modified_base 7: mod_base = OTHER; note = 2'-O-methylguanosine-3'-phosphate
  modified_base 8: mod_base = OTHER; note = 2'-deoxy-2'-fluoroadenosine-3'-phosphate
  modified_base 9: mod_base = OTHER; note = 2'-deoxy-2'-fluorocytidine-3'-phosphate
  modified_base 10: mod_base = OTHER; note = 2'-O-methyladenosine-3'-phosphate
  modified_base 11: mod_base = OTHER; note = 2'-O-methylcytidine-3'-phosphate
  modified_base 12: mod_base = OTHER; note = 2'-O-methyluridine-3'-phosphate
  modified_base 13: mod_base = OTHER; note = 2'-O-methyladenosine-3'-phosphate
  modified_base 14: mod_base = OTHER; note = 2'-deoxy-2'-fluoroadenosine-3'-phosphate
  modified_base 15: mod_base = OTHER; note = 2'-O-methyladenosine-3'-phosphate
  modified_base 16: mod_base = OTHER; note = 2'-deoxy-2'-fluoroguanosine-3'-phosphate
  modified_base 17: mod_base = OTHER; note = 2'-O-methyladenosine-3'-phosphate
  modified_base 18: mod_base = OTHER; note = 2'-O-methyluridine-3'-phosphate
  modified_base 19: mod_base = OTHER; note = 2'-O-methylguanosine-3'-phosphate
  modified_base 20: mod_base = OTHER; note = 2'-O-methyluridine-3'-phosphate
  modified_base 21: mod_base = OTHER; note = 2'-O-methylguanosine-3'-phosphorothioate
  modified_base 22: mod_base = OTHER; note = 2'-O-methyladenosine-3'-phosphorothioate
  modified_base 23: mod_base = OTHER; note = 2'-O-methyluridine
tattcagacactaaagatgtgat

SEQ ID NO: 2158 - RNA, 21 nt, synthetic construct
  source 1..21: mol_type = other RNA
  modified_base 1: mod_base = OTHER; note = 2'-O-methylcytidine-3'-phosphorothioate
  modified_base 2: mod_base = OTHER; note = 2'-O-methylcytidine-3'-phosphorothioate
  modified_base 3: mod_base = OTHER; note = 2'-O-methyladenosine-3'-phosphate
  modified_base 4: mod_base = OTHER; note = 2'-O-methyladenosine-3'-phosphate
  modified_base 5: mod_base = OTHER; note = 2'-O-methyluridine-3'-phosphate
  modified_base 6: mod_base = OTHER; note = 2'-O-methylcytidine-3'-phosphate
  modified_base 7: mod_base = OTHER; note = 2'-deoxy-2'-fluoroadenosine-3'-phosphate
  modified_base 8: mod_base = OTHER; note = 2'-O-methylcytidine-3'-phosphate
  modified_base 9: mod_base = OTHER; note = 2'-deoxy-2'-fluoroadenosine-3'-phosphate
  modified_base 10: mod_base = OTHER; note = 2'-deoxy-2'-fluorouridine-3'-phosphate
  modified_base 11: mod_base = OTHER; note = 2'-deoxy-2'-fluorocytidine-3'-phosphate
  modified_base 12: mod_base = OTHER; note = 2'-O-methyluridine-3'-phosphate
  modified_base 13: mod_base = OTHER; note = 2'-O-methyluridine-3'-phosphate
  modified_base 14: mod_base = OTHER; note = 2'-O-methyluridine-3'-phosphate
  modified_base 15: mod_base = OTHER; note = 2'-O-methyladenosine-3'-phosphate
  modified_base 16: mod_base = OTHER; note = 2'-O-methylguanosine-3'-phosphate
  modified_base 17: mod_base = OTHER; note = 2'-O-methyluridine-3'-phosphate
  modified_base 18: mod_base = OTHER; note = 2'-O-methylguanosine-3'-phosphate
  modified_base 19: mod_base = OTHER; note = 2'-O-methyluridine-3'-phosphate
  modified_base 20: mod_base = OTHER; note = 2'-O-methylcytidine-3'-phosphate
  modified_base 21: mod_base = OTHER; note = 2'-O-methyluridine-3'-phosphate ((2S,4R)-1-[29-[[2-(acetylamino)-2-deoxy-beta-D-galactopyra nosyl]oxy]-14,14-bis[[3-[[3-[[5-[[2-(acetylamino)-2-deoxy-b eta-D-galactopyranosyl]oxy]-1-oxopentyl]amino]propyl]amino] -3-oxopropoxy]methyl]-1,12,19,25-tetraoxo-16-oxa-13,20,24-t riazanonacos-1-yl]-4-hydroxy-2-pyrrolidinyl)methyl ester
ccaatcacatctttagtgtct

SEQ ID NO: 2159 - RNA, 23 nt, synthetic construct
  source 1..23: mol_type = other RNA
  modified_base 1: mod_base = OTHER; note = 2'-O-methyladenosine-3'-phosphorothioate
  modified_base 2: mod_base = OTHER; note = 2'-deoxy-2'-fluoroguanosine-3'-phosphorothioate
  modified_base 3: mod_base = OTHER; note = 2'-O-methyladenosine-3'-phosphate
  modified_base 4: mod_base = OTHER; note = 2'-O-methylcytidine-3'-phosphate
  modified_base 5: mod_base = OTHER; note = 2'-O-methyladenosine-3'-phosphate
  modified_base 6: mod_base = OTHER; note = 2'-deoxy-2'-fluorocytidine-3'-phosphate
  modified_base 7: mod_base = OTHER; note = 2'-O-methyluridine-3'-phosphate
  modified_base 8: mod_base = OTHER; note = 2'-deoxy-2'-fluoroadenosine-3'-phosphate
  modified_base 9: mod_base = OTHER; note = 2'-deoxy-2'-fluoroadenosine-3'-phosphate
  modified_base 10: mod_base = OTHER; note = 2'-O-methyladenosine-3'-phosphate
  modified_base 11: mod_base = OTHER; note = 2'-O-methylguanosine-3'-phosphate
  modified_base 12: mod_base = OTHER; note = 2'-O-methyladenosine-3'-phosphate
  modified_base 13: mod_base = OTHER; note = 2'-O-methyluridine-3'-phosphate
  modified_base 14: mod_base = OTHER; note = 2'-deoxy-2'-fluoroguanosine-3'-phosphate
  modified_base 15: mod_base = OTHER; note = 2'-O-methyluridine-3'-phosphate
  modified_base 16: mod_base = OTHER; note = 2'-deoxy-2'-fluoroguanosine-3'-phosphate
  modified_base 17: mod_base = OTHER; note = 2'-O-methyladenosine-3'-phosphate
  modified_base 18: mod_base = OTHER; note = 2'-O-methyluridine-3'-phosphate
  modified_base 19: mod_base = OTHER; note = 2'-O-methyluridine-3'-phosphate
  modified_base 20: mod_base = OTHER; note = 2'-O-methylguanosine-3'-phosphate
  modified_base 21: mod_base = OTHER; note = 2'-O-methylguanosine-3'-phosphorothioate
  modified_base 22: mod_base = OTHER; note = 2'-O-methyladenosine-3'-phosphorothioate
  modified_base 23: mod_base = OTHER; note = 2'-O-methyladenosine
agacactaaagatgtgattggaa

SEQ ID NO: 2160 - RNA, 21 nt, synthetic construct
  source 1..21: mol_type = other RNA
  modified_base 1: mod_base = OTHER; note = 2'-O-methyluridine-3'-phosphorothioate
  modified_base 2: mod_base = OTHER; note = 2'-O-methylcytidine-3'-phosphorothioate
  modified_base 3: mod_base = OTHER; note = 2'-O-methylcytidine-3'-phosphate
  modified_base 4: mod_base = OTHER; note = 2'-O-methyladenosine-3'-phosphate
  modified_base 5: mod_base = OTHER; note = 2'-O-methyladenosine-3'-phosphate
  modified_base 6: mod_base = OTHER; note = 2'-O-methyluridine-3'-phosphate
  modified_base 7: mod_base = OTHER; note = 2'-deoxy-2'-fluorocytidine-3'-phosphate
  modified_base 8: mod_base = OTHER; note = 2'-O-methyladenosine-3'-phosphate
  modified_base 9: mod_base = OTHER; note = 2'-deoxy-2'-fluorocytidine-3'-phosphate
  modified_base 10: mod_base = OTHER; note = 2'-deoxy-2'-fluoroadenosine-3'-phosphate
  modified_base 11: mod_base = OTHER; note = 2'-deoxy-2'-fluorouridine-3'-phosphate
  modified_base 12: mod_base = OTHER; note = 2'-O-methylcytidine-3'-phosphate
  modified_base 13: mod_base = OTHER; note = 2'-O-methyluridine-3'-phosphate
  modified_base 14: mod_base = OTHER; note = 2'-O-methyluridine-3'-phosphate
  modified_base 15: mod_base = OTHER; note = 2'-O-methyluridine-3'-phosphate
  modified_base 16: mod_base = OTHER; note = 2'-O-methyladenosine-3'-phosphate
  modified_base 17: mod_base = OTHER; note = 2'-O-methylguanosine-3'-phosphate
  modified_base 18: mod_base = OTHER; note = 2'-O-methyluridine-3'-phosphate
  modified_base 19: mod_base = OTHER; note = 2'-O-methylguanosine-3'-phosphate
  modified_base 20: mod_base = OTHER; note = 2'-O-methyluridine-3'-phosphate
  modified_base 21: mod_base = OTHER; note = 2'-O-methylcytidine-3'-phosphate ((2S,4R)-1-[29-[[2-(acetylamino)-2-deoxy-beta-D-galactopyra nosyl]oxy]-14,14-bis[[3-[[3-[[5-[[2-(acetylamino)-2-deoxy-b eta-D-galactopyranosyl]oxy]-1-oxopentyl]amino]propyl]amino] -3-oxopropoxy]methyl]-1,12,19,25-tetraoxo-16-oxa-13,20,24-t riazanonacos-1-yl]-4-hydroxy-2-pyrrolidinyl)methyl ester
tccaatcacatctttagtgtc

SEQ ID NO: 2161 - RNA, 23 nt, synthetic construct
  source 1..23: mol_type = other RNA
  modified_base 1: mod_base = OTHER; note = 2'-O-methylguanosine-3'-phosphorothioate
  modified_base 2: mod_base = OTHER; note = 2'-deoxy-2'-fluoroadenosine-3'-phosphorothioate
  modified_base 3: mod_base = OTHER; note = 2'-O-methylcytidine-3'-phosphate
  modified_base 4: mod_base = OTHER; note = 2'-O-methyladenosine-3'-phosphate
  modified_base 5: mod_base = OTHER; note = 2'-O-methylcytidine-3'-phosphate
  modified_base 6: mod_base = OTHER; note = 2'-deoxy-2'-fluorouridine-3'-phosphate
  modified_base 7: mod_base = OTHER; note = 2'-O-methyladenosine-3'-phosphate
  modified_base 8: mod_base = OTHER; note = 2'-deoxy-2'-fluoroadenosine-3'-phosphate
  modified_base 9: mod_base = OTHER; note = 2'-deoxy-2'-fluoroadenosine-3'-phosphate
  modified_base 10: mod_base = OTHER; note = 2'-O-methylguanosine-3'-phosphate
  modified_base 11: mod_base = OTHER; note = 2'-O-methyladenosine-3'-phosphate
  modified_base 12: mod_base = OTHER; note = 2'-O-methyluridine-3'-phosphate
  modified_base 13: mod_base = OTHER; note = 2'-O-methylguanosine-3'-phosphate
  modified_base 14: mod_base = OTHER; note = 2'-deoxy-2'-fluorouridine-3'-phosphate
  modified_base 15: mod_base = OTHER; note = 2'-O-methylguanosine-3'-phosphate
  modified_base 16: mod_base = OTHER; note = 2'-deoxy-2'-fluoroadenosine-3'-phosphate
  modified_base 17: mod_base = OTHER; note = 2'-O-methyluridine-3'-phosphate
  modified_base 18: mod_base = OTHER; note = 2'-O-methyluridine-3'-phosphate
  modified_base 19: mod_base = OTHER; note = 2'-O-methylguanosine-3'-phosphate
  modified_base 20: mod_base = OTHER; note = 2'-O-methylguanosine-3'-phosphate
  modified_base 21: mod_base = OTHER; note = 2'-O-methyladenosine-3'-phosphorothioate
  modified_base 22: mod_base = OTHER; note = 2'-O-methyladenosine-3'-phosphorothioate
  modified_base 23: mod_base = OTHER; note = 2'-O-methyladenosine
gacactaaagatgtgattggaaa

SEQ ID NO: 2162 - RNA, 21 nt, synthetic construct
  source 1..21: mol_type = other RNA
  modified_base 1: mod_base = OTHER; note = 2'-O-methyladenosine-3'-phosphorothioate
  modified_base 2: mod_base = OTHER; note = 2'-O-methyladenosine-3'-phosphorothioate
  modified_base 3: mod_base = OTHER; note = 2'-O-methyladenosine-3'-phosphate
  modified_base 4: mod_base = OTHER; note = 2'-O-methyluridine-3'-phosphate
  modified_base 5: mod_base = OTHER; note = 2'-O-methylguanosine-3'-phosphate
  modified_base 6: mod_base = OTHER; note = 2'-O-methyluridine-3'-phosphate
  modified_base 7: mod_base = OTHER; note = 2'-deoxy-2'-fluoroguanosine-3'-phosphate
  modified_base 8: mod_base = OTHER; note = 2'-O-methyluridine-3'-phosphate
  modified_base 9: mod_base = OTHER; note = 2'-deoxy-2'-fluorouridine-3'-phosphate
  modified_base 10: mod_base = OTHER; note = 2'-deoxy-2'-fluorouridine-3'-phosphate
  modified_base 11: mod_base = OTHER; note = 2'-deoxy-2'-fluoroadenosine-3'-phosphate
  modified_base 12: mod_base = OTHER; note = 2'-O-methylguanosine-3'-phosphate
  modified_base 13: mod_base = OTHER; note = 2'-O-methyladenosine-3'-phosphate
  modified_base 14: mod_base = OTHER; note = 2'-O-methylcytidine-3'-phosphate
  modified_base 15: mod_base = OTHER; note = 2'-O-methyladenosine-3'-phosphate
  modified_base 16: mod_base = OTHER; note = 2'-O-methyladenosine-3'-phosphate
  modified_base 17: mod_base = OTHER; note = 2'-O-methylcytidine-3'-phosphate
  modified_base 18: mod_base = OTHER; note = 2'-O-methylguanosine-3'-phosphate
  modified_base 19: mod_base = OTHER; note = 2'-O-methyluridine-3'-phosphate
  modified_base 20: mod_base = OTHER; note = 2'-O-methylcytidine-3'-phosphate
  modified_base 21: mod_base = OTHER; note = 2'-O-methyladenosine-3'-phosphate ((2S,4R)-1-[29-[[2-(acetylamino)-2-deoxy-beta-D-galactopyra nosyl]oxy]-14,14-bis[[3-[[3-[[5-[[2-(acetylamino)-2-deoxy-b eta-D-galactopyranosyl]oxy]-1-oxopentyl]amino]propyl]amino] -3-oxopropoxy]methyl]-1,12,19,25-tetraoxo-16-oxa-13,20,24-t riazanonacos-1-yl]-4-hydroxy-2-pyrrolidinyl)methyl ester
aaatgtgtttagacaacgtca

SEQ ID NO: 2163 - RNA, 23 nt, synthetic construct
  source 1..23: mol_type = other RNA
  modified_base 1: mod_base = OTHER; note = 2'-O-methyluridine-3'-phosphorothioate
  modified_base 2: mod_base = OTHER; note = 2'-deoxy-2'-fluoroguanosine-3'-phosphorothioate
  modified_base 3: mod_base = OTHER; note = 2'-O-methyladenosine-3'-phosphate
  modified_base 4: mod_base = OTHER; note = 2'-O-methylcytidine-3'-phosphate
  modified_base 5: mod_base = OTHER; note = 2'-O-methylguanosine-3'-phosphate
  modified_base 6: mod_base = OTHER; note = 2'-deoxy-2'-fluorouridine-3'-phosphate
  modified_base 7: mod_base = OTHER; note = 2'-O-methyluridine-3'-phosphate
  modified_base 8: mod_base = OTHER; note = 2'-deoxy-2'-fluoroguanosine-3'-phosphate
  modified_base 9: mod_base = OTHER; note = 2'-deoxy-2'-fluorouridine-3'-phosphate
  modified_base 10: mod_base = OTHER; note = 2'-O-methylcytidine-3'-phosphate
  modified_base 11: mod_base = OTHER; note = 2'-O-methyluridine-3'-phosphate
  modified_base 12: mod_base = OTHER; note = 2'-O-methyladenosine-3'-phosphate
  modified_base 13: mod_base = OTHER; note = 2'-O-methyladenosine-3'-phosphate
  modified_base 14: mod_base = OTHER; note = 2'-deoxy-2'-fluoroadenosine-3'-phosphate
  modified_base 15: mod_base = OTHER; note = 2'-O-methylcytidine-3'-phosphate
  modified_base 16: mod_base = OTHER; note = 2'-deoxy-2'-fluoroadenosine-3'-phosphate
  modified_base 17: mod_base = OTHER; note = 2'-O-methylcytidine-3'-phosphate
  modified_base 18: mod_base = OTHER; note = 2'-O-methyladenosine-3'-phosphate
  modified_base 19: mod_base = OTHER; note = 2'-O-methyluridine-3'-phosphate
  modified_base 20: mod_base = OTHER; note = 2'-O-methyluridine-3'-phosphate
  modified_base 21: mod_base = OTHER; note = 2'-O-methyluridine-3'-phosphorothioate
  modified_base 22: mod_base = OTHER; note = 2'-O-methyluridine-3'-phosphorothioate
  modified_base 23: mod_base = OTHER; note = 2'-O-methylcytidine
tgacgttgtctaaacacattttc

SEQ ID NO: 2164 - RNA, 21 nt, synthetic construct
  source 1..21: mol_type = other RNA
  modified_base 1: mod_base = OTHER; note = 2'-O-methyladenosine-3'-phosphorothioate
  modified_base 2: mod_base = OTHER; note = 2'-O-methyladenosine-3'-phosphorothioate
  modified_base 3: mod_base = OTHER; note = 2'-O-methyluridine-3'-phosphate
  modified_base 4: mod_base = OTHER; note = 2'-O-methylguanosine-3'-phosphate
  modified_base 5: mod_base = OTHER; note = 2'-O-methyluridine-3'-phosphate
  modified_base 6: mod_base = OTHER; note = 2'-O-methylguanosine-3'-phosphate
  modified_base 7: mod_base = OTHER; note = 2'-deoxy-2'-fluorouridine-3'-phosphate
  modified_base 8: mod_base = OTHER; note = 2'-O-methyluridine-3'-phosphate
  modified_base 9: mod_base = OTHER; note = 2'-deoxy-2'-fluorouridine-3'-phosphate
  modified_base 10: mod_base = OTHER; note = 2'-deoxy-2'-fluoroadenosine-3'-phosphate
  modified_base 11: mod_base = OTHER; note = 2'-deoxy-2'-fluoroguanosine-3'-phosphate
  modified_base 12: mod_base = OTHER; note = 2'-O-methyladenosine-3'-phosphate
  modified_base 13: mod_base = OTHER; note = 2'-O-methylcytidine-3'-phosphate
  modified_base 14: mod_base = OTHER; note = 2'-O-methyladenosine-3'-phosphate
  modified_base 15: mod_base = OTHER; note = 2'-O-methyladenosine-3'-phosphate
  modified_base 16: mod_base = OTHER; note = 2'-O-methylcytidine-3'-phosphate
  modified_base 17: mod_base = OTHER; note = 2'-O-methylguanosine-3'-phosphate
  modified_base 18: mod_base = OTHER; note = 2'-O-methyluridine-3'-phosphate
  modified_base 19: mod_base = OTHER; note = 2'-O-methylcytidine-3'-phosphate
  modified_base 20: mod_base = OTHER; note = 2'-O-methyladenosine-3'-phosphate
  modified_base 21: mod_base = OTHER; note = 2'-O-methyluridine-3'-phosphate ((2S,4R)-1-[29-[[2-(acetylamino)-2-deoxy-beta-D-galactopyra nosyl]oxy]-14,14-bis[[3-[[3-[[5-[[2-(acetylamino)-2-deoxy-b eta-D-galactopyranosyl]oxy]-1-oxopentyl]amino]propyl]amino] -3-oxopropoxy]methyl]-1,12,19,25-tetraoxo-16-oxa-13,20,24-t riazanonacos-1-yl]-4-hydroxy-2-pyrrolidinyl)methyl ester
aatgtgtttagacaacgtcat

SEQ ID NO: 2165 - RNA, 23 nt, synthetic construct
  source 1..23: mol_type = other RNA
  modified_base 1: mod_base = OTHER; note = 2'-O-methyladenosine-3'-phosphorothioate
  modified_base 2: mod_base = OTHER; note = 2'-deoxy-2'-fluorouridine-3'-phosphorothioate
  modified_base 3: mod_base = OTHER; note = 2'-O-methylguanosine-3'-phosphate
  modified_base 4: mod_base = OTHER; note = 2'-O-methyladenosine-3'-phosphate
  modified_base 5: mod_base = OTHER; note = 2'-O-methylcytidine-3'-phosphate
  modified_base 6: mod_base = OTHER; note = 2'-deoxy-2'-fluoroguanosine-3'-phosphate
  modified_base 7: mod_base = OTHER; note = 2'-O-methyluridine-3'-phosphate
  modified_base 8: mod_base = OTHER; note = 2'-deoxy-2'-fluorouridine-3'-phosphate
  modified_base 9: mod_base = OTHER; note = 2'-deoxy-2'-fluoroguanosine-3'-phosphate
  modified_base 10: mod_base = OTHER; note = 2'-O-methyluridine-3'-phosphate
  modified_base 11: mod_base = OTHER; note = 2'-O-methylcytidine-3'-phosphate
  modified_base 12: mod_base = OTHER; note = 2'-O-methyluridine-3'-phosphate
  modified_base 13: mod_base = OTHER; note = 2'-O-methyladenosine-3'-phosphate
  modified_base 14: mod_base = OTHER; note = 2'-deoxy-2'-fluoroadenosine-3'-phosphate
  modified_base 15: mod_base = OTHER; note = 2'-O-methyladenosine-3'-phosphate
  modified_base 16: mod_base = OTHER; note = 2'-deoxy-2'-fluorocytidine-3'-phosphate
  modified_base 17: mod_base = OTHER; note = 2'-O-methyladenosine-3'-phosphate
  modified_base 18: mod_base = OTHER; note = 2'-O-methylcytidine-3'-phosphate
  modified_base 19: mod_base = OTHER; note = 2'-O-methyladenosine-3'-phosphate
  modified_base 20: mod_base = OTHER; note = 2'-O-methyluridine-3'-phosphate
  modified_base 21: mod_base = OTHER; note = 2'-O-methyluridine-3'-phosphorothioate
  modified_base 22: mod_base = OTHER; note = 2'-O-methyluridine-3'-phosphorothioate
  modified_base 23: mod_base = OTHER; note = 2'-O-methyluridine
atgacgttgtctaaacacatttt

SEQ ID NO: 2166 - RNA, 21 nt, synthetic construct
  source 1..21: mol_type = other RNA
  modified_base 1: mod_base = OTHER; note = 2'-O-methyluridine-3'-phosphorothioate
  modified_base 2: mod_base = OTHER; note = 2'-O-methyluridine-3'-phosphorothioate
  modified_base 3: mod_base = OTHER; note = 2'-O-methylguanosine-3'-phosphate
  modified_base 4: mod_base = OTHER; note = 2'-O-methyladenosine-3'-phosphate
  modified_base 5: mod_base = OTHER; note = 2'-O-methyladenosine-3'-phosphate
  modified_base 6: mod_base = OTHER; note = 2'-O-methyladenosine-3'-phosphate
  modified_base 7: mod_base = OTHER; note = 2'-deoxy-2'-fluoroadenosine-3'-phosphate
  modified_base 8: mod_base = OTHER; note = 2'-O-methyluridine-3'-phosphate
  modified_base 9: mod_base = OTHER; note = 2'-deoxy-2'-fluoroguanosine-3'-phosphate
  modified_base 10: mod_base = OTHER; note = 2'-deoxy-2'-fluorouridine-3'-phosphate
  modified_base 11: mod_base = OTHER; note = 2'-deoxy-2'-fluoroguanosine-3'-phosphate
  modified_base 12: mod_base = OTHER; note = 2'-O-methyluridine-3'-phosphate
  modified_base 13: mod_base = OTHER; note = 2'-O-methyluridine-3'-phosphate
  modified_base 14: mod_base = OTHER; note = 2'-O-methyluridine-3'-phosphate
  modified_base 15: mod_base = OTHER; note = 2'-O-methyladenosine-3'-phosphate
  modified_base 16: mod_base = OTHER; note = 2'-O-methylguanosine-3'-phosphate
  modified_base 17: mod_base = OTHER; note = 2'-O-methyladenosine-3'-phosphate
  modified_base 18: mod_base = OTHER; note = 2'-O-methylcytidine-3'-phosphate
  modified_base 19: mod_base = OTHER; note = 2'-O-methyladenosine-3'-phosphate
  modified_base 20: mod_base = OTHER; note = 2'-O-methyladenosine-3'-phosphate
  modified_base 21: mod_base = OTHER; note = 2'-O-methylcytidine-3'-phosphate ((2S,4R)-1-[29-[[2-(acetylamino)-2-deoxy-beta-D-galactopyra nosyl]oxy]-14,14-bis[[3-[[3-[[5-[[2-(acetylamino)-2-deoxy-b eta-D-galactopyranosyl]oxy]-1-oxopentyl]amino]propyl]amino] -3-oxopropoxy]methyl]-1,12,19,25-tetraoxo-16-oxa-13,20,24-t riazanonacos-1-yl]-4-hydroxy-2-pyrrolidinyl)methyl ester
ttgaaaatgtgtttagacaac

SEQ ID NO: 2167 - RNA, 23 nt, synthetic construct
  source 1..23: mol_type = other RNA
  modified_base 1: mod_base = OTHER; note = 2'-O-methylguanosine-3'-phosphorothioate
  modified_base 2: mod_base = OTHER; note = 2'-deoxy-2'-fluorouridine-3'-phosphorothioate
  modified_base 3: mod_base = OTHER; note = 2'-O-methyluridine-3'-phosphate
  modified_base 4: mod_base = OTHER; note = 2'-O-methylguanosine-3'-phosphate
  modified_base 5: mod_base = OTHER; note = 2'-O-methyluridine-3'-phosphate
  modified_base 6: mod_base = OTHER; note = 2'-deoxy-2'-fluorocytidine-3'-phosphate
  modified_base 7: mod_base = OTHER; note = 2'-O-methyluridine-3'-phosphate
  modified_base 8: mod_base = OTHER; note = 2'-deoxy-2'-fluoroadenosine-3'-phosphate
  modified_base 9: mod_base = OTHER; note = 2'-deoxy-2'-fluoroadenosine-3'-phosphate
  modified_base 10: mod_base = OTHER; note = 2'-O-methyladenosine-3'-phosphate
  modified_base 11: mod_base = OTHER; note = 2'-O-methylcytidine-3'-phosphate
  modified_base 12: mod_base = OTHER; note = 2'-O-methyladenosine-3'-phosphate
  modified_base 13: mod_base = OTHER; note = 2'-O-methylcytidine-3'-phosphate
  modified_base 14: mod_base = OTHER; note = 2'-deoxy-2'-fluoroadenosine-3'-phosphate
  modified_base 15: mod_base = OTHER; note = 2'-O-methyluridine-3'-phosphate
  modified_base 16: mod_base = OTHER; note = 2'-deoxy-2'-fluorouridine-3'-phosphate
  modified_base 17: mod_base = OTHER; note = 2'-O-methyluridine-3'-phosphate
  modified_base 18: mod_base = OTHER; note = 2'-O-methyluridine-3'-phosphate
  modified_base 19: mod_base = OTHER; note = 2'-O-methylcytidine-3'-phosphate
  modified_base 20: mod_base = OTHER; note = 2'-O-methyladenosine-3'-phosphate
  modified_base 21: mod_base = OTHER; note = 2'-O-methyladenosine-3'-phosphorothioate
  modified_base 22: mod_base = OTHER; note = 2'-O-methyluridine-3'-phosphorothioate
  modified_base 23: mod_base = OTHER; note = 2'-O-methylguanosine
gttgtctaaacacattttcaatg

SEQ ID NO: 2168 - RNA, 21 nt, synthetic construct
  source 1..21: mol_type = other RNA
  modified_base 1: mod_base = OTHER; note = 2'-O-methyladenosine-3'-phosphorothioate
  modified_base 2: mod_base = OTHER; note = 2'-O-methyluridine-3'-phosphorothioate
  modified_base 3: mod_base = OTHER; note = 2'-O-methyluridine-3'-phosphate
  modified_base 4: mod_base = OTHER; note = 2'-O-methylguanosine-3'-phosphate
  modified_base 5: mod_base = OTHER; note = 2'-O-methyladenosine-3'-phosphate
  modified_base 6: mod_base = OTHER; note = 2'-O-methyladenosine-3'-phosphate
  modified_base 7: mod_base = OTHER; note = 2'-deoxy-2'-fluoroadenosine-3'-phosphate
  modified_base 8: mod_base = OTHER; note = 2'-O-methyladenosine-3'-phosphate
  modified_base 9: mod_base = OTHER; note = 2'-deoxy-2'-fluorouridine-3'-phosphate
  modified_base 10: mod_base = OTHER; note = 2'-deoxy-2'-fluoroguanosine-3'-phosphate
  modified_base 11: mod_base = OTHER; note = 2'-deoxy-2'-fluorouridine-3'-phosphate
  modified_base 12: mod_base = OTHER; note = 2'-O-methylguanosine-3'-phosphate
  modified_base 13: mod_base = OTHER; note = 2'-O-methyluridine-3'-phosphate
  modified_base 14: mod_base = OTHER; note = 2'-O-methyluridine-3'-phosphate
  modified_base 15: mod_base = OTHER; note = 2'-O-methyluridine-3'-phosphate
  modified_base 16: mod_base = OTHER; note = 2'-O-methyladenosine-3'-phosphate
  modified_base 17: mod_base = OTHER; note = 2'-O-methylguanosine-3'-phosphate
  modified_base 18: mod_base = OTHER; note = 2'-O-methyladenosine-3'-phosphate
  modified_base 19: mod_base = OTHER; note = 2'-O-methylcytidine-3'-phosphate
  modified_base 20: mod_base = OTHER; note = 2'-O-methyladenosine-3'-phosphate
  modified_base 21: mod_base = OTHER; note = 2'-O-methyladenosine-3'-phosphate ((2S,4R)-1-[29-[[2-(acetylamino)-2-deoxy-beta-D-galactopyra nosyl]oxy]-14,14-bis[[3-[[3-[[5-[[2-(acetylamino)-2-deoxy-b eta-D-galactopyranosyl]oxy]-1-oxopentyl]amino]propyl]amino] -3-oxopropoxy]methyl]-1,12,19,25-tetraoxo-16-oxa-13,20,24-t riazanonacos-1-yl]-4-hydroxy-2-pyrrolidinyl)methyl ester
attgaaaatgtgtttagacaa

SEQ ID NO: 2169 - RNA, 23 nt, synthetic construct
  source 1..23: mol_type = other RNA
  modified_base 1: mod_base = OTHER; note = 2'-O-methyluridine-3'-phosphorothioate
  modified_base 2: mod_base = OTHER; note = 2'-deoxy-2'-fluorouridine-3'-phosphorothioate
  modified_base 3: mod_base = OTHER; note = 2'-O-methylguanosine-3'-phosphate
  modified_base 4: mod_base = OTHER; note = 2'-O-methyluridine-3'-phosphate
  modified_base 5: mod_base = OTHER; note = 2'-O-methylcytidine-3'-phosphate
  modified_base 6: mod_base = OTHER; note = 2'-deoxy-2'-fluorouridine-3'-phosphate
  modified_base 7: mod_base = OTHER; note = 2'-O-methyladenosine-3'-phosphate
  modified_base 8: mod_base = OTHER; note = 2'-deoxy-2'-fluoroadenosine-3'-phosphate
  modified_base 9: mod_base = OTHER; note = 2'-deoxy-2'-fluoroadenosine-3'-phosphate
  modified_base 10: mod_base = OTHER; note = 2'-O-methylcytidine-3'-phosphate
  modified_base 11: mod_base = OTHER; note = 2'-O-methyladenosine-3'-phosphate
  modified_base 12: mod_base = OTHER; note = 2'-O-methylcytidine-3'-phosphate
  modified_base 13: mod_base = OTHER; note = 2'-O-methyladenosine-3'-phosphate
  modified_base 14: mod_base = OTHER; note = 2'-deoxy-2'-fluorouridine-3'-phosphate
  modified_base 15: mod_base = OTHER; note = 2'-O-methyluridine-3'-phosphate
  modified_base 16: mod_base = OTHER; note = 2'-deoxy-2'-fluorouridine-3'-phosphate
  modified_base 17: mod_base = OTHER; note = 2'-O-methyluridine-3'-phosphate
  modified_base 18: mod_base = OTHER; note = 2'-O-methylcytidine-3'-phosphate
  modified_base 19: mod_base = OTHER; note = 2'-O-methyladenosine-3'-phosphate
  modified_base 20: mod_base = OTHER; note = 2'-O-methyladenosine-3'-phosphate
  modified_base 21: mod_base = OTHER; note = 2'-O-methyluridine-3'-phosphorothioate
  modified_base 22: mod_base = OTHER; note = 2'-O-methylguanosine-3'-phosphorothioate
  modified_base 23: mod_base = OTHER; note = 2'-O-methyluridine
ttgtctaaacacattttcaatgt

SEQ ID NO: 2170 - RNA, 21 nt, synthetic construct
  source 1..21: mol_type = other RNA
  modified_base 1: mod_base = OTHER; note = 2'-O-methyluridine-3'-phosphorothioate
  modified_base 2: mod_base = OTHER; note = 2'-O-methyladenosine-3'-phosphorothioate
  modified_base 3: mod_base = OTHER; note = 2'-O-methylcytidine-3'-phosphate
  modified_base 4: mod_base = OTHER; note = 2'-O-methyluridine-3'-phosphate
  modified_base 5: mod_base = OTHER; note = 2'-O-methyladenosine-3'-phosphate
  modified_base 6: mod_base = OTHER; note = 2'-O-methyladenosine-3'-phosphate
  modified_base 7: mod_base = OTHER; note = 2'-deoxy-2'-fluoroadenosine-3'-phosphate
  modified_base 8: mod_base = OTHER; note = 2'-O-methylguanosine-3'-phosphate
  modified_base 9: mod_base = OTHER; note = 2'-deoxy-2'-fluoroguanosine-3'-phosphate
  modified_base 10: mod_base = OTHER; note = 2'-deoxy-2'-fluoroadenosine-3'-phosphate
  modified_base 11: mod_base = OTHER; note = 2'-deoxy-2'-fluoroadenosine-3'-phosphate
  modified_base 12: mod_base = OTHER; note = 2'-O-methylguanosine-3'-phosphate
  modified_base 13: mod_base = OTHER; note = 2'-O-methyladenosine-3'-phosphate
  modified_base 14: mod_base = OTHER; note = 2'-O-methyladenosine-3'-phosphate
  modified_base 15: mod_base = OTHER; note = 2'-O-methyluridine-3'-phosphate
  modified_base 16: mod_base = OTHER; note = 2'-O-methyluridine-3'-phosphate
  modified_base 17: mod_base = OTHER; note = 2'-O-methylcytidine-3'-phosphate
  modified_base 18: mod_base = OTHER; note = 2'-O-methylcytidine-3'-phosphate
  modified_base 19: mod_base = OTHER; note = 2'-O-methylguanosine-3'-phosphate
  modified_base 20: mod_base = OTHER; note = 2'-O-methylguanosine-3'-phosphate
  modified_base 21: mod_base = OTHER; note = 2'-O-methyluridine-3'-phosphate ((2S,4R)-1-[29-[[2-(acetylamino)-2-deoxy-beta-D-galactopyra nosyl]oxy]-14,14-bis[[3-[[3-[[5-[[2-(acetylamino)-2-deoxy-b eta-D-galactopyranosyl]oxy]-1-oxopentyl]amino]propyl]amino] -3-oxopropoxy]methyl]-1,12,19,25-tetraoxo-16-oxa-13,20,24-t riazanonacos-1-yl]-4-hydroxy-2-pyrrolidinyl)methyl ester
tactaaaggaagaattccggt

SEQ ID NO: 2171 - RNA, 23 nt, synthetic construct
  source 1..23: mol_type = other RNA
  modified_base 1: mod_base = OTHER; note = 2'-O-methyladenosine-3'-phosphorothioate
  modified_base 2: mod_base = OTHER; note = 2'-deoxy-2'-fluorocytidine-3'-phosphorothioate
  modified_base 3: mod_base = OTHER; note = 2'-O-methylcytidine-3'-phosphate
  modified_base 4: mod_base = OTHER; note = 2'-O-methylguanosine-3'-phosphate
  modified_base 5: mod_base = OTHER; note = 2'-O-methylguanosine-3'-phosphate
  modified_base 6: mod_base = OTHER; note = 2'-deoxy-2'-fluoroadenosine-3'-phosphate
  modified_base 7: mod_base = OTHER; note = 2'-O-methyladenosine-3'-phosphate
  modified_base 8: mod_base = OTHER; note = 2'-deoxy-2'-fluorouridine-3'-phosphate
  modified_base 9: mod_base = OTHER; note = 2'-deoxy-2'-fluorouridine-3'-phosphate
  modified_base 10: mod_base = OTHER; note = 2'-O-methylcytidine-3'-phosphate
  modified_base 11: mod_base = OTHER; note = 2'-O-methyluridine-3'-phosphate
  modified_base 12: mod_base = OTHER; note = 2'-O-methyluridine-3'-phosphate
  modified_base 13: mod_base = OTHER; note = 2'-O-methylcytidine-3'-phosphate
  modified_base 14: mod_base = OTHER; note = 2'-deoxy-2'-fluorocytidine-3'-phosphate
  modified_base 15: mod_base = OTHER; note = 2'-O-methyluridine-3'-phosphate
  modified_base 16: mod_base = OTHER; note = 2'-deoxy-2'-fluorouridine-3'-phosphate
  modified_base 17: mod_base = OTHER; note = 2'-O-methyluridine-3'-phosphate
  modified_base 18: mod_base = OTHER; note = 2'-O-methyladenosine-3'-phosphate
  modified_base 19: mod_base = OTHER; note = 2'-O-methylguanosine-3'-phosphate
  modified_base 20: mod_base = OTHER; note = 2'-O-methyluridine-3'-phosphate
  modified_base 21: mod_base = OTHER; note = 2'-O-methyladenosine-3'-phosphorothioate
  modified_base 22: mod_base = OTHER; note = 2'-O-methyluridine-3'-phosphorothioate
  modified_base 23: mod_base = OTHER; note = 2'-O-methylcytidine
accggaattcttcctttagtatc

SEQ ID NO: 2172 - RNA, 21 nt, synthetic construct
  source 1..21: mol_type = other RNA
  modified_base 1: mod_base = OTHER; note = 2'-O-methyladenosine-3'-phosphorothioate
  modified_base 2: mod_base = OTHER; note = 2'-O-methylcytidine-3'-phosphorothioate
  modified_base 3: mod_base = OTHER; note = 2'-O-methyluridine-3'-phosphate
  modified_base 4: mod_base = OTHER; note = 2'-O-methyladenosine-3'-phosphate
  modified_base 5: mod_base = OTHER; note = 2'-O-methyladenosine-3'-phosphate
  modified_base 6: mod_base = OTHER; note = 2'-O-methyladenosine-3'-phosphate
  modified_base 7: mod_base = OTHER; note = 2'-deoxy-2'-fluoroguanosine-3'-phosphate
  modified_base 8: mod_base = OTHER; note = 2'-O-methylguanosine-3'-phosphate
  modified_base 9: mod_base = OTHER; note = 2'-deoxy-2'-fluoroadenosine-3'-phosphate
  modified_base 10: mod_base = OTHER; note = 2'-deoxy-2'-fluoroadenosine-3'-phosphate
  modified_base 11: mod_base = OTHER; note = 2'-deoxy-2'-fluoroguanosine-3'-phosphate
  modified_base 12: mod_base = OTHER; note = 2'-O-methyladenosine-3'-phosphate
  modified_base 13: mod_base = OTHER; note = 2'-O-methyladenosine-3'-phosphate
  modified_base 14: mod_base = OTHER; note = 2'-O-methyluridine-3'-phosphate
  modified_base 15: mod_base = OTHER; note = 2'-O-methyluridine-3'-phosphate
  modified_base 16: mod_base = OTHER; note = 2'-O-methylcytidine-3'-phosphate
  modified_base 17: mod_base = OTHER; note = 2'-O-methylcytidine-3'-phosphate
  modified_base 18: mod_base = OTHER; note = 2'-O-methylguanosine-3'-phosphate
  modified_base 19: mod_base = OTHER; note = 2'-O-methylguanosine-3'-phosphate
  modified_base 20: mod_base = OTHER; note = 2'-O-methyluridine-3'-phosphate
  modified_base 21: mod_base = OTHER; note = 2'-O-methyluridine-3'-phosphate ((2S,4R)-1-[29-[[2-(acetylamino)-2-deoxy-beta-D-galactopyra nosyl]oxy]-14,14-bis[[3-[[3-[[5-[[2-(acetylamino)-2-deoxy-b eta-D-galactopyranosyl]oxy]-1-oxopentyl]amino]propyl]amino] -3-oxopropoxy]methyl]-1,12,19,25-tetraoxo-16-oxa-13,20,24-t riazanonacos-1-yl]-4-hydroxy-2-pyrrolidinyl)methyl ester
actaaaggaagaattccggtt

SEQ ID NO: 2173 - RNA, 23 nt, synthetic construct
  source 1..23: mol_type = other RNA
  modified_base 1: mod_base = OTHER; note = 2'-O-methyladenosine-3'-phosphorothioate
  modified_base 2: mod_base = OTHER; note = 2'-deoxy-2'-fluoroadenosine-3'-phosphorothioate
  modified_base 3: mod_base = OTHER; note = 2'-O-methylcytidine-3'-phosphate
  modified_base 4: mod_base = OTHER; note = 2'-O-methylcytidine-3'-phosphate
  modified_base 5: mod_base = OTHER; note = 2'-O-methylguanosine-3'-phosphate
  modified_base 6: mod_base = OTHER; note = 2'-deoxy-2'-fluoroguanosine-3'-phosphate
  modified_base 7: mod_base = OTHER; note = 2'-O-methyladenosine-3'-phosphate
  modified_base 8: mod_base = OTHER; note = 2'-deoxy-2'-fluoroadenosine-3'-phosphate
  modified_base 9: mod_base = OTHER; note = 2'-deoxy-2'-fluorouridine-3'-phosphate
  modified_base 10: mod_base = OTHER; note = 2'-O-methyluridine-3'-phosphate
  modified_base 11: mod_base = OTHER; note = 2'-O-methylcytidine-3'-phosphate
  modified_base 12: mod_base = OTHER; note = 2'-O-methyluridine-3'-phosphate
  modified_base 13: mod_base = OTHER; note = 2'-O-methyluridine-3'-phosphate
  modified_base 14: mod_base = OTHER; note = 2'-deoxy-2'-fluorocytidine-3'-phosphate
  modified_base 15: mod_base = OTHER; note = 2'-O-methylcytidine-3'-phosphate
  modified_base 16: mod_base = OTHER; note = 2'-deoxy-2'-fluorouridine-3'-phosphate
  modified_base 17: mod_base = OTHER; note = 2'-O-methyluridine-3'-phosphate
  modified_base 18: mod_base = OTHER; note = 2'-O-methyluridine-3'-phosphate
  modified_base 19: mod_base = OTHER; note = 2'-O-methyladenosine-3'-phosphate
  modified_base 20: mod_base = OTHER; note = 2'-O-methylguanosine-3'-phosphate
  modified_base 21: mod_base = OTHER; note = 2'-O-methyluridine-3'-phosphorothioate
  modified_base 22: mod_base = OTHER; note = 2'-O-methyladenosine-3'-phosphorothioate
  modified_base 23: mod_base = OTHER; note = 2'-O-methyluridine
aaccggaattcttcctttagtat

SEQ ID NO: 2174 - RNA, 21 nt, synthetic construct
  source 1..21: mol_type = other RNA
  modified_base 1: mod_base = OTHER; note = 2'-O-methylguanosine-3'-phosphorothioate
  modified_base 2: mod_base = OTHER; note = 2'-O-methyladenosine-3'-phosphorothioate
  modified_base 3: mod_base = OTHER; note = 2'-O-methylguanosine-3'-phosphate
  modified_base 4: mod_base = OTHER; note = 2'-O-methyladenosine-3'-phosphate
  modified_base 5: mod_base = OTHER; note = 2'-O-methyluridine-3'-phosphate
  modified_base 6: mod_base = OTHER; note = 2'-O-methyladenosine-3'-phosphate
  modified_base 7: mod_base = OTHER; note = 2'-deoxy-2'-fluorocytidine-3'-phosphate
  modified_base 8: mod_base = OTHER; note = 2'-O-methyluridine-3'-phosphate
  modified_base 9: mod_base = OTHER; note = 2'-deoxy-2'-fluoroadenosine-3'-phosphate
  modified_base 10: mod_base = OTHER; note = 2'-deoxy-2'-fluoroadenosine-3'-phosphate
  modified_base 11: mod_base = OTHER; note = 2'-deoxy-2'-fluoroadenosine-3'-phosphate
  modified_base 12: mod_base = OTHER; note = 2'-O-methylguanosine-3'-phosphate
  modified_base 13: mod_base = OTHER; note = 2'-O-methylguanosine-3'-phosphate
  modified_base 14: mod_base = OTHER; note = 2'-O-methyladenosine-3'-phosphate
  modified_base 15: mod_base = OTHER; note = 2'-O-methyladenosine-3'-phosphate
  modified_base 16: mod_base = OTHER; note = 2'-O-methylguanosine-3'-phosphate
  modified_base 17: mod_base = OTHER; note = 2'-O-methyladenosine-3'-phosphate
  modified_base 18: mod_base = OTHER; note = 2'-O-methyladenosine-3'-phosphate
  modified_base 19: mod_base = OTHER; note = 2'-O-methyluridine-3'-phosphate
  modified_base 20: mod_base = OTHER; note = 2'-O-methyluridine-3'-phosphate
  modified_base 21: mod_base = OTHER; note = 2'-O-methylcytidine-3'-phosphate ((2S,4R)-1-[29-[[2-(acetylamino)-2-deoxy-beta-D-galactopyra nosyl]oxy]-14,14-bis[[3-[[3-[[5-[[2-(acetylamino)-2-deoxy-b eta-D-galactopyranosyl]oxy]-1-oxopentyl]amino]propyl]amino] -3-oxopropoxy]methyl]-1,12,19,25-tetraoxo-16-oxa-13,20,24-t riazanonacos-1-yl]-4-hydroxy-2-pyrrolidinyl)methyl ester
gagatactaaaggaagaattc

SEQ ID NO: 2175 - RNA, 23 nt, synthetic construct
  source 1..23: mol_type = other RNA
  modified_base 1: mod_base = OTHER; note = 2'-O-methylguanosine-3'-phosphorothioate
  modified_base 2: mod_base = OTHER; note = 2'-deoxy-2'-fluoroadenosine-3'-phosphorothioate
  modified_base 3: mod_base = OTHER; note = 2'-O-methyladenosine-3'-phosphate
  modified_base 4: mod_base = OTHER; note = 2'-O-methyluridine-3'-phosphate
  modified_base 5: mod_base = OTHER; note = 2'-O-methyluridine-3'-phosphate
  modified_base 6: mod_base = OTHER; note = 2'-deoxy-2'-fluorocytidine-3'-phosphate
  modified_base 7: mod_base = OTHER; note = 2'-O-methyluridine-3'-phosphate
  modified_base 8: mod_base = OTHER; note = 2'-deoxy-2'-fluorouridine-3'-phosphate
  modified_base 9: mod_base = OTHER; note = 2'-deoxy-2'-fluorocytidine-3'-phosphate
  modified_base 10: mod_base = OTHER; note = 2'-O-methylcytidine-3'-phosphate
  modified_base 11: mod_base = OTHER; note = 2'-O-methyluridine-3'-phosphate
  modified_base 12: mod_base = OTHER; note = 2'-O-methyluridine-3'-phosphate
  modified_base 13: mod_base = OTHER; note = 2'-O-methyluridine-3'-phosphate
  modified_base 14: mod_base = OTHER; note = 2'-deoxy-2'-fluoroadenosine-3'-phosphate
  modified_base 15: mod_base = OTHER; note = 2'-O-methylguanosine-3'-phosphate
  modified_base 16: mod_base = OTHER; note = 2'-deoxy-2'-fluorouridine-3'-phosphate
  modified_base 17: mod_base = OTHER; note = 2'-O-methyladenosine-3'-phosphate
  modified_base 18: mod_base = OTHER; note = 2'-O-methyluridine-3'-phosphate
  modified_base 19: mod_base = OTHER; note = 2'-O-methylcytidine-3'-phosphate
  modified_base 20: mod_base = OTHER; note = 2'-O-methyluridine-3'-phosphate
  modified_base 21: mod_base = OTHER; note = 2'-O-methylcytidine-3'-phosphorothioate
  modified_base 22: mod_base = OTHER; note = 2'-O-methylguanosine-3'-phosphorothioate
  modified_base 23: mod_base = OTHER; note = 2'-O-methyladenosine
gaattcttcctttagtatctcga

SEQ ID NO: 2176 - RNA, 21 nt, synthetic construct
  source 1..21: mol_type = other RNA
  modified_base 1: mod_base = OTHER; note = 2'-O-methylcytidine-3'-phosphorothioate
  modified_base 2: mod_base = OTHER; note = 2'-O-methylguanosine-3'-phosphorothioate
  modified_base 3: mod_base = OTHER; note = 2'-O-methyladenosine-3'-phosphate
  modified_base 4: mod_base = OTHER; note = 2'-O-methylguanosine-3'-phosphate
  modified_base 5: mod_base = OTHER; note = 2'-O-methyladenosine-3'-phosphate
  modified_base 6: mod_base = OTHER; note = 2'-O-methyluridine-3'-phosphate
  modified_base 7: mod_base = OTHER; note = 2'-deoxy-2'-fluoroadenosine-3'-phosphate
  modified_base 8: mod_base = OTHER; note = 2'-O-methylcytidine-3'-phosphate
  modified_base 9: mod_base = OTHER; note = 2'-deoxy-2'-fluorouridine-3'-phosphate
  modified_base 10: mod_base = OTHER; note = 2'-deoxy-2'-fluoroadenosine-3'-phosphate
  modified_base 11: mod_base = OTHER; note = 2'-deoxy-2'-fluoroadenosine-3'-phosphate
  modified_base 12: mod_base = OTHER; note = 2'-O-methyladenosine-3'-phosphate
  modified_base 13: mod_base = OTHER; note = 2'-O-methylguanosine-3'-phosphate
  modified_base 14: mod_base = OTHER; note = 2'-O-methylguanosine-3'-phosphate
  modified_base 15: mod_base = OTHER; note = 2'-O-methyladenosine-3'-phosphate
  modified_base 16: mod_base = OTHER; note = 2'-O-methyladenosine-3'-phosphate
  modified_base 17: mod_base = OTHER; note = 2'-O-methylguanosine-3'-phosphate
  modified_base 18: mod_base = OTHER; note = 2'-O-methyladenosine-3'-phosphate
  modified_base 19: mod_base = OTHER; note = 2'-O-methyladenosine-3'-phosphate
  modified_base 20: mod_base = OTHER; note = 2'-O-methyluridine-3'-phosphate
  modified_base 21: mod_base = OTHER; note = 2'-O-methyluridine-3'-phosphate ((2S,4R)-1-[29-[[2-(acetylamino)-2-deoxy-beta-D-galactopyra nosyl]oxy]-14,14-bis[[3-[[3-[[5-[[2-(acetylamino)-2-deoxy-b eta-D-galactopyranosyl]oxy]-1-oxopentyl]amino]propyl]amino] -3-oxopropoxy]methyl]-1,12,19,25-tetraoxo-16-oxa-13,20,24-t riazanonacos-1-yl]-4-hydroxy-2-pyrrolidinyl)methyl ester
cgagatactaaaggaagaatt

SEQ ID NO: 2177 - RNA, 23 nt, synthetic construct
  source 1..23: mol_type = other RNA
  modified_base 1: mod_base = OTHER; note = 2'-O-methyladenosine-3'-phosphorothioate
  modified_base 2: mod_base = OTHER; note = 2'-deoxy-2'-fluoroadenosine-3'-phosphorothioate
  modified_base 3: mod_base = OTHER; note = 2'-O-methyluridine-3'-phosphate
  modified_base 4: mod_base = OTHER; note = 2'-O-methyluridine-3'-phosphate
  modified_base 5: mod_base = OTHER; note = 2'-O-methylcytidine-3'-phosphate
  modified_base 6: mod_base = OTHER; note = 2'-deoxy-2'-fluorouridine-3'-phosphate
  modified_base 7: mod_base = OTHER; note = 2'-O-methyluridine-3'-phosphate
  modified_base 8: mod_base = OTHER; note = 2'-deoxy-2'-fluorocytidine-3'-phosphate
  modified_base 9: mod_base = OTHER; note = 2'-deoxy-2'-fluorocytidine-3'-phosphate
  modified_base 10: mod_base = OTHER; note = 2'-O-methyluridine-3'-phosphate
  modified_base 11: mod_base = OTHER; note = 2'-O-methyluridine-3'-phosphate
  modified_base 12: mod_base = OTHER; note = 2'-O-methyluridine-3'-phosphate
  modified_base 13: mod_base = OTHER; note = 2'-O-methyladenosine-3'-phosphate
  modified_base 14: mod_base = OTHER; note = 2'-deoxy-2'-fluoroguanosine-3'-phosphate
  modified_base 15: mod_base = OTHER; note = 2'-O-methyluridine-3'-phosphate
  modified_base 16: mod_base = OTHER; note = 2'-deoxy-2'-fluoroadenosine-3'-phosphate
  modified_base 17: mod_base = OTHER; note = 2'-O-methyluridine-3'-phosphate
  modified_base 18: mod_base = OTHER; note = 2'-O-methylcytidine-3'-phosphate
  modified_base 19: mod_base = OTHER; note = 2'-O-methyluridine-3'-phosphate
  modified_base 20: mod_base = OTHER; note = 2'-O-methylcytidine-3'-phosphate
  modified_base 21: mod_base = OTHER; note = 2'-O-methylguanosine-3'-phosphorothioate
  modified_base 22: mod_base = OTHER; note = 2'-O-methyladenosine-3'-phosphorothioate
  modified_base 23: mod_base = OTHER; note = 2'-O-methylguanosine
aattcttcctttagtatctcgag

SEQ ID NO: 2178 - RNA, 21 nt, synthetic construct
  source 1..21: mol_type = other RNA
  modified_base 1: mod_base = OTHER; note = 2'-O-methyladenosine-3'-phosphorothioate
  modified_base 2: mod_base = OTHER; note = 2'-O-methyladenosine-3'-phosphorothioate
  modified_base 3: mod_base = OTHER; note = 2'-O-methylcytidine-3'-phosphate
  modified_base 4: mod_base = OTHER; note = 2'-O-methyluridine-3'-phosphate
  modified_base 5: mod_base = OTHER; note = 2'-O-methyluridine-3'-phosphate
  modified_base 6: mod_base = OTHER; note = 2'-O-methyluridine-3'-phosphate
  modified_base 7: mod_base = OTHER; note = 2'-deoxy-2'-fluoroguanosine-3'-phosphate
  modified_base 8: mod_base = OTHER; note = 2'-O-methylguanosine-3'-phosphate
  modified_base 9: mod_base = OTHER; note = 2'-deoxy-2'-fluorocytidine-3'-phosphate
  modified_base 10: mod_base = OTHER; note = 2'-deoxy-2'-fluorouridine-3'-phosphate
  modified_base 11: mod_base = OTHER; note = 2'-deoxy-2'-fluoroguanosine-3'-phosphate
  modified_base 12: mod_base = OTHER; note = 2'-O-methyladenosine-3'-phosphate
  modified_base 13: mod_base = OTHER; note = 2'-O-methyluridine-3'-phosphate
  modified_base 14: mod_base = OTHER; note = 2'-O-methyladenosine-3'-phosphate
  modified_base 15: mod_base = OTHER; note = 2'-O-methyladenosine-3'-phosphate
  modified_base 16: mod_base = OTHER; note = 2'-O-methyluridine-3'-phosphate
  modified_base 17: mod_base = OTHER; note = 2'-O-methyladenosine-3'-phosphate
  modified_base 18: mod_base = OTHER; note = 2'-O-methyluridine-3'-phosphate
  modified_base 19: mod_base = OTHER; note = 2'-O-methyluridine-3'-phosphate
  modified_base 20: mod_base = OTHER; note = 2'-O-methylguanosine-3'-phosphate
  modified_base 21: mod_base = OTHER; note = 2'-O-methylcytidine-3'-phosphate ((2S,4R)-1-[29-[[2-(acetylamino)-2-deoxy-beta-D-galactopyra nosyl]oxy]-14,14-bis[[3-[[3-[[5-[[2-(acetylamino)-2-deoxy-b eta-D-galactopyranosyl]oxy]-1-oxopentyl]amino]propyl]amino] -3-oxopropoxy]methyl]-1,12,19,25-tetraoxo-16-oxa-13,20,24-t riazanonacos-1-yl]-4-hydroxy-2-pyrrolidinyl)methyl ester
aactttggctgataatattgc

SEQ ID NO: 2179 - RNA, 23 nt, synthetic construct
  source 1..23: mol_type = other RNA
  modified_base 1: mod_base = OTHER; note = 2'-O-methylguanosine-3'-phosphorothioate
  modified_base 2: mod_base = OTHER; note = 2'-deoxy-2'-fluorocytidine-3'-phosphorothioate
  modified_base 3: mod_base = OTHER; note = 2'-O-methyladenosine-3'-phosphate
  modified_base 4: mod_base = OTHER; note = 2'-O-methyladenosine-3'-phosphate
  modified_base 5: mod_base = OTHER; note = 2'-O-methyluridine-3'-phosphate
  modified_base 6: mod_base = OTHER; note = 2'-deoxy-2'-fluoroadenosine-3'-phosphate
  modified_base 7: mod_base = OTHER; note = 2'-O-methyluridine-3'-phosphate
  modified_base 8: mod_base = OTHER; note = 2'-deoxy-2'-fluorouridine-3'-phosphate
  modified_base 9: mod_base = OTHER; note = 2'-deoxy-2'-fluoroadenosine-3'-phosphate
  modified_base 10: mod_base = OTHER; note = 2'-O-methyluridine-3'-phosphate
  modified_base 11: mod_base = OTHER; note = 2'-O-methylcytidine-3'-phosphate
  modified_base 12: mod_base = OTHER; note = 2'-O-methyladenosine-3'-phosphate
  modified_base 13: mod_base = OTHER; note = 2'-O-methylguanosine-3'-phosphate
  modified_base 14: mod_base = OTHER; note = 2'-deoxy-2'-fluorocytidine-3'-phosphate
  modified_base 15: mod_base = OTHER; note = 2'-O-methylcytidine-3'-phosphate
  modified_base 16: mod_base = OTHER; note = 2'-deoxy-2'-fluoroadenosine-3'-phosphate
  modified_base 17: mod_base = OTHER; note = 2'-O-methyladenosine-3'-phosphate
  modified_base 18: mod_base = OTHER; note = 2'-O-methyladenosine-3'-phosphate
  modified_base 19: mod_base = OTHER; note = 2'-O-methylguanosine-3'-phosphate
  modified_base 20: mod_base = OTHER; note = 2'-O-methyluridine-3'-phosphate
  modified_base 21: mod_base = OTHER; note = 2'-O-methyluridine-3'-phosphorothioate
  modified_base 22: mod_base = OTHER; note = 2'-O-methyluridine-3'-phosphorothioate
  modified_base 23: mod_base = OTHER; note = 2'-O-methylcytidine
gcaatattatcagccaaagtttc

SEQ ID NO: 2180 - RNA, 21 nt, synthetic construct
  source 1..21: mol_type = other RNA
  modified_base 1: mod_base = OTHER; note = 2'-O-methyladenosine-3'-phosphorothioate
  modified_base 2: mod_base = OTHER; note = 2'-O-methylcytidine-3'-phosphorothioate
  modified_base 3: mod_base = OTHER; note = 2'-O-methyluridine-3'-phosphate
  modified_base 4: mod_base = OTHER; note = 2'-O-methyluridine-3'-phosphate
  modified_base 5: mod_base = OTHER; note = 2'-O-methyluridine-3'-phosphate
  modified_base 6: mod_base = OTHER; note = 2'-O-methylguanosine-3'-phosphate
  modified_base 7: mod_base = OTHER; note = 2'-deoxy-2'-fluoroguanosine-3'-phosphate
  modified_base 8: mod_base = OTHER; note = 2'-O-methylcytidine-3'-phosphate
  modified_base 9: mod_base = OTHER; note = 2'-deoxy-2'-fluorouridine-3'-phosphate
  modified_base 10: mod_base = OTHER; note = 2'-deoxy-2'-fluoroguanosine-3'-phosphate
  modified_base 11: mod_base = OTHER; note = 2'-deoxy-2'-fluoroadenosine-3'-phosphate
  modified_base 12: mod_base = OTHER; note = 2'-O-methyluridine-3'-phosphate
  modified_base 13: mod_base = OTHER; note = 2'-O-methyladenosine-3'-phosphate
  modified_base 14: mod_base = OTHER; note = 2'-O-methyladenosine-3'-phosphate
  modified_base 15: mod_base = OTHER; note = 2'-O-methyluridine-3'-phosphate
  modified_base 16: mod_base = OTHER; note = 2'-O-methyladenosine-3'-phosphate
  modified_base 17: mod_base = OTHER; note = 2'-O-methyluridine-3'-phosphate
  modified_base 18: mod_base = OTHER; note = 2'-O-methyluridine-3'-phosphate
  modified_base 19: mod_base = OTHER; note = 2'-O-methylguanosine-3'-phosphate
  modified_base 20: mod_base = OTHER; note = 2'-O-methylcytidine-3'-phosphate
  modified_base 21: mod_base = OTHER; note = 2'-O-methyladenosine-3'-phosphate ((2S,4R)-1-[29-[[2-(acetylamino)-2-deoxy-beta-D-galactopyra nosyl]oxy]-14,14-bis[[3-[[3-[[5-[[2-(acetylamino)-2-deoxy-b eta-D-galactopyranosyl]oxy]-1-oxopentyl]amino]propyl]amino] -3-oxopropoxy]methyl]-1,12,19,25-tetraoxo-16-oxa-13,20,24-t riazanonacos-1-yl]-4-hydroxy-2-pyrrolidinyl)methyl ester
actttggctgataatattgca

SEQ ID NO: 2181 - RNA, 23 nt, synthetic construct
  source 1..23: mol_type = other RNA
  modified_base 1: mod_base = OTHER; note = 2'-O-methyluridine-3'-phosphorothioate
  modified_base 2: mod_base = OTHER; note = 2'-deoxy-2'-fluoroguanosine-3'-phosphorothioate
  modified_base 3: mod_base = OTHER; note = 2'-O-methylcytidine-3'-phosphate
  modified_base 4: mod_base = OTHER; note = 2'-O-methyladenosine-3'-phosphate
  modified_base 5: mod_base = OTHER; note = 2'-O-methyladenosine-3'-phosphate
  modified_base 6: mod_base = OTHER; note = 2'-deoxy-2'-fluorouridine-3'-phosphate
  modified_base 7: mod_base = OTHER; note = 2'-O-methyladenosine-3'-phosphate
  modified_base 8: mod_base = OTHER; note = 2'-deoxy-2'-fluorouridine-3'-phosphate
  modified_base 9: mod_base = OTHER; note = 2'-deoxy-2'-fluorouridine-3'-phosphate
  modified_base 10: mod_base = OTHER; note = 2'-O-methyladenosine-3'-phosphate
  modified_base 11: mod_base = OTHER; note = 2'-O-methyluridine-3'-phosphate
  modified_base 12: mod_base = OTHER; note = 2'-O-methylcytidine-3'-phosphate
  modified_base 13: mod_base = OTHER; note = 2'-O-methyladenosine-3'-phosphate
  modified_base 14: mod_base = OTHER; note = 2'-deoxy-2'-fluoroguanosine-3'-phosphate
  modified_base 15: mod_base = OTHER; note = 2'-O-methylcytidine-3'-phosphate
  modified_base 16: mod_base = OTHER; note = 2'-deoxy-2'-fluorocytidine-3'-phosphate
  modified_base 17: mod_base = OTHER; note = 2'-O-methyladenosine-3'-phosphate
  modified_base 18: mod_base = OTHER; note = 2'-O-methyladenosine-3'-phosphate
  modified_base 19: mod_base = OTHER; note = 2'-O-methyladenosine-3'-phosphate
  modified_base 20: mod_base = OTHER; note = 2'-O-methylguanosine-3'-phosphate
  modified_base 21: mod_base = OTHER; note = 2'-O-methyluridine-3'-phosphorothioate
  modified_base 22: mod_base = OTHER; note = 2'-O-methyluridine-3'-phosphorothioate
  modified_base 23: mod_base = OTHER; note = 2'-O-methyluridine
tgcaatattatcagccaaagttt

SEQ ID NO: 2182 - RNA, 21 nt, synthetic construct
  source 1..21: mol_type = other RNA
  modified_base 1: mod_base = OTHER; note = 2'-O-methyladenosine-3'-phosphorothioate
  modified_base 2: mod_base = OTHER; note = 2'-O-methyladenosine-3'-phosphorothioate
  modified_base 3: mod_base = OTHER; note = 2'-O-methylguanosine-3'-phosphate
  modified_base 4: mod_base = OTHER; note = 2'-O-methyladenosine-3'-phosphate
  modified_base 5: mod_base = OTHER; note = 2'-O-methyladenosine-3'-phosphate
  modified_base 6: mod_base = OTHER; note = 2'-O-methyladenosine-3'-phosphate
  modified_base 7: mod_base = OTHER; note = 2'-deoxy-2'-fluorocytidine-3'-phosphate
  modified_base 8: mod_base = OTHER; note = 2'-O-methyluridine-3'-phosphate
  modified_base 9: mod_base = OTHER; note = 2'-deoxy-2'-fluorouridine-3'-phosphate
  modified_base 10: mod_base = OTHER; note = 2'-deoxy-2'-fluorouridine-3'-phosphate
  modified_base 11: mod_base = OTHER; note = 2'-deoxy-2'-fluoroguanosine-3'-phosphate
  modified_base 12: mod_base = OTHER; note = 2'-O-methylguanosine-3'-phosphate
  modified_base 13: mod_base = OTHER; note = 2'-O-methylcytidine-3'-phosphate
  modified_base 14: mod_base = OTHER; note = 2'-O-methyluridine-3'-phosphate
  modified_base 15: mod_base = OTHER; note = 2'-O-methylguanosine-3'-phosphate
  modified_base 16: mod_base = OTHER; note = 2'-O-methyladenosine-3'-phosphate
  modified_base 17: mod_base = OTHER; note = 2'-O-methyluridine-3'-phosphate
  modified_base 18: mod_base = OTHER; note = 2'-O-methyladenosine-3'-phosphate
  modified_base 19: mod_base = OTHER; note = 2'-O-methyladenosine-3'-phosphate
  modified_base 20: mod_base = OTHER; note = 2'-O-methyluridine-3'-phosphate
  modified_base 21: mod_base = OTHER; note = 2'-O-methyladenosine-3'-phosphate ((2S,4R)-1-[29-[[2-(acetylamino)-2-deoxy-beta-D-galactopyra nosyl]oxy]-14,14-bis[[3-[[3-[[5-[[2-(acetylamino)-2-deoxy-b eta-D-galactopyranosyl]oxy]-1-oxopentyl]amino]propyl]amino] -3-oxopropoxy]methyl]-1,12,19,25-tetraoxo-16-oxa-13,20,24-t riazanonacos-1-yl]-4-hydroxy-2-pyrrolidinyl)methyl ester
aagaaactttggctgataata

SEQ ID NO: 2183 - RNA, 23 nt, synthetic construct
  source 1..23: mol_type = other RNA
  modified_base 1: mod_base = OTHER; note = 2'-O-methyluridine-3'-phosphorothioate
  modified_base 2: mod_base = OTHER; note = 2'-deoxy-2'-fluoroadenosine-3'-phosphorothioate
  modified_base 3: mod_base = OTHER; note = 2'-O-methyluridine-3'-phosphate
  modified_base 4: mod_base = OTHER; note = 2'-O-methyluridine-3'-phosphate
  modified_base 5: mod_base = OTHER; note = 2'-O-methyladenosine-3'-phosphate
  modified_base 6: mod_base = OTHER; note = 2'-deoxy-2'-fluorouridine-3'-phosphate
  modified_base 7: mod_base = OTHER; note = 2'-O-methylcytidine-3'-phosphate
  modified_base 8: mod_base = OTHER; note = 2'-deoxy-2'-fluoroadenosine-3'-phosphate
  modified_base 9: mod_base = OTHER; note = 2'-deoxy-2'-fluoroguanosine-3'-phosphate
  modified_base 10: mod_base = OTHER; note = 2'-O-methylcytidine-3'-phosphate
  modified_base 11: mod_base = OTHER; note = 2'-O-methylcytidine-3'-phosphate
  modified_base 12: mod_base = OTHER; note = 2'-O-methyladenosine-3'-phosphate
  modified_base 13: mod_base = OTHER; note = 2'-O-methyladenosine-3'-phosphate
  modified_base 14: mod_base = OTHER; note = 2'-deoxy-2'-fluoroadenosine-3'-phosphate
  modified_base 15: mod_base = OTHER; note = 2'-O-methylguanosine-3'-phosphate
  modified_base 16: mod_base = OTHER; note = 2'-deoxy-2'-fluorouridine-3'-phosphate
  modified_base 17: mod_base = OTHER; note = 2'-O-methyluridine-3'-phosphate
  modified_base 18: mod_base = OTHER; note = 2'-O-methyluridine-3'-phosphate
  modified_base 19: mod_base = OTHER; note = 2'-O-methylcytidine-3'-phosphate
  modified_base 20: mod_base = OTHER; note = 2'-O-methyluridine-3'-phosphate
  modified_base 21: mod_base = OTHER; note = 2'-O-methyluridine-3'-phosphorothioate
  modified_base 22: mod_base = OTHER; note = 2'-O-methylcytidine-3'-phosphorothioate
  modified_base 23: mod_base = OTHER; note = 2'-O-methyladenosine
tattatcagccaaagtttcttca

SEQ ID NO: 2184 - RNA, 21 nt, synthetic construct
  source 1..21: mol_type = other RNA
  modified_base 1: mod_base = OTHER; note = 2'-O-methylguanosine-3'-phosphorothioate
  modified_base 2: mod_base = OTHER; note = 2'-O-methyladenosine-3'-phosphorothioate
  modified_base 3: mod_base = OTHER; note = 2'-O-methyladenosine-3'-phosphate
  modified_base 4: mod_base = OTHER; note = 2'-O-methylguanosine-3'-phosphate
  modified_base 5: mod_base = OTHER; note = 2'-O-methyladenosine-3'-phosphate
  modified_base 6: mod_base = OTHER; note = 2'-O-methyladenosine-3'-phosphate
  modified_base 7: mod_base = OTHER; note = 2'-deoxy-2'-fluoroadenosine-3'-phosphate
  modified_base 8: mod_base = OTHER; note = 2'-O-methylcytidine-3'-phosphate
  modified_base 9: mod_base = OTHER; note = 2'-deoxy-2'-fluorouridine-3'-phosphate
  modified_base 10: mod_base = OTHER; note = 2'-deoxy-2'-fluorouridine-3'-phosphate
  modified_base 11: mod_base = OTHER; note = 2'-deoxy-2'-fluorouridine-3'-phosphate
  modified_base 12: mod_base = OTHER; note = 2'-O-methylguanosine-3'-phosphate
  modified_base 13: mod_base = OTHER; note = 2'-O-methylguanosine-3'-phosphate
  modified_base 14: mod_base = OTHER; note = 2'-O-methylcytidine-3'-phosphate
  modified_base 15: mod_base = OTHER; note = 2'-O-methyluridine-3'-phosphate
  modified_base 16: mod_base = OTHER; note = 2'-O-methylguanosine-3'-phosphate
  modified_base 17: mod_base = OTHER; note = 2'-O-methyladenosine-3'-phosphate
  modified_base 18: mod_base = OTHER; note = 2'-O-methyluridine-3'-phosphate
  modified_base 19: mod_base = OTHER; note = 2'-O-methyladenosine-3'-phosphate
  modified_base 20: mod_base = OTHER; note = 2'-O-methyladenosine-3'-phosphate
  modified_base 21: mod_base = OTHER; note = 2'-O-methyluridine-3'-phosphate ((2S,4R)-1-[29-[[2-(acetylamino)-2-deoxy-beta-D-galactopyra nosyl]oxy]-14,14-bis[[3-[[3-[[5-[[2-(acetylamino)-2-deoxy-b eta-D-galactopyranosyl]oxy]-1-oxopentyl]amino]propyl]amino] -3-oxopropoxy]methyl]-1,12,19,25-tetraoxo-16-oxa-13,20,24-t riazanonacos-1-yl]-4-hydroxy-2-pyrrolidinyl)methyl ester
gaagaaactttggctgataat

SEQ ID NO: 2185 - RNA, 23 nt, synthetic construct
  source 1..23: mol_type = other RNA
  modified_base 1: mod_base = OTHER; note = 2'-O-methyladenosine-3'-phosphorothioate
  modified_base 2: mod_base = OTHER; note = 2'-deoxy-2'-fluorouridine-3'-phosphorothioate
  modified_base 3: mod_base = OTHER; note = 2'-O-methyluridine-3'-phosphate
  modified_base 4: mod_base = OTHER; note = 2'-O-methyladenosine-3'-phosphate
  modified_base 5: mod_base = OTHER; note = 2'-O-methyluridine-3'-phosphate
  modified_base 6: mod_base = OTHER; note = 2'-deoxy-2'-fluorocytidine-3'-phosphate
  modified_base 7: mod_base = OTHER; note = 2'-O-methyladenosine-3'-phosphate
  modified_base 8: mod_base = OTHER; note = 2'-deoxy-2'-fluoroguanosine-3'-phosphate
  modified_base 9: mod_base = OTHER; note = 2'-deoxy-2'-fluorocytidine-3'-phosphate
  modified_base 10: mod_base = OTHER; note = 2'-O-methylcytidine-3'-phosphate
  modified_base 11: mod_base = OTHER; note = 2'-O-methyladenosine-3'-phosphate
  modified_base 12: mod_base = OTHER; note = 2'-O-methyladenosine-3'-phosphate
  modified_base 13: mod_base = OTHER; note = 2'-O-methyladenosine-3'-phosphate
  modified_base 14: mod_base = OTHER; note = 2'-deoxy-2'-fluoroguanosine-3'-phosphate
  modified_base 15: mod_base = OTHER; note = 2'-O-methyluridine-3'-phosphate
  modified_base 16: mod_base = OTHER; note = 2'-deoxy-2'-fluorouridine-3'-phosphate
  modified_base 17: mod_base = OTHER; note = 2'-O-methyluridine-3'-phosphate
  modified_base 18: mod_base = OTHER; note = 2'-O-methylcytidine-3'-phosphate
  modified_base 19: mod_base = OTHER; note = 2'-O-methyluridine-3'-phosphate
  modified_base 20: mod_base = OTHER; note = 2'-O-methyluridine-3'-phosphate
  modified_base 21: mod_base = OTHER; note = 2'-O-methylcytidine-3'-phosphorothioate
  modified_base 22: mod_base = OTHER; note = 2'-O-methyladenosine-3'-phosphorothioate
  modified_base 23: mod_base = OTHER; note = 2'-O-methyluridine
attatcagccaaagtttcttcat

SEQ ID NO: 2186 - RNA, 21 nt, synthetic construct
  source 1..21: mol_type = other RNA
  modified_base 1: mod_base = OTHER; note = 2'-O-methyladenosine-3'-phosphorothioate
  modified_base 2: mod_base = OTHER; note = 2'-O-methyladenosine-3'-phosphorothioate
  modified_base 3: mod_base = OTHER; note = 2'-O-methyladenosine-3'-phosphate
  modified_base 4: mod_base = OTHER; note = 2'-O-methyluridine-3'-phosphate
  modified_base 5: mod_base = OTHER; note = 2'-O-methylguanosine-3'-phosphate
  modified_base 6: mod_base = OTHER; note = 2'-O-methylguanosine-3'-phosphate
  modified_base 7: mod_base = OTHER; note = 2'-deoxy-2'-fluorocytidine-3'-phosphate
  modified_base 8: mod_base = OTHER; note = 2'-O-methyluridine-3'-phosphate
  modified_base 9: mod_base = OTHER; note = 2'-deoxy-2'-fluoroguanosine-3'-phosphate
  modified_base 10: mod_base = OTHER; note = 2'-deoxy-2'-fluoroadenosine-3'-phosphate
  modified_base 11: mod_base = OTHER; note = 2'-deoxy-2'-fluoroguanosine-3'-phosphate
  modified_base 12: mod_base = OTHER; note = 2'-O-methyladenosine-3'-phosphate
  modified_base 13: mod_base = OTHER; note = 2'-O-methyladenosine-3'-phosphate
  modified_base 14: mod_base = OTHER; note = 2'-O-methylguanosine-3'-phosphate
  modified_base 15: mod_base = OTHER; note = 2'-O-methyladenosine-3'-phosphate
  modified_base 16: mod_base = OTHER; note = 2'-O-methylcytidine-3'-phosphate
  modified_base 17: mod_base = OTHER; note = 2'-O-methyluridine-3'-phosphate
  modified_base 18: mod_base = OTHER; note = 2'-O-methylguanosine-3'-phosphate
  modified_base 19: mod_base = OTHER; note = 2'-O-methyladenosine-3'-phosphate
  modified_base 20: mod_base = OTHER; note = 2'-O-methylcytidine-3'-phosphate
  modified_base 21: mod_base = OTHER; note = 2'-O-methyladenosine-3'-phosphate ((2S,4R)-1-[29-[[2-(acetylamino)-2-deoxy-beta-D-galactopyra nosyl]oxy]-14,14-bis[[3-[[3-[[5-[[2-(acetylamino)-2-deoxy-b eta-D-galactopyranosyl]oxy]-1-oxopentyl]amino]propyl]amino] -3-oxopropoxy]methyl]-1,12,19,25-tetraoxo-16-oxa-13,20,24-t riazanonacos-1-yl]-4-hydroxy-2-pyrrolidinyl)methyl ester
aaatggctgagaagactgaca

SEQ ID NO: 2187 - RNA, 23 nt, synthetic construct
  source 1..23: mol_type = other RNA
  modified_base 1: mod_base = OTHER; note = 2'-O-methyluridine-3'-phosphorothioate
  modified_base 2: mod_base = OTHER; note = 2'-deoxy-2'-fluoroguanosine-3'-phosphorothioate
  modified_base 3: mod_base = OTHER; note = 2'-O-methyluridine-3'-phosphate
  modified_base 4: mod_base = OTHER; note = 2'-O-methylcytidine-3'-phosphate
  modified_base 5: mod_base = OTHER; note = 2'-O-methyladenosine-3'-phosphate
  modified_base 6: mod_base = OTHER; note = 2'-deoxy-2'-fluoroguanosine-3'-phosphate
  modified_base 7: mod_base = OTHER; note = 2'-O-methyluridine-3'-phosphate
  modified_base 8: mod_base = OTHER; note = 2'-deoxy-2'-fluorocytidine-3'-phosphate
  modified_base 9: mod_base = OTHER; note = 2'-deoxy-2'-fluorouridine-3'-phosphate
  modified_base 10: mod_base = OTHER; note = 2'-O-methyluridine-3'-phosphate
  modified_base 11: mod_base = OTHER; note = 2'-O-methylcytidine-3'-phosphate
  modified_base 12: mod_base = OTHER; note = 2'-O-methyluridine-3'-phosphate
  modified_base 13: mod_base = OTHER; note = 2'-O-methylcytidine-3'-phosphate
  modified_base 14: mod_base = OTHER; note = 2'-deoxy-2'-fluoroadenosine-3'-phosphate
  modified_base 15: mod_base = OTHER; note = 2'-O-methylguanosine-3'-phosphate
  modified_base 16: mod_base = OTHER; note = 2'-deoxy-2'-fluorocytidine-3'-phosphate
  modified_base 17: mod_base = OTHER; note = 2'-O-methylcytidine-3'-phosphate
  modified_base 18: mod_base = OTHER; note = 2'-O-methyladenosine-3'-phosphate
  modified_base 19: mod_base = OTHER; note = 2'-O-methyluridine-3'-phosphate
  modified_base 20: mod_base = OTHER; note = 2'-O-methyluridine-3'-phosphate
  modified_base 21: mod_base = OTHER; note = 2'-O-methyluridine-3'-phosphorothioate
  modified_base 22: mod_base = OTHER; note = 2'-O-methylguanosine-3'-phosphorothioate
  modified_base 23: mod_base = OTHER; note = 2'-O-methyladenosine
tgtcagtcttctcagccatttga

SEQ ID NO: 2188 - RNA, 21 nt, synthetic construct
  source 1..21: mol_type = other RNA
  modified_base 1: mod_base = OTHER; note = 2'-O-methyladenosine-3'-phosphorothioate
  modified_base 2: mod_base = OTHER; note = 2'-O-methyladenosine-3'-phosphorothioate
  modified_base 3: mod_base = OTHER; note = 2'-O-methyluridine-3'-phosphate
  modified_base 4: mod_base = OTHER; note = 2'-O-methylguanosine-3'-phosphate
  modified_base 5: mod_base = OTHER; note = 2'-O-methylguanosine-3'-phosphate
  modified_base 6: mod_base = OTHER; note = 2'-O-methylcytidine-3'-phosphate
  modified_base 7: mod_base = OTHER; note = 2'-deoxy-2'-fluorouridine-3'-phosphate
  modified_base 8: mod_base = OTHER; note = 2'-O-methylguanosine-3'-phosphate
  modified_base 9: mod_base = OTHER; note = 2'-deoxy-2'-fluoroadenosine-3'-phosphate
  modified_base 10: mod_base = OTHER; note = 2'-deoxy-2'-fluoroguanosine-3'-phosphate
  modified_base 11: mod_base = OTHER; note = 2'-deoxy-2'-fluoroadenosine-3'-phosphate
  modified_base 12: mod_base = OTHER; note = 2'-O-methyladenosine-3'-phosphate
  modified_base 13: mod_base = OTHER; note = 2'-O-methylguanosine-3'-phosphate
  modified_base 14: mod_base = OTHER; note = 2'-O-methyladenosine-3'-phosphate
  modified_base 15: mod_base = OTHER; note = 2'-O-methylcytidine-3'-phosphate
  modified_base 16: mod_base = OTHER; note = 2'-O-methyluridine-3'-phosphate
  modified_base 17: mod_base = OTHER; note = 2'-O-methylguanosine-3'-phosphate
  modified_base 18: mod_base = OTHER; note = 2'-O-methyladenosine-3'-phosphate
  modified_base 19: mod_base = OTHER; note = 2'-O-methylcytidine-3'-phosphate
  modified_base 20: mod_base = OTHER; note = 2'-O-methyladenosine-3'-phosphate
  modified_base 21: mod_base = OTHER; note = 2'-O-methyluridine-3'-phosphate ((2S,4R)-1-[29-[[2-(acetylamino)-2-deoxy-beta-D-galactopyra nosyl]oxy]-14,14-bis[[3-[[3-[[5-[[2-(acetylamino)-2-deoxy-b eta-D-galactopyranosyl]oxy]-1-oxopentyl]amino]propyl]amino] -3-oxopropoxy]methyl]-1,12,19,25-tetraoxo-16-oxa-13,20,24-t riazanonacos-1-yl]-4-hydroxy-2-pyrrolidinyl)methyl ester
aatggctgagaagactgacat

SEQ ID NO: 2189 - RNA, 23 nt, synthetic construct
  source 1..23: mol_type = other RNA
  modified_base 1: mod_base = OTHER; note = 2'-O-methyladenosine-3'-phosphorothioate
  modified_base 2: mod_base = OTHER; note = 2'-deoxy-2'-fluorouridine-3'-phosphorothioate
  modified_base 3: mod_base = OTHER; note = 2'-O-methylguanosine-3'-phosphate
  modified_base 4: mod_base = OTHER; note = 2'-O-methyluridine-3'-phosphate
  modified_base 5: mod_base = OTHER; note = 2'-O-methylcytidine-3'-phosphate
  modified_base 6: mod_base = OTHER; note = 2'-deoxy-2'-fluoroadenosine-3'-phosphate
  modified_base 7: mod_base = OTHER; note = 2'-O-methylguanosine-3'-phosphate
  modified_base 8: mod_base = OTHER; note = 2'-deoxy-2'-fluorouridine-3'-phosphate
  modified_base 9: mod_base = OTHER; note = 2'-deoxy-2'-fluorocytidine-3'-phosphate
  modified_base 10: mod_base = OTHER; note = 2'-O-methyluridine-3'-phosphate
  modified_base 11: mod_base = OTHER; note = 2'-O-methyluridine-3'-phosphate
  modified_base 12: mod_base = OTHER; note = 2'-O-methylcytidine-3'-phosphate
  modified_base 13: mod_base = OTHER; note = 2'-O-methyluridine-3'-phosphate
  modified_base 14: mod_base = OTHER; note = 2'-deoxy-2'-fluorocytidine-3'-phosphate
  modified_base 15: mod_base = OTHER; note = 2'-O-methyladenosine-3'-phosphate
  modified_base 16: mod_base = OTHER; note = 2'-deoxy-2'-fluoroguanosine-3'-phosphate
  modified_base 17: mod_base = OTHER; note = 2'-O-methylcytidine-3'-phosphate
  modified_base 18: mod_base = OTHER; note = 2'-O-methylcytidine-3'-phosphate
  modified_base 19: mod_base = OTHER; note = 2'-O-methyladenosine-3'-phosphate
  modified_base 20: mod_base = OTHER; note = 2'-O-methyluridine-3'-phosphate
  modified_base 21: mod_base = OTHER; note = 2'-O-methyluridine-3'-phosphorothioate
  modified_base 22: mod_base = OTHER; note = 2'-O-methyluridine-3'-phosphorothioate
  modified_base 23: mod_base = OTHER; note = 2'-O-methylguanosine
atgtcagtcttctcagccatttg

SEQ ID NO: 2190 - RNA, 21 nt, synthetic construct
  source 1..21: mol_type = other RNA
  modified_base 1: mod_base = OTHER; note = 2'-O-methyluridine-3'-phosphorothioate
  modified_base 2: mod_base = OTHER; note = 2'-O-methyladenosine-3'-phosphorothioate
  modified_base 3: mod_base = OTHER; note = 2'-O-methyluridine-3'-phosphate
  modified_base 4: mod_base = OTHER; note = 2'-O-methylcytidine-3'-phosphate
  modified_base 5: mod_base = OTHER; note = 2'-O-methyladenosine-3'-phosphate
  modified_base 6: mod_base = OTHER; note = 2'-O-methyladenosine-3'-phosphate
  modified_base 7: mod_base = OTHER; note = 2'-deoxy-2'-fluoroadenosine-3'-phosphate
  modified_base 8: mod_base = OTHER; note = 2'-O-methyluridine-3'-phosphate
  modified_base 9: mod_base = OTHER; note = 2'-deoxy-2'-fluoroguanosine-3'-phosphate
  modified_base 10: mod_base = OTHER; note = 2'-deoxy-2'-fluoroguanosine-3'-phosphate
  modified_base 11: mod_base = OTHER; note = 2'-deoxy-2'-fluorocytidine-3'-phosphate
  modified_base 12: mod_base = OTHER; note = 2'-O-methyluridine-3'-phosphate
  modified_base 13: mod_base = OTHER; note = 2'-O-methylguanosine-3'-phosphate
  modified_base 14: mod_base = OTHER; note = 2'-O-methyladenosine-3'-phosphate
  modified_base 15: mod_base = OTHER; note = 2'-O-methylguanosine-3'-phosphate
  modified_base 16: mod_base = OTHER; note = 2'-O-methyladenosine-3'-phosphate
  modified_base 17: mod_base = OTHER; note = 2'-O-methyladenosine-3'-phosphate
  modified_base 18: mod_base = OTHER; note = 2'-O-methylguanosine-3'-phosphate
  modified_base 19: mod_base = OTHER; note = 2'-O-methyladenosine-3'-phosphate
  modified_base 20: mod_base = OTHER; note = 2'-O-methylcytidine-3'-phosphate
  modified_base 21: mod_base = OTHER; note = 2'-O-methyluridine-3'-phosphate ((2S,4R)-1-[29-[[2-(acetylamino)-2-deoxy-beta-D-galactopyra nosyl]oxy]-14,14-bis[[3-[[3-[[5-[[2-(acetylamino)-2-deoxy-b eta-D-galactopyranosyl]oxy]-1-oxopentyl]amino]propyl]amino] -3-oxopropoxy]methyl]-1,12,19,25-tetraoxo-16-oxa-13,20,24-t riazanonacos-1-yl]-4-hydroxy-2-pyrrolidinyl)methyl ester
tatcaaatggctgagaagact

SEQ ID NO: 2191 - RNA, 23 nt, synthetic construct
  source 1..23: mol_type = other RNA
  modified_base 1: mod_base = OTHER; note = 2'-O-methyladenosine-3'-phosphorothioate
  modified_base 2: mod_base = OTHER; note = 2'-deoxy-2'-fluoroguanosine-3'-phosphorothioate
  modified_base 3: mod_base = OTHER; note = 2'-O-methyluridine-3'-phosphate
  modified_base 4: mod_base = OTHER; note = 2'-O-methylcytidine-3'-phosphate
  modified_base 5: mod_base = OTHER; note = 2'-O-methyluridine-3'-phosphate
  modified_base 6: mod_base = OTHER; note = 2'-deoxy-2'-fluorouridine-3'-phosphate
  modified_base 7: mod_base = OTHER; note = 2'-O-methylcytidine-3'-phosphate
  modified_base 8: mod_base = OTHER; note = 2'-deoxy-2'-fluorouridine-3'-phosphate
  modified_base 9: mod_base = OTHER; note = 2'-deoxy-2'-fluorocytidine-3'-phosphate
  modified_base 10: mod_base = OTHER; note = 2'-O-methyladenosine-3'-phosphate
  modified_base 11: mod_base = OTHER; note = 2'-O-methylguanosine-3'-phosphate
  modified_base 12: mod_base = OTHER; note = 2'-O-methylcytidine-3'-phosphate
  modified_base 13: mod_base = OTHER; note = 2'-O-methylcytidine-3'-phosphate
  modified_base 14: mod_base = OTHER; note = 2'-deoxy-2'-fluoroadenosine-3'-phosphate
  modified_base 15: mod_base = OTHER; note = 2'-O-methyluridine-3'-phosphate
  modified_base 16: mod_base = OTHER; note = 2'-deoxy-2'-fluorouridine-3'-phosphate
  modified_base 17: mod_base = OTHER; note = 2'-O-methyluridine-3'-phosphate
  modified_base 18: mod_base = OTHER; note = 2'-O-methylguanosine-3'-phosphate
  modified_base 19: mod_base = OTHER; note = 2'-O-methyladenosine-3'-phosphate
  modified_base 20: mod_base = OTHER; note = 2'-O-methyluridine-3'-phosphate
  modified_base 21: mod_base = OTHER; note = 2'-O-methyladenosine-3'-phosphorothioate
  modified_base 22: mod_base = OTHER; note = 2'-O-methyluridine-3'-phosphorothioate
  modified_base 23: mod_base = OTHER; note = 2'-O-methylcytidine
agtcttctcagccatttgatatc

SEQ ID NO: 2192 - RNA, 21 nt, synthetic construct
  source 1..21: mol_type = other RNA
  modified_base 1: mod_base = OTHER; note = 2'-O-methyladenosine-3'-phosphorothioate
  modified_base 2: mod_base = OTHER; note = 2'-O-methyluridine-3'-phosphorothioate
  modified_base 3: mod_base = OTHER; note = 2'-O-methyladenosine-3'-phosphate
  modified_base 4: mod_base = OTHER; note = 2'-O-methyluridine-3'-phosphate
  modified_base 5: mod_base = OTHER; note = 2'-O-methylcytidine-3'-phosphate
  modified_base 6: mod_base = OTHER; note = 2'-O-methyladenosine-3'-phosphate
  modified_base 7: mod_base = OTHER; note = 2'-deoxy-2'-fluoroadenosine-3'-phosphate
  modified_base 8: mod_base = OTHER; note = 2'-O-methyladenosine-3'-phosphate
  modified_base 9: mod_base = OTHER; note = 2'-deoxy-2'-fluorouridine-3'-phosphate
  modified_base 10: mod_base = OTHER; note = 2'-deoxy-2'-fluoroguanosine-3'-phosphate
  modified_base 11: mod_base = OTHER; note = 2'-deoxy-2'-fluoroguanosine-3'-phosphate
  modified_base 12: mod_base = OTHER; note = 2'-O-methylcytidine-3'-phosphate
  modified_base 13: mod_base = OTHER; note = 2'-O-methyluridine-3'-phosphate
  modified_base 14: mod_base = OTHER; note = 2'-O-methylguanosine-3'-phosphate
  modified_base 15: mod_base = OTHER; note = 2'-O-methyladenosine-3'-phosphate
  modified_base 16: mod_base = OTHER; note = 2'-O-methylguanosine-3'-phosphate
  modified_base 17: mod_base = OTHER; note = 2'-O-methyladenosine-3'-phosphate
  modified_base 18: mod_base = OTHER; note = 2'-O-methyladenosine-3'-phosphate
  modified_base 19: mod_base = OTHER; note = 2'-O-methylguanosine-3'-phosphate
  modified_base 20: mod_base = OTHER; note = 2'-O-methyladenosine-3'-phosphate
  modified_base 21: mod_base = OTHER; note = 2'-O-methylcytidine-3'-phosphate ((2S,4R)-1-[29-[[2-(acetylamino)-2-deoxy-beta-D-galactopyra nosyl]oxy]-14,14-bis[[3-[[3-[[5-[[2-(acetylamino)-2-deoxy-b eta-D-galactopyranosyl]oxy]-1-oxopentyl]amino]propyl]amino] -3-oxopropoxy]methyl]-1,12,19,25-tetraoxo-16-oxa-13,20,24-t riazanonacos-1-yl]-4-hydroxy-2-pyrrolidinyl)methyl ester
atatcaaatggctgagaagac

SEQ ID NO: 2193 - RNA, 23 nt, synthetic construct
  source 1..23: mol_type = other RNA
  modified_base 1: mod_base = OTHER; note = 2'-O-methylguanosine-3'-phosphorothioate
  modified_base 2: mod_base = OTHER; note = 2'-deoxy-2'-fluorouridine-3'-phosphorothioate
  modified_base 3: mod_base = OTHER; note = 2'-O-methylcytidine-3'-phosphate
  modified_base 4: mod_base = OTHER; note = 2'-O-methyluridine-3'-phosphate
  modified_base 5: mod_base = OTHER; note = 2'-O-methyluridine-3'-phosphate
  modified_base 6: mod_base = OTHER; note = 2'-deoxy-2'-fluorocytidine-3'-phosphate
  modified_base 7: mod_base = OTHER; note = 2'-O-methyluridine-3'-phosphate
  modified_base 8: mod_base = OTHER; note = 2'-deoxy-2'-fluorocytidine-3'-phosphate
  modified_base 9: mod_base = OTHER; note = 2'-deoxy-2'-fluoroadenosine-3'-phosphate
  modified_base 10: mod_base = OTHER; note = 2'-O-methylguanosine-3'-phosphate
  modified_base 11: mod_base = OTHER; note = 2'-O-methylcytidine-3'-phosphate
  modified_base 12: mod_base = OTHER; note = 2'-O-methylcytidine-3'-phosphate
  modified_base 13: mod_base = OTHER; note = 2'-O-methyladenosine-3'-phosphate
  modified_base 14: mod_base = OTHER; note = 2'-deoxy-2'-fluorouridine-3'-phosphate
  modified_base 15: mod_base = OTHER; note = 2'-O-methyluridine-3'-phosphate
  modified_base 16: mod_base = OTHER; note = 2'-deoxy-2'-fluorouridine-3'-phosphate
  modified_base 17: mod_base = OTHER; note = 2'-O-methylguanosine-3'-phosphate
  modified_base 18: mod_base = OTHER; note = 2'-O-methyladenosine-3'-phosphate
  modified_base 19: mod_base = OTHER; note = 2'-O-methyluridine-3'-phosphate
  modified_base 20: mod_base = OTHER; note = 2'-O-methyladenosine-3'-phosphate
  modified_base 21: mod_base = OTHER; note = 2'-O-methyluridine-3'-phosphorothioate
  modified_base 22: mod_base = OTHER; note = 2'-O-methylcytidine-3'-phosphorothioate
  modified_base 23: mod_base = OTHER; note = 2'-O-methyluridine
gtcttctcagccatttgatatct

SEQ ID NO: 2194 - RNA, 21 nt, synthetic construct
  source 1..21: mol_type = other RNA
  modified_base 1: mod_base = OTHER; note = 2'-O-methylguanosine-3'-phosphorothioate
  modified_base 2: mod_base = OTHER; note = 2'-O-methyluridine-3'-phosphorothioate
  modified_base 3: mod_base = OTHER; note = 2'-O-methylguanosine-3'-phosphate
  modified_base 4: mod_base = OTHER; note = 2'-O-methylguanosine-3'-phosphate
  modified_base 5: mod_base = OTHER; note = 2'-O-methyluridine-3'-phosphate
  modified_base 6: mod_base = OTHER; note = 2'-O-methyluridine-3'-phosphate
  modified_base 7: mod_base = OTHER; note = 2'-deoxy-2'-fluorocytidine-3'-phosphate
  modified_base 8: mod_base = OTHER; note = 2'-O-methyluridine-3'-phosphate
  modified_base 9: mod_base = OTHER; note = 2'-deoxy-2'-fluorouridine-3'-phosphate
  modified_base 10: mod_base = OTHER; note = 2'-deoxy-2'-fluoroadenosine-3'-phosphate
  modified_base 11: mod_base = OTHER; note = 2'-deoxy-2'-fluoroadenosine-3'-phosphate
  modified_base 12: mod_base = OTHER; note = 2'-O-methyladenosine-3'-phosphate
  modified_base 13: mod_base = OTHER; note = 2'-O-methyluridine-3'-phosphate
  modified_base 14: mod_base = OTHER; note = 2'-O-methyluridine-3'-phosphate
  modified_base 15: mod_base = OTHER; note = 2'-O-methylguanosine-3'-phosphate
  modified_base 16: mod_base = OTHER; note = 2'-O-methyluridine-3'-phosphate
  modified_base 17: mod_base = OTHER; note = 2'-O-methyladenosine-3'-phosphate
  modified_base 18: mod_base = OTHER; note = 2'-O-methyladenosine-3'-phosphate
  modified_base 19: mod_base = OTHER; note = 2'-O-methylguanosine-3'-phosphate
  modified_base 20: mod_base = OTHER; note = 2'-O-methylcytidine-3'-phosphate
  modified_base 21: mod_base = OTHER; note = 2'-O-methyluridine-3'-phosphate ((2S,4R)-1-[29-[[2-(acetylamino)-2-deoxy-beta-D-galactopyra nosyl]oxy]-14,14-bis[[3-[[3-[[5-[[2-(acetylamino)-2-deoxy-b eta-D-galactopyranosyl]oxy]-1-oxopentyl]amino]propyl]amino] -3-oxopropoxy]methyl]-1,12,19,25-tetraoxo-16-oxa-13,20,24-t riazanonacos-1-yl]-4-hydroxy-2-pyrrolidinyl)methyl ester
gtggttcttaaattgtaagct

SEQ ID NO: 2195 - RNA, 23 nt, synthetic construct
  source 1..23: mol_type = other RNA
  modified_base 1: mod_base = OTHER; note = 2'-O-methyladenosine-3'-phosphorothioate
  modified_base 2: mod_base = OTHER; note = 2'-deoxy-2'-fluoroguanosine-3'-phosphorothioate
  modified_base 3: mod_base = OTHER; note = 2'-O-methylcytidine-3'-phosphate
  modified_base 4: mod_base = OTHER; note = 2'-O-methyluridine-3'-phosphate
  modified_base 5: mod_base = OTHER; note = 2'-O-methyluridine-3'-phosphate
  modified_base 6: mod_base = OTHER; note = 2'-deoxy-2'-fluoroadenosine-3'-phosphate
  modified_base 7: mod_base = OTHER; note = 2'-O-methylcytidine-3'-phosphate
  modified_base 8: mod_base = OTHER; note = 2'-deoxy-2'-fluoroadenosine-3'-phosphate
  modified_base 9: mod_base = OTHER; note = 2'-deoxy-2'-fluoroadenosine-3'-phosphate
  modified_base 10: mod_base = OTHER; note = 2'-O-methyluridine-3'-phosphate
  modified_base 11: mod_base = OTHER; note = 2'-O-methyluridine-3'-phosphate
  modified_base 12: mod_base = OTHER; note = 2'-O-methyluridine-3'-phosphate
  modified_base 13: mod_base = OTHER; note = 2'-O-methyladenosine-3'-phosphate
  modified_base 14: mod_base = OTHER; note = 2'-deoxy-2'-fluoroadenosine-3'-phosphate
  modified_base 15: mod_base = OTHER; note = 2'-O-methylguanosine-3'-phosphate
  modified_base 16: mod_base = OTHER; note = 2'-deoxy-2'-fluoroadenosine-3'-phosphate
  modified_base 17: mod_base = OTHER; note = 2'-O-methyladenosine-3'-phosphate
  modified_base 18: mod_base = OTHER; note = 2'-O-methylcytidine-3'-phosphate
  modified_base 19: mod_base = OTHER; note = 2'-O-methylcytidine-3'-phosphate
  modified_base 20: mod_base = OTHER; note = 2'-O-methyladenosine-3'-phosphate
  modified_base 21: mod_base = OTHER; note = 2'-O-methylcytidine-3'-phosphorothioate
  modified_base 22: mod_base = OTHER; note = 2'-O-methyluridine-3'-phosphorothioate
  modified_base 23: mod_base = OTHER; note = 2'-O-methylguanosine
agcttacaatttaagaaccactg

SEQ ID NO: 2196 - RNA, 21 nt, synthetic construct
  source 1..21: mol_type = other RNA
  modified_base 1: mod_base = OTHER; note = 2'-O-methyluridine-3'-phosphorothioate
  modified_base 2: mod_base = OTHER; note = 2'-O-methylguanosine-3'-phosphorothioate
  modified_base 3: mod_base = OTHER; note = 2'-O-methylguanosine-3'-phosphate
  modified_base 4: mod_base = OTHER; note = 2'-O-methyluridine-3'-phosphate
  modified_base 5: mod_base = OTHER; note = 2'-O-methyluridine-3'-phosphate
  modified_base 6: mod_base = OTHER; note = 2'-O-methylcytidine-3'-phosphate
  modified_base 7: mod_base = OTHER; note = 2'-deoxy-2'-fluorouridine-3'-phosphate
  modified_base 8: mod_base = OTHER; note = 2'-O-methyluridine-3'-phosphate
  modified_base 9: mod_base = OTHER; note = 2'-deoxy-2'-fluoroadenosine-3'-phosphate
  modified_base 10: mod_base = OTHER; note = 2'-deoxy-2'-fluoroadenosine-3'-phosphate
  modified_base 11: mod_base = OTHER; note = 2'-deoxy-2'-fluoroadenosine-3'-phosphate
  modified_base 12: mod_base = OTHER; note = 2'-O-methyluridine-3'-phosphate
  modified_base 13: mod_base = OTHER; note = 2'-O-methyluridine-3'-phosphate
  modified_base 14: mod_base = OTHER; note = 2'-O-methylguanosine-3'-phosphate
  modified_base 15: mod_base = OTHER; note = 2'-O-methyluridine-3'-phosphate
  modified_base 16: mod_base = OTHER; note = 2'-O-methyladenosine-3'-phosphate
  modified_base 17: mod_base = OTHER; note = 2'-O-methyladenosine-3'-phosphate
  modified_base 18: mod_base = OTHER; note = 2'-O-methylguanosine-3'-phosphate
  modified_base 19: mod_base = OTHER; note = 2'-O-methylcytidine-3'-phosphate
  modified_base 20: mod_base = OTHER; note = 2'-O-methyluridine-3'-phosphate
  modified_base 21: mod_base = OTHER; note = 2'-O-methylcytidine-3'-phosphate ((2S,4R)-1-[29-[[2-(acetylamino)-2-deoxy-beta-D-galactopyra nosyl]oxy]-14,14-bis[[3-[[3-[[5-[[2-(acetylamino)-2-deoxy-b eta-D-galactopyranosyl]oxy]-1-oxopentyl]amino]propyl]amino] -3-oxopropoxy]methyl]-1,12,19,25-tetraoxo-16-oxa-13,20,24-t riazanonacos-1-yl]-4-hydroxy-2-pyrrolidinyl)methyl ester
tggttcttaaattgtaagctc

SEQ ID NO: 2197 - RNA, 23 nt, synthetic construct
  source 1..23: mol_type = other RNA
  modified_base 1: mod_base = OTHER; note = 2'-O-methylguanosine-3'-phosphorothioate
  modified_base 2: mod_base = OTHER; note = 2'-deoxy-2'-fluoroadenosine-3'-phosphorothioate
  modified_base 3: mod_base = OTHER; note = 2'-O-methylguanosine-3'-phosphate
  modified_base 4: mod_base = OTHER; note = 2'-O-methylcytidine-3'-phosphate
  modified_base 5: mod_base = OTHER; note = 2'-O-methyluridine-3'-phosphate
  modified_base 6: mod_base = OTHER; note = 2'-deoxy-2'-fluorouridine-3'-phosphate
  modified_base 7: mod_base = OTHER; note = 2'-O-methyladenosine-3'-phosphate
  modified_base 8: mod_base = OTHER; note = 2'-deoxy-2'-fluorocytidine-3'-phosphate
  modified_base 9: mod_base = OTHER; note = 2'-deoxy-2'-fluoroadenosine-3'-phosphate
  modified_base 10: mod_base = OTHER; note = 2'-O-methyladenosine-3'-phosphate
  modified_base 11: mod_base = OTHER; note = 2'-O-methyluridine-3'-phosphate
  modified_base 12: mod_base = OTHER; note = 2'-O-methyluridine-3'-phosphate
  modified_base 13: mod_base = OTHER; note = 2'-O-methyluridine-3'-phosphate
  modified_base 14: mod_base = OTHER; note = 2'-deoxy-2'-fluoroadenosine-3'-phosphate
  modified_base 15: mod_base = OTHER; note = 2'-O-methyladenosine-3'-phosphate
  modified_base 16: mod_base = OTHER; note = 2'-deoxy-2'-fluoroguanosine-3'-phosphate
  modified_base 17: mod_base = OTHER; note = 2'-O-methyladenosine-3'-phosphate
  modified_base 18: mod_base = OTHER; note = 2'-O-methyladenosine-3'-phosphate
  modified_base 19: mod_base = OTHER; note = 2'-O-methylcytidine-3'-phosphate
  modified_base 20: mod_base = OTHER; note = 2'-O-methylcytidine-3'-phosphate
  modified_base 21: mod_base = OTHER; note = 2'-O-methyladenosine-3'-phosphorothioate
  modified_base 22: mod_base = OTHER; note = 2'-O-methylcytidine-3'-phosphorothioate
  modified_base 23: mod_base = OTHER; note = 2'-O-methyluridine
gagcttacaatttaagaaccact

SEQ ID NO: 2198 - RNA, 21 nt, synthetic construct
  source 1..21: mol_type = other RNA
  modified_base 1: mod_base = OTHER; note = 2'-O-methyladenosine-3'-phosphorothioate
  modified_base 2: mod_base = OTHER; note = 2'-O-methyladenosine-3'-phosphorothioate
  modified_base 3: mod_base = OTHER; note = 2'-O-methylcytidine-3'-phosphate
  modified_base 4: mod_base = OTHER; note = 2'-O-methyladenosine-3'-phosphate
  modified_base 5: mod_base = OTHER; note = 2'-O-methylguanosine-3'-phosphate
  modified_base 6: mod_base = OTHER; note = 2'-O-methyluridine-3'-phosphate
  modified_base 7: mod_base = OTHER; note = 2'-deoxy-2'-fluoroguanosine-3'-phosphate
  modified_base 8: mod_base = OTHER; note = 2'-O-methylguanosine-3'-phosphate
  modified_base 9: mod_base = OTHER; note = 2'-deoxy-2'-fluorouridine-3'-phosphate
  modified_base 10: mod_base = OTHER; note = 2'-deoxy-2'-fluorouridine-3'-phosphate
  modified_base 11: mod_base = OTHER; note = 2'-deoxy-2'-fluorocytidine-3'-phosphate
  modified_base 12: mod_base = OTHER; note = 2'-O-methyluridine-3'-phosphate
  modified_base 13: mod_base = OTHER; note = 2'-O-methyluridine-3'-phosphate
  modified_base 14: mod_base = OTHER; note = 2'-O-methyladenosine-3'-phosphate
  modified_base 15: mod_base = OTHER; note = 2'-O-methyladenosine-3'-phosphate
  modified_base 16: mod_base = OTHER; note = 2'-O-methyladenosine-3'-phosphate
  modified_base 17: mod_base = OTHER; note = 2'-O-methyluridine-3'-phosphate
  modified_base 18: mod_base = OTHER; note = 2'-O-methyluridine-3'-phosphate
  modified_base 19: mod_base = OTHER; note = 2'-O-methylguanosine-3'-phosphate
  modified_base 20: mod_base = OTHER; note = 2'-O-methyluridine-3'-phosphate
  modified_base 21: mod_base = OTHER; note = 2'-O-methyladenosine-3'-phosphate ((2S,4R)-1-[29-[[2-(acetylamino)-2-deoxy-beta-D-galactopyra nosyl]oxy]-14,14-bis[[3-[[3-[[5-[[2-(acetylamino)-2-deoxy-b eta-D-galactopyranosyl]oxy]-1-oxopentyl]amino]propyl]amino] -3-oxopropoxy]methyl]-1,12,19,25-tetraoxo-16-oxa-13,20,24-t riazanonacos-1-yl]-4-hydroxy-2-pyrrolidinyl)methyl ester
aacagtggttcttaaattgta

SEQ ID NO: 2199 - RNA, 23 nt, synthetic construct
  source 1..23: mol_type = other RNA
  modified_base 1: mod_base = OTHER; note = 2'-O-methyluridine-3'-phosphorothioate
  modified_base 2: mod_base = OTHER; note = 2'-deoxy-2'-fluoroadenosine-3'-phosphorothioate
  modified_base 3: mod_base = OTHER; note = 2'-O-methylcytidine-3'-phosphate
  modified_base 4: mod_base = OTHER; note = 2'-O-methyladenosine-3'-phosphate
  modified_base 5: mod_base = OTHER; note = 2'-O-methyladenosine-3'-phosphate
  modified_base 6: mod_base = OTHER; note = 2'-deoxy-2'-fluorouridine-3'-phosphate
  modified_base 7: mod_base = OTHER; note = 2'-O-methyluridine-3'-phosphate
  modified_base 8: mod_base = OTHER; note = 2'-deoxy-2'-fluorouridine-3'-phosphate
  modified_base 9: mod_base = OTHER; note = 2'-deoxy-2'-fluoroadenosine-3'-phosphate
  modified_base 10: mod_base = OTHER; note = 2'-O-methyladenosine-3'-phosphate
  modified_base 11: mod_base = OTHER; note = 2'-O-methylguanosine-3'-phosphate
  modified_base 12: mod_base = OTHER; note = 2'-O-methyladenosine-3'-phosphate
  modified_base 13: mod_base = OTHER; note = 2'-O-methyladenosine-3'-phosphate
  modified_base 14: mod_base = OTHER; note = 2'-deoxy-2'-fluorocytidine-3'-phosphate
  modified_base 15: mod_base = OTHER; note = 2'-O-methylcytidine-3'-phosphate
  modified_base 16: mod_base = OTHER; note = 2'-deoxy-2'-fluoroadenosine-3'-phosphate
  modified_base 17: mod_base = OTHER; note = 2'-O-methylcytidine-3'-phosphate
  modified_base 18: mod_base = OTHER; note = 2'-O-methyluridine-3'-phosphate
  modified_base 19: mod_base = OTHER; note = 2'-O-methylguanosine-3'-phosphate
  modified_base 20: mod_base = OTHER; note = 2'-O-methyluridine-3'-phosphate
  modified_base 21: mod_base = OTHER; note = 2'-O-methyluridine-3'-phosphorothioate
  modified_base 22: mod_base = OTHER; note = 2'-O-methyluridine-3'-phosphorothioate
  modified_base 23: mod_base = OTHER; note = 2'-O-methyluridine
tacaatttaagaaccactgtttt

SEQ ID NO: 2200 - RNA, 21 nt, synthetic construct
  source 1..21: mol_type = other RNA
  modified_base 1: mod_base = OTHER; note = 2'-O-methyladenosine-3'-phosphorothioate
  modified_base 2: mod_base = OTHER; note = 2'-O-methyladenosine-3'-phosphorothioate
  modified_base 3: mod_base = OTHER; note = 2'-O-methyladenosine-3'-phosphate
  modified_base 4: mod_base = OTHER; note = 2'-O-methylcytidine-3'-phosphate
  modified_base 5: mod_base = OTHER; note = 2'-O-methyladenosine-3'-phosphate
  modified_base 6: mod_base = OTHER; note = 2'-O-methylguanosine-3'-phosphate
  modified_base 7: mod_base = OTHER; note = 2'-deoxy-2'-fluorouridine-3'-phosphate
  modified_base 8: mod_base = OTHER; note = 2'-O-methylguanosine-3'-phosphate
  modified_base 9: mod_base = OTHER; note = 2'-deoxy-2'-fluoroguanosine-3'-phosphate
  modified_base 10: mod_base = OTHER; note = 2'-deoxy-2'-fluorouridine-3'-phosphate
  modified_base 11: mod_base = OTHER; note = 2'-deoxy-2'-fluorouridine-3'-phosphate
  modified_base 12: mod_base = OTHER; note = 2'-O-methylcytidine-3'-phosphate
  modified_base 13: mod_base = OTHER; note = 2'-O-methyluridine-3'-phosphate
  modified_base 14: mod_base = OTHER; note = 2'-O-methyluridine-3'-phosphate
  modified_base 15: mod_base = OTHER; note = 2'-O-methyladenosine-3'-phosphate
  modified_base 16: mod_base = OTHER; note = 2'-O-methyladenosine-3'-phosphate
  modified_base 17: mod_base = OTHER; note = 2'-O-methyladenosine-3'-phosphate
  modified_base 18: mod_base = OTHER; note = 2'-O-methyluridine-3'-phosphate
  modified_base 19: mod_base = OTHER; note = 2'-O-methyluridine-3'-phosphate
  modified_base 20: mod_base = OTHER; note = 2'-O-methylguanosine-3'-phosphate
  modified_base 21: mod_base = OTHER; note = 2'-O-methyluridine-3'-phosphate ((2S,4R)-1-[29-[[2-(acetylamino)-2-deoxy-beta-D-galactopyra nosyl]oxy]-14,14-bis[[3-[[3-[[5-[[2-(acetylamino)-2-deoxy-b eta-D-galactopyranosyl]oxy]-1-oxopentyl]amino]propyl]amino] -3-oxopropoxy]methyl]-1,12,19,25-tetraoxo-16-oxa-13,20,24-t riazanonacos-1-yl]-4-hydroxy-2-pyrrolidinyl)methyl ester
aaacagtggttcttaaattgt

SEQ ID NO: 2201 - RNA, 23 nt, synthetic construct
  source 1..23: mol_type = other RNA
  modified_base 1: mod_base = OTHER; note = 2'-O-methyladenosine-3'-phosphorothioate
  modified_base 2: mod_base = OTHER; note = 2'-deoxy-2'-fluorocytidine-3'-phosphorothioate
  modified_base 3: mod_base = OTHER; note = 2'-O-methyladenosine-3'-phosphate
  modified_base 4: mod_base = OTHER; note = 2'-O-methyladenosine-3'-phosphate
  modified_base 5: mod_base = OTHER; note = 2'-O-methyluridine-3'-phosphate
  modified_base 6: mod_base = OTHER; note = 2'-deoxy-2'-fluorouridine-3'-phosphate
  modified_base 7: mod_base = OTHER; note = 2'-O-methyluridine-3'-phosphate
  modified_base 8: mod_base = OTHER; note = 2'-deoxy-2'-fluoroadenosine-3'-phosphate
  modified_base 9: mod_base = OTHER; note = 2'-deoxy-2'-fluoroadenosine-3'-phosphate
  modified_base 10: mod_base = OTHER; note = 2'-O-methylguanosine-3'-phosphate
  modified_base 11: mod_base = OTHER; note = 2'-O-methyladenosine-3'-phosphate
  modified_base 12: mod_base = OTHER; note = 2'-O-methyladenosine-3'-phosphate
  modified_base 13: mod_base = OTHER; note = 2'-O-methylcytidine-3'-phosphate
  modified_base 14: mod_base = OTHER; note = 2'-deoxy-2'-fluorocytidine-3'-phosphate
  modified_base 15: mod_base = OTHER; note = 2'-O-methyladenosine-3'-phosphate
  modified_base 16: mod_base = OTHER; note = 2'-deoxy-2'-fluorocytidine-3'-phosphate
  modified_base 17: mod_base = OTHER; note = 2'-O-methyluridine-3'-phosphate
  modified_base 18: mod_base = OTHER; note = 2'-O-methylguanosine-3'-phosphate
  modified_base 19: mod_base = OTHER; note = 2'-O-methyluridine-3'-phosphate
  modified_base 20: mod_base = OTHER; note = 2'-O-methyluridine-3'-phosphate
  modified_base 21: mod_base = OTHER; note = 2'-O-methyluridine-3'-phosphorothioate
  modified_base 22: mod_base = OTHER; note = 2'-O-methyluridine-3'-phosphorothioate
  modified_base 23: mod_base = OTHER; note = 2'-O-methyladenosine
acaatttaagaaccactgtttta

SEQ ID NO: 2202 - RNA, 21 nt, synthetic construct
  source 1..21: mol_type = other RNA
  modified_base 1: mod_base = OTHER; note = 2'-O-methyladenosine-3'-phosphorothioate
  modified_base 2: mod_base = OTHER; note = 2'-O-methyladenosine-3'-phosphorothioate
  modified_base 3: mod_base = OTHER; note = 2'-O-methylguanosine-3'-phosphate
  modified_base 4: mod_base = OTHER; note = 2'-O-methyluridine-3'-phosphate
  modified_base 5: mod_base = OTHER; note = 2'-O-methylcytidine-3'-phosphate
  modified_base 6: mod_base = OTHER; note = 2'-O-methyladenosine-3'-phosphate
  modified_base 7: mod_base = OTHER; note = 2'-deoxy-2'-fluorouridine-3'-phosphate
  modified_base 8: mod_base = OTHER; note = 2'-O-methylcytidine-3'-phosphate
  modified_base 9: mod_base = OTHER; note = 2'-deoxy-2'-fluoroguanosine-3'-phosphate
  modified_base 10: mod_base = OTHER; note = 2'-deoxy-2'-fluoroadenosine-3'-phosphate
  modified_base 11: mod_base = OTHER; note = 2'-deoxy-2'-fluorocytidine-3'-phosphate
  modified_base 12: mod_base = OTHER; note = 2'-O-methyladenosine-3'-phosphate
  modified_base 13: mod_base = OTHER; note = 2'-O-methyladenosine-3'-phosphate
  modified_base 14: mod_base = OTHER; note = 2'-O-methylguanosine-3'-phosphate
  modified_base 15: mod_base = OTHER; note = 2'-O-methyladenosine-3'-phosphate
  modified_base 16: mod_base = OTHER; note = 2'-O-methylcytidine-3'-phosphate
  modified_base 17: mod_base = OTHER; note = 2'-O-methyladenosine-3'-phosphate
  modified_base 18: mod_base = OTHER; note = 2'-O-methyluridine-3'-phosphate
  modified_base 19: mod_base = OTHER; note = 2'-O-methyluridine-3'-phosphate
  modified_base 20: mod_base = OTHER; note = 2'-O-methylguanosine-3'-phosphate
  modified_base 21: mod_base = OTHER; note = 2'-O-methylguanosine-3'-phosphate ((2S,4R)-1-[29-[[2-(acetylamino)-2-deoxy-beta-D-galactopyra nosyl]oxy]-14,14-bis[[3-[[3-[[5-[[2-(acetylamino)-2-deoxy-b eta-D-galactopyranosyl]oxy]-1-oxopentyl]amino]propyl]amino] -3-oxopropoxy]methyl]-1,12,19,25-tetraoxo-16-oxa-13,20,24-t riazanonacos-1-yl]-4-hydroxy-2-pyrrolidinyl)methyl ester
aagtcatcgacaagacattgg

SEQ ID NO: 2203 - RNA, 23 nt, synthetic construct
  source 1..23: mol_type = other RNA
  modified_base 1: mod_base = OTHER; note = 2'-O-methylcytidine-3'-phosphorothioate
  modified_base 2: mod_base = OTHER; note = 2'-deoxy-2'-fluorocytidine-3'-phosphorothioate
  modified_base 3: mod_base = OTHER; note = 2'-O-methyladenosine-3'-phosphate
  modified_base 4: mod_base = OTHER; note = 2'-O-methyladenosine-3'-phosphate
  modified_base 5: mod_base = OTHER; note = 2'-O-methyluridine-3'-phosphate
  modified_base 6: mod_base = OTHER; note = 2'-deoxy-2'-fluoroguanosine-3'-phosphate
  modified_base 7: mod_base = OTHER; note = 2'-O-methyluridine-3'-phosphate
  modified_base 8: mod_base = OTHER; note = 2'-deoxy-2'-fluorocytidine-3'-phosphate
  modified_base 9: mod_base = OTHER; note = 2'-deoxy-2'-fluorouridine-3'-phosphate
  modified_base 10: mod_base = OTHER; note = 2'-O-methyluridine-3'-phosphate
  modified_base 11: mod_base = OTHER; note = 2'-O-methylguanosine-3'-phosphate
  modified_base 12: mod_base = OTHER; note = 2'-O-methyluridine-3'-phosphate
  modified_base 13: mod_base = OTHER; note = 2'-O-methylcytidine-3'-phosphate
  modified_base 14: mod_base = OTHER; note = 2'-deoxy-2'-fluoroguanosine-3'-phosphate
  modified_base 15: mod_base = OTHER; note = 2'-O-methyladenosine-3'-phosphate
  modified_base 16: mod_base = OTHER; note = 2'-deoxy-2'-fluorouridine-3'-phosphate
  modified_base 17: mod_base = OTHER; note = 2'-O-methylguanosine-3'-phosphate
  modified_base 18: mod_base = OTHER; note = 2'-O-methyladenosine-3'-phosphate
  modified_base 19: mod_base = OTHER; note = 2'-O-methylcytidine-3'-phosphate
  modified_base 20: mod_base = OTHER; note = 2'-O-methyluridine-3'-phosphate
  modified_base 21: mod_base = OTHER; note = 2'-O-methyluridine-3'-phosphorothioate
  modified_base 22: mod_base = OTHER; note = 2'-O-methyluridine-3'-phosphorothioate
  modified_base 23: mod_base = OTHER; note = 2'-O-methylcytidine
ccaatgtcttgtcgatgactttc

SEQ ID NO: 2204 - RNA, 21 nt, synthetic construct
  source 1..21: mol_type = other RNA
  modified_base 1: mod_base = OTHER; note = 2'-O-methyladenosine-3'-phosphorothioate
  modified_base 2: mod_base = OTHER; note = 2'-O-methylguanosine-3'-phosphorothioate
  modified_base 3: mod_base = OTHER; note = 2'-O-methyluridine-3'-phosphate
  modified_base 4: mod_base = OTHER; note = 2'-O-methylcytidine-3'-phosphate
  modified_base 5: mod_base = OTHER; note = 2'-O-methyladenosine-3'-phosphate
  modified_base 6: mod_base = OTHER; note = 2'-O-methyluridine-3'-phosphate
  modified_base 7: mod_base = OTHER; note = 2'-deoxy-2'-fluorocytidine-3'-phosphate
  modified_base 8: mod_base = OTHER; note = 2'-O-methylguanosine-3'-phosphate
  modified_base 9: mod_base = OTHER; note = 2'-deoxy-2'-fluoroadenosine-3'-phosphate
  modified_base 10: mod_base = OTHER; note = 2'-deoxy-2'-fluorocytidine-3'-phosphate
  modified_base 11: mod_base = OTHER; note = 2'-deoxy-2'-fluoroadenosine-3'-phosphate
  modified_base 12: mod_base = OTHER; note = 2'-O-methyladenosine-3'-phosphate
  modified_base 13: mod_base = OTHER; note = 2'-O-methylguanosine-3'-phosphate
  modified_base 14: mod_base = OTHER; note = 2'-O-methyladenosine-3'-phosphate
  modified_base 15: mod_base = OTHER; note = 2'-O-methylcytidine-3'-phosphate
  modified_base 16: mod_base = OTHER; note = 2'-O-methyladenosine-3'-phosphate
  modified_base 17: mod_base = OTHER; note = 2'-O-methyluridine-3'-phosphate
  modified_base 18: mod_base = OTHER; note = 2'-O-methyluridine-3'-phosphate
  modified_base 19: mod_base = OTHER; note = 2'-O-methylguanosine-3'-phosphate
  modified_base 20: mod_base = OTHER; note = 2'-O-methylguanosine-3'-phosphate
  modified_base 21: mod_base = OTHER; note = 2'-O-methyluridine-3'-phosphate ((2S,4R)-1-[29-[[2-(acetylamino)-2-deoxy-beta-D-galactopyra nosyl]oxy]-14,14-bis[[3-[[3-[[5-[[2-(acetylamino)-2-deoxy-b eta-D-galactopyranosyl]oxy]-1-oxopentyl]amino]propyl]amino] -3-oxopropoxy]methyl]-1,12,19,25-tetraoxo-16-oxa-13,20,24-t riazanonacos-1-yl]-4-hydroxy-2-pyrrolidinyl)methyl ester
agtcatcgacaagacattggt

SEQ ID NO: 2205 - RNA, 23 nt, synthetic construct
  source 1..23: mol_type = other RNA
  modified_base 1: mod_base = OTHER; note = 2'-O-methyladenosine-3'-phosphorothioate
  modified_base 2: mod_base = OTHER; note = 2'-deoxy-2'-fluorocytidine-3'-phosphorothioate
  modified_base 3: mod_base = OTHER; note = 2'-O-methylcytidine-3'-phosphate
  modified_base 4: mod_base = OTHER; note = 2'-O-methyladenosine-3'-phosphate
  modified_base 5: mod_base = OTHER; note = 2'-O-methyladenosine-3'-phosphate
  modified_base 6: mod_base = OTHER; note = 2'-deoxy-2'-fluorouridine-3'-phosphate
  modified_base 7: mod_base = OTHER; note = 2'-O-methylguanosine-3'-phosphate
  modified_base 8: mod_base = OTHER; note = 2'-deoxy-2'-fluorouridine-3'-phosphate
  modified_base 9: mod_base = OTHER; note = 2'-deoxy-2'-fluorocytidine-3'-phosphate
  modified_base 10: mod_base = OTHER; note = 2'-O-methyluridine-3'-phosphate
  modified_base 11: mod_base = OTHER; note = 2'-O-methyluridine-3'-phosphate
  modified_base 12: mod_base = OTHER; note = 2'-O-methylguanosine-3'-phosphate
  modified_base 13: mod_base = OTHER; note = 2'-O-methyluridine-3'-phosphate
  modified_base 14: mod_base = OTHER; note = 2'-deoxy-2'-fluorocytidine-3'-phosphate
  modified_base 15: mod_base = OTHER; note = 2'-O-methylguanosine-3'-phosphate
  modified_base 16: mod_base = OTHER; note = 2'-deoxy-2'-fluoroadenosine-3'-phosphate
  modified_base 17: mod_base = OTHER; note = 2'-O-methyluridine-3'-phosphate
  modified_base 18: mod_base = OTHER; note = 2'-O-methylguanosine-3'-phosphate
  modified_base 19: mod_base = OTHER; note = 2'-O-methyladenosine-3'-phosphate
  modified_base 20: mod_base = OTHER; note = 2'-O-methylcytidine-3'-phosphate
  modified_base 21: mod_base = OTHER; note = 2'-O-methyluridine-3'-phosphorothioate
  modified_base 22: mod_base = OTHER; note = 2'-O-methyluridine-3'-phosphorothioate
  modified_base 23: mod_base = OTHER; note = 2'-O-methyluridine
accaatgtcttgtcgatgacttt

SEQ ID NO: 2206 - RNA, 21 nt, synthetic construct
  source 1..21: mol_type = other RNA
  modified_base 1: mod_base = OTHER; note = 2'-O-methylguanosine-3'-phosphorothioate
  modified_base 2: mod_base = OTHER; note = 2'-O-methyluridine-3'-phosphorothioate
  modified_base 3: mod_base = OTHER; note = 2'-O-methylguanosine-3'-phosphate
  modified_base 4: mod_base = OTHER; note = 2'-O-methyladenosine-3'-phosphate
  modified_base 5: mod_base = OTHER; note = 2'-O-methyladenosine-3'-phosphate
  modified_base 6: mod_base = OTHER; note = 2'-O-methyladenosine-3'-phosphate
  modified_base 7: mod_base = OTHER; note = 2'-deoxy-2'-fluoroguanosine-3'-phosphate
  modified_base 8: mod_base = OTHER; note = 2'-O-methyluridine-3'-phosphate
  modified_base 9: mod_base = OTHER; note = 2'-deoxy-2'-fluorocytidine-3'-phosphate
  modified_base 10: mod_base = OTHER; note = 2'-deoxy-2'-fluoroadenosine-3'-phosphate
  modified_base 11: mod_base = OTHER; note = 2'-deoxy-2'-fluorouridine-3'-phosphate
  modified_base 12: mod_base = OTHER; note = 2'-O-methylcytidine-3'-phosphate
  modified_base 13: mod_base = OTHER; note = 2'-O-methylguanosine-3'-phosphate
  modified_base 14: mod_base = OTHER; note = 2'-O-methyladenosine-3'-phosphate
  modified_base 15: mod_base = OTHER; note = 2'-O-methylcytidine-3'-phosphate
  modified_base 16: mod_base = OTHER; note = 2'-O-methyladenosine-3'-phosphate
  modified_base 17: mod_base = OTHER; note = 2'-O-methyladenosine-3'-phosphate
  modified_base 18: mod_base = OTHER; note = 2'-O-methylguanosine-3'-phosphate
  modified_base 19: mod_base = OTHER; note = 2'-O-methyladenosine-3'-phosphate
  modified_base 20: mod_base = OTHER; note = 2'-O-methylcytidine-3'-phosphate
  modified_base 21: mod_base = OTHER; note = 2'-O-methyladenosine-3'-phosphate ((2S,4R)-1-[29-[[2-(acetylamino)-2-deoxy-beta-D-galactopyra nosyl]oxy]-14,14-bis[[3-[[3-[[5-[[2-(acetylamino)-2-deoxy-b eta-D-galactopyranosyl]oxy]-1-oxopentyl]amino]propyl]amino] -3-oxopropoxy]methyl]-1,12,19,25-tetraoxo-16-oxa-13,20,24-t riazanonacos-1-yl]-4-hydroxy-2-pyrrolidinyl)methyl ester
gtgaaagtcatcgacaagaca

SEQ ID NO: 2207 - RNA, 23 nt, synthetic construct
  source 1..23: mol_type = other RNA
  modified_base 1: mod_base = OTHER; note = 2'-O-methyluridine-3'-phosphorothioate
  modified_base 2: mod_base = OTHER; note = 2'-deoxy-2'-fluoroguanosine-3'-phosphorothioate
  modified_base 3: mod_base = OTHER; note = 2'-O-methyluridine-3'-phosphate
  modified_base 4: mod_base = OTHER; note = 2'-O-methylcytidine-3'-phosphate
  modified_base 5: mod_base = OTHER; note = 2'-O-methyluridine-3'-phosphate
  modified_base 6: mod_base = OTHER; note = 2'-deoxy-2'-fluorouridine-3'-phosphate
  modified_base 7: mod_base = OTHER; note = 2'-O-methylguanosine-3'-phosphate
  modified_base 8: mod_base = OTHER; note = 2'-deoxy-2'-fluorouridine-3'-phosphate
  modified_base 9: mod_base = OTHER; note = 2'-deoxy-2'-fluorocytidine-3'-phosphate
  modified_base 10: mod_base = OTHER; note = 2'-O-methylguanosine-3'-phosphate
  modified_base 11: mod_base = OTHER; note = 2'-O-methyladenosine-3'-phosphate
  modified_base 12: mod_base = OTHER; note = 2'-O-methyluridine-3'-phosphate
  modified_base 13: mod_base = OTHER; note = 2'-O-methylguanosine-3'-phosphate
  modified_base 14: mod_base = OTHER; note = 2'-deoxy-2'-fluoroadenosine-3'-phosphate
  modified_base 15: mod_base = OTHER; note = 2'-O-methylcytidine-3'-phosphate
  modified_base 16: mod_base = OTHER; note = 2'-deoxy-2'-fluorouridine-3'-phosphate
  modified_base 17: mod_base = OTHER; note = 2'-O-methyluridine-3'-phosphate
  modified_base 18: mod_base = OTHER; note = 2'-O-methyluridine-3'-phosphate
  modified_base 19: mod_base = OTHER; note = 2'-O-methylcytidine-3'-phosphate
  modified_base 20: mod_base = OTHER; note = 2'-O-methyladenosine-3'-phosphate
  modified_base 21: mod_base = OTHER; note = 2'-O-methylcytidine-3'-phosphorothioate
  modified_base 22: mod_base = OTHER; note = 2'-O-methyladenosine-3'-phosphorothioate
  modified_base 23: mod_base = OTHER; note = 2'-O-methyluridine
tgtcttgtcgatgactttcacat

SEQ ID NO: 2208 - RNA, 21 nt, synthetic construct
  source 1..21: mol_type = other RNA
  modified_base 1: mod_base = OTHER; note = 2'-O-methyluridine-3'-phosphorothioate
  modified_base 2: mod_base = OTHER; note = 2'-O-methylguanosine-3'-phosphorothioate
  modified_base 3: mod_base = OTHER; note = 2'-O-methyluridine-3'-phosphate
  modified_base 4: mod_base = OTHER; note = 2'-O-methylguanosine-3'-phosphate
  modified_base 5: mod_base = OTHER; note = 2'-O-methyladenosine-3'-phosphate
  modified_base 6: mod_base = OTHER; note = 2'-O-methyladenosine-3'-phosphate
  modified_base 7: mod_base = OTHER; note = 2'-deoxy-2'-fluoroadenosine-3'-phosphate
  modified_base 8: mod_base = OTHER; note = 2'-O-methylguanosine-3'-phosphate
  modified_base 9: mod_base = OTHER; note = 2'-deoxy-2'-fluorouridine-3'-phosphate
  modified_base 10: mod_base = OTHER; note = 2'-deoxy-2'-fluorocytidine-3'-phosphate
  modified_base 11: mod_base = OTHER; note = 2'-deoxy-2'-fluoroadenosine-3'-phosphate
  modified_base 12: mod_base = OTHER; note = 2'-O-methyluridine-3'-phosphate
  modified_base 13: mod_base = OTHER; note = 2'-O-methylcytidine-3'-phosphate
  modified_base 14: mod_base = OTHER; note = 2'-O-methylguanosine-3'-phosphate
  modified_base 15: mod_base = OTHER; note = 2'-O-methyladenosine-3'-phosphate
  modified_base 16: mod_base = OTHER; note = 2'-O-methylcytidine-3'-phosphate
  modified_base 17: mod_base = OTHER; note = 2'-O-methyladenosine-3'-phosphate
  modified_base 18: mod_base = OTHER; note = 2'-O-methyladenosine-3'-phosphate
  modified_base 19: mod_base = OTHER; note = 2'-O-methylguanosine-3'-phosphate
  modified_base 20: mod_base = OTHER; note = 2'-O-methyladenosine-3'-phosphate
  modified_base 21: mod_base = OTHER; note = 2'-O-methylcytidine-3'-phosphate ((2S,4R)-1-[29-[[2-(acetylamino)-2-deoxy-beta-D-galactopyra nosyl]oxy]-14,14-bis[[3-[[3-[[5-[[2-(acetylamino)-2-deoxy-b eta-D-galactopyranosyl]oxy]-1-oxopentyl]amino]propyl]amino] -3-oxopropoxy]methyl]-1,12,19,25-tetraoxo-16-oxa-13,20,24-t riazanonacos-1-yl]-4-hydroxy-2-pyrrolidinyl)methyl ester
tgtgaaagtcatcgacaagac

SEQ ID NO: 2209 - RNA, 23 nt, synthetic construct
  source 1..23: mol_type = other RNA
  modified_base 1: mod_base = OTHER; note = 2'-O-methylguanosine-3'-phosphorothioate
  modified_base 2: mod_base = OTHER; note = 2'-deoxy-2'-fluorouridine-3'-phosphorothioate
  modified_base 3: mod_base = OTHER; note = 2'-O-methylcytidine-3'-phosphate
  modified_base 4: mod_base = OTHER; note = 2'-O-methyluridine-3'-phosphate
  modified_base 5: mod_base = OTHER; note = 2'-O-methyluridine-3'-phosphate
  modified_base 6: mod_base = OTHER; note = 2'-deoxy-2'-fluoroguanosine-3'-phosphate
  modified_base 7: mod_base = OTHER; note = 2'-O-methyluridine-3'-phosphate
  modified_base 8: mod_base = OTHER; note = 2'-deoxy-2'-fluorocytidine-3'-phosphate
  modified_base 9: mod_base = OTHER; note = 2'-deoxy-2'-fluoroguanosine-3'-phosphate
  modified_base 10: mod_base = OTHER; note = 2'-O-methyladenosine-3'-phosphate
  modified_base 11: mod_base = OTHER; note = 2'-O-methyluridine-3'-phosphate
  modified_base 12: mod_base = OTHER; note = 2'-O-methylguanosine-3'-phosphate
  modified_base 13: mod_base = OTHER; note = 2'-O-methyladenosine-3'-phosphate
  modified_base 14: mod_base = OTHER; note = 2'-deoxy-2'-fluorocytidine-3'-phosphate
  modified_base 15: mod_base = OTHER; note = 2'-O-methyluridine-3'-phosphate
  modified_base 16: mod_base = OTHER; note = 2'-deoxy-2'-fluorouridine-3'-phosphate
  modified_base 17: mod_base = OTHER; note = 2'-O-methyluridine-3'-phosphate
  modified_base 18: mod_base = OTHER; note = 2'-O-methylcytidine-3'-phosphate
  modified_base 19: mod_base = OTHER; note = 2'-O-methyladenosine-3'-phosphate
  modified_base 20: mod_base = OTHER; note = 2'-O-methylcytidine-3'-phosphate
  modified_base 21: mod_base = OTHER; note = 2'-O-methyladenosine-3'-phosphorothioate
  modified_base 22: mod_base = OTHER; note = 2'-O-methyluridine-3'-phosphorothioate
  modified_base 23: mod_base = OTHER; note = 2'-O-methyluridine
gtcttgtcgatgactttcacatt

SEQ ID NO: 2210 - RNA, 21 nt, synthetic construct
  source 1..21: mol_type = other RNA
  modified_base 1: mod_base = OTHER; note = 2'-O-methylguanosine-3'-phosphorothioate
  modified_base 2: mod_base = OTHER; note = 2'-O-methyladenosine-3'-phosphorothioate
  modified_base 3: mod_base = OTHER; note = 2'-O-methyluridine-3'-phosphate
  modified_base 4: mod_base = OTHER; note = 2'-O-methyladenosine-3'-phosphate
  modified_base 5: mod_base = OTHER; note = 2'-O-methyladenosine-3'-phosphate
  modified_base 6: mod_base = OTHER; note = 2'-O-methyluridine-3'-phosphate
  modified_base 7: mod_base = OTHER; note = 2'-deoxy-2'-fluoroadenosine-3'-phosphate
  modified_base 8: mod_base = OTHER; note = 2'-O-methyluridine-3'-phosphate
  modified_base 9: mod_base = OTHER; note = 2'-deoxy-2'-fluorouridine-3'-phosphate
  modified_base 10: mod_base = OTHER; note = 2'-deoxy-2'-fluoroguanosine-3'-phosphate
  modified_base 11: mod_base = OTHER; note = 2'-deoxy-2'-fluorocytidine-3'-phosphate
  modified_base 12: mod_base = OTHER; note = 2'-O-methyladenosine-3'-phosphate
  modified_base 13: mod_base = OTHER; note = 2'-O-methylguanosine-3'-phosphate
  modified_base 14: mod_base = OTHER; note = 2'-O-methylcytidine-3'-phosphate
  modified_base 15: mod_base = OTHER; note = 2'-O-methyladenosine-3'-phosphate
  modified_base 16: mod_base = OTHER; note = 2'-O-methyluridine-3'-phosphate
  modified_base 17: mod_base = OTHER; note = 2'-O-methyluridine-3'-phosphate
  modified_base 18: mod_base = OTHER; note = 2'-O-methyluridine-3'-phosphate
  modified_base 19: mod_base = OTHER; note = 2'-O-methyluridine-3'-phosphate
  modified_base 20: mod_base = OTHER; note = 2'-O-methylcytidine-3'-phosphate
  modified_base 21: mod_base = OTHER; note = 2'-O-methylcytidine-3'-phosphate ((2S,4R)-1-[29-[[2-(acetylamino)-2-deoxy-beta-D-galactopyra nosyl]oxy]-14,14-bis[[3-[[3-[[5-[[2-(acetylamino)-2-deoxy-b eta-D-galactopyranosyl]oxy]-1-oxopentyl]amino]propyl]amino] -3-oxopropoxy]methyl]-1,12,19,25-tetraoxo-16-oxa-13,20,24-t riazanonacos-1-yl]-4-hydroxy-2-pyrrolidinyl)methyl ester
gataatattgcagcattttcc

SEQ ID NO: 2211 - RNA, 23 nt, synthetic construct
  source 1..23: mol_type = other RNA
  modified_base 1: mod_base = OTHER; note = 2'-O-methylguanosine-3'-phosphorothioate
  modified_base 2: mod_base = OTHER; note = 2'-deoxy-2'-fluoroguanosine-3'-phosphorothioate
  modified_base 3: mod_base = OTHER; note = 2'-O-methyladenosine-3'-phosphate
  modified_base 4: mod_base = OTHER; note = 2'-O-methyladenosine-3'-phosphate
  modified_base 5: mod_base = OTHER; note = 2'-O-methyladenosine-3'-phosphate
  modified_base 6: mod_base = OTHER; note = 2'-deoxy-2'-fluoroadenosine-3'-phosphate
  modified_base 7: mod_base = OTHER; note = 2'-O-methyluridine-3'-phosphate
  modified_base 8: mod_base = OTHER; note = 2'-deoxy-2'-fluoroguanosine-3'-phosphate
  modified_base 9: mod_base = OTHER; note = 2'-deoxy-2'-fluorocytidine-3'-phosphate
  modified_base 10: mod_base = OTHER; note = 2'-O-methyluridine-3'-phosphate
  modified_base 11: mod_base = OTHER; note = 2'-O-methylguanosine-3'-phosphate
  modified_base 12: mod_base = OTHER; note = 2'-O-methylcytidine-3'-phosphate
  modified_base 13: mod_base = OTHER; note = 2'-O-methyladenosine-3'-phosphate
  modified_base 14: mod_base = OTHER; note = 2'-deoxy-2'-fluoroadenosine-3'-phosphate
  modified_base 15: mod_base = OTHER; note = 2'-O-methyluridine-3'-phosphate
  modified_base 16: mod_base = OTHER; note = 2'-deoxy-2'-fluoroadenosine-3'-phosphate
  modified_base 17: mod_base = OTHER; note = 2'-O-methyluridine-3'-phosphate
  modified_base 18: mod_base = OTHER; note = 2'-O-methyluridine-3'-phosphate
  modified_base 19: mod_base = OTHER; note = 2'-O-methyladenosine-3'-phosphate
  modified_base 20: mod_base = OTHER; note = 2'-O-methyluridine-3'-phosphate
  modified_base 21: mod_base = OTHER; note = 2'-O-methylcytidine-3'-phosphorothioate
  modified_base 22: mod_base = OTHER; note = 2'-O-methyladenosine-3'-phosphorothioate
  modified_base 23: mod_base = OTHER; note = 2'-O-methylguanosine
ggaaaatgctgcaatattatcag

SEQ ID NO: 2212 - RNA, 21 nt, synthetic construct
  source 1..21: mol_type = other RNA
  modified_base 1: mod_base = OTHER; note = 2'-O-methyladenosine-3'-phosphorothioate
  modified_base 2: mod_base = OTHER; note = 2'-O-methyluridine-3'-phosphorothioate
  modified_base 3: mod_base = OTHER; note = 2'-O-methyladenosine-3'-phosphate
  modified_base 4: mod_base = OTHER; note = 2'-O-methyladenosine-3'-phosphate
  modified_base 5: mod_base = OTHER; note = 2'-O-methyluridine-3'-phosphate
  modified_base 6: mod_base = OTHER; note = 2'-O-methyladenosine-3'-phosphate
  modified_base 7: mod_base = OTHER; note = 2'-deoxy-2'-fluorouridine-3'-phosphate
  modified_base 8: mod_base = OTHER; note = 2'-O-methyluridine-3'-phosphate
  modified_base 9: mod_base = OTHER; note = 2'-deoxy-2'-fluoroguanosine-3'-phosphate
  modified_base 10: mod_base = OTHER; note = 2'-deoxy-2'-fluorocytidine-3'-phosphate
  modified_base 11: mod_base = OTHER; note = 2'-deoxy-2'-fluoroadenosine-3'-phosphate
  modified_base 12: mod_base = OTHER; note = 2'-O-methylguanosine-3'-phosphate
  modified_base 13: mod_base = OTHER; note = 2'-O-methylcytidine-3'-phosphate
  modified_base 14: mod_base = OTHER; note = 2'-O-methyladenosine-3'-phosphate
  modified_base 15: mod_base = OTHER; note = 2'-O-methyluridine-3'-phosphate
  modified_base 16: mod_base = OTHER; note = 2'-O-methyluridine-3'-phosphate
  modified_base 17: mod_base = OTHER; note = 2'-O-methyluridine-3'-phosphate
  modified_base 18: mod_base = OTHER; note = 2'-O-methyluridine-3'-phosphate
  modified_base 19: mod_base = OTHER; note = 2'-O-methylcytidine-3'-phosphate
  modified_base 20: mod_base = OTHER; note = 2'-O-methylcytidine-3'-phosphate
  modified_base 21: mod_base = OTHER; note = 2'-O-methyladenosine-3'-phosphate ((2S,4R)-1-[29-[[2-(acetylamino)-2-deoxy-beta-D-galactopyra nosyl]oxy]-14,14-bis[[3-[[3-[[5-[[2-(acetylamino)-2-deoxy-b eta-D-galactopyranosyl]oxy]-1-oxopentyl]amino]propyl]amino] -3-oxopropoxy]methyl]-1,12,19,25-tetraoxo-16-oxa-13,20,24-t riazanonacos-1-yl]-4-hydroxy-2-pyrrolidinyl)methyl ester
ataatattgcagcattttcca

SEQ ID NO: 2213 - RNA, 23 nt, synthetic construct
  source 1..23: mol_type = other RNA
  modified_base 1: mod_base = OTHER; note = 2'-O-methyluridine-3'-phosphorothioate
  modified_base 2: mod_base = OTHER; note = 2'-deoxy-2'-fluoroguanosine-3'-phosphorothioate
  modified_base 3: mod_base = OTHER; note = 2'-O-methylguanosine-3'-phosphate
  modified_base 4: mod_base = OTHER; note = 2'-O-methyladenosine-3'-phosphate
  modified_base 5: mod_base = OTHER; note = 2'-O-methyladenosine-3'-phosphate
  modified_base 6: mod_base = OTHER; note = 2'-deoxy-2'-fluoroadenosine-3'-phosphate
  modified_base 7: mod_base = OTHER; note = 2'-O-methyladenosine-3'-phosphate
  modified_base 8: mod_base = OTHER; note = 2'-deoxy-2'-fluorouridine-3'-phosphate
  modified_base 9: mod_base = OTHER; note = 2'-deoxy-2'-fluoroguanosine-3'-phosphate
  modified_base 10: mod_base = OTHER; note = 2'-O-methylcytidine-3'-phosphate
  modified_base 11: mod_base = OTHER; note = 2'-O-methyluridine-3'-phosphate
  modified_base 12: mod_base = OTHER; note = 2'-O-methylguanosine-3'-phosphate
  modified_base 13: mod_base = OTHER; note = 2'-O-methylcytidine-3'-phosphate
  modified_base 14: mod_base = OTHER; note = 2'-deoxy-2'-fluoroadenosine-3'-phosphate
  modified_base 15: mod_base = OTHER; note = 2'-O-methyladenosine-3'-phosphate
  modified_base 16: mod_base = OTHER; note = 2'-deoxy-2'-fluorouridine-3'-phosphate
  modified_base 17: mod_base = OTHER; note = 2'-O-methyladenosine-3'-phosphate
  modified_base 18: mod_base = OTHER; note = 2'-O-methyluridine-3'-phosphate
  modified_base 19: mod_base = OTHER; note = 2'-O-methyluridine-3'-phosphate
  modified_base 20: mod_base = OTHER; note = 2'-O-methyladenosine-3'-phosphate
  modified_base 21: mod_base = OTHER; note = 2'-O-methyluridine-3'-phosphorothioate
  modified_base 22: mod_base = OTHER; note = 2'-O-methylcytidine-3'-phosphorothioate
  modified_base 23: mod_base = OTHER; note = 2'-O-methyladenosine
tggaaaatgctgcaatattatca

SEQ ID NO: 2214 - RNA, 21 nt, synthetic construct
  source 1..21: mol_type = other RNA
  modified_base 1: mod_base = OTHER; note = 2'-O-methylguanosine-3'-phosphorothioate
  modified_base 2: mod_base = OTHER; note = 2'-O-methylguanosine-3'-phosphorothioate
  modified_base 3: mod_base = OTHER; note = 2'-O-methylcytidine-3'-phosphate
  modified_base 4: mod_base = OTHER; note = 2'-O-methyluridine-3'-phosphate
  modified_base 5: mod_base = OTHER; note = 2'-O-methylguanosine-3'-phosphate
  modified_base 6: mod_base = OTHER; note = 2'-O-methyladenosine-3'-phosphate
  modified_base 7: mod_base = OTHER; note = 2'-deoxy-2'-fluorouridine-3'-phosphate
  modified_base 8: mod_base = OTHER; note = 2'-O-methyladenosine-3'-phosphate
  modified_base 9: mod_base = OTHER; note = 2'-deoxy-2'-fluoroadenosine-3'-phosphate
  modified_base 10: mod_base = OTHER; note = 2'-deoxy-2'-fluorouridine-3'-phosphate
  modified_base 11: mod_base = OTHER; note = 2'-deoxy-2'-fluoroadenosine-3'-phosphate
  modified_base 12: mod_base = OTHER; note = 2'-O-methyluridine-3'-phosphate
  modified_base 13: mod_base = OTHER; note = 2'-O-methyluridine-3'-phosphate
  modified_base 14: mod_base = OTHER; note = 2'-O-methylguanosine-3'-phosphate
  modified_base 15: mod_base = OTHER; note = 2'-O-methylcytidine-3'-phosphate
  modified_base 16: mod_base = OTHER; note = 2'-O-methyladenosine-3'-phosphate
  modified_base 17: mod_base = OTHER; note = 2'-O-methylguanosine-3'-phosphate
  modified_base 18: mod_base = OTHER; note = 2'-O-methylcytidine-3'-phosphate
  modified_base 19: mod_base = OTHER; note = 2'-O-methyladenosine-3'-phosphate
  modified_base 20: mod_base = OTHER; note = 2'-O-methyluridine-3'-phosphate
  modified_base 21: mod_base = OTHER; note = 2'-O-methyluridine-3'-phosphate ((2S,4R)-1-[29-[[2-(acetylamino)-2-deoxy-beta-D-galactopyra nosyl]oxy]-14,14-bis[[3-[[3-[[5-[[2-(acetylamino)-2-deoxy-b eta-D-galactopyranosyl]oxy]-1-oxopentyl]amino]propyl]amino] -3-oxopropoxy]methyl]-1,12,19,25-tetraoxo-16-oxa-13,20,24-t riazanonacos-1-yl]-4-hydroxy-2-pyrrolidinyl)methyl ester
ggctgataatattgcagcatt

SEQ ID NO: 2215 - RNA, 23 nt, synthetic construct
  source 1..23: mol_type = other RNA
  modified_base 1: mod_base = OTHER; note = 2'-O-methyladenosine-3'-phosphorothioate
  modified_base 2: mod_base = OTHER; note = 2'-deoxy-2'-fluoroadenosine-3'-phosphorothioate
  modified_base 3: mod_base = OTHER; note = 2'-O-methyluridine-3'-phosphate
  modified_base 4: mod_base = OTHER; note = 2'-O-methylguanosine-3'-phosphate
  modified_base 5: mod_base = OTHER; note = 2'-O-methylcytidine-3'-phosphate
  modified_base 6: mod_base = OTHER; note = 2'-deoxy-2'-fluorouridine-3'-phosphate
  modified_base 7: mod_base = OTHER; note = 2'-O-methylguanosine-3'-phosphate
  modified_base 8: mod_base = OTHER; note = 2'-deoxy-2'-fluorocytidine-3'-phosphate
  modified_base 9: mod_base = OTHER; note = 2'-deoxy-2'-fluoroadenosine-3'-phosphate
  modified_base 10: mod_base = OTHER; note = 2'-O-methyladenosine-3'-phosphate
  modified_base 11: mod_base = OTHER; note = 2'-O-methyluridine-3'-phosphate
  modified_base 12: mod_base = OTHER; note = 2'-O-methyladenosine-3'-phosphate
  modified_base 13: mod_base = OTHER; note = 2'-O-methyluridine-3'-phosphate
  modified_base 14: mod_base = OTHER; note = 2'-deoxy-2'-fluorouridine-3'-phosphate
  modified_base 15: mod_base = OTHER; note = 2'-O-methyladenosine-3'-phosphate
  modified_base 16: mod_base = OTHER; note = 2'-deoxy-2'-fluorouridine-3'-phosphate
  modified_base 17: mod_base = OTHER; note = 2'-O-methylcytidine-3'-phosphate
  modified_base 18: mod_base = OTHER; note = 2'-O-methyladenosine-3'-phosphate
  modified_base 19: mod_base = OTHER; note = 2'-O-methylguanosine-3'-phosphate
  modified_base 20: mod_base = OTHER; note = 2'-O-methylcytidine-3'-phosphate
  modified_base 21: mod_base = OTHER; note = 2'-O-methylcytidine-3'-phosphorothioate
  modified_base 22: mod_base = OTHER; note = 2'-O-methyladenosine-3'-phosphorothioate
  modified_base 23: mod_base = OTHER; note = 2'-O-methyladenosine
aatgctgcaatattatcagccaa

SEQ ID NO: 2216 - RNA, 21 nt, synthetic construct
  source 1..21: mol_type = other RNA
  modified_base 1: mod_base = OTHER; note = 2'-O-methyluridine-3'-phosphorothioate
  modified_base 2: mod_base = OTHER; note = 2'-O-methylguanosine-3'-phosphorothioate
  modified_base 3: mod_base = OTHER; note = 2'-O-methylguanosine-3'-phosphate
  modified_base 4: mod_base = OTHER; note = 2'-O-methylcytidine-3'-phosphate
  modified_base 5: mod_base = OTHER; note = 2'-O-methyluridine-3'-phosphate
  modified_base 6: mod_base = OTHER; note = 2'-O-methylguanosine-3'-phosphate
  modified_base 7: mod_base = OTHER; note = 2'-deoxy-2'-fluoroadenosine-3'-phosphate
  modified_base 8: mod_base = OTHER; note = 2'-O-methyluridine-3'-phosphate
  modified_base 9: mod_base = OTHER; note = 2'-deoxy-2'-fluoroadenosine-3'-phosphate
  modified_base 10: mod_base = OTHER; note = 2'-deoxy-2'-fluoroadenosine-3'-phosphate
  modified_base 11: mod_base = OTHER; note = 2'-deoxy-2'-fluorouridine-3'-phosphate
  modified_base 12: mod_base = OTHER; note = 2'-O-methyladenosine-3'-phosphate
  modified_base 13: mod_base = OTHER; note = 2'-O-methyluridine-3'-phosphate
  modified_base 14: mod_base = OTHER; note = 2'-O-methyluridine-3'-phosphate
  modified_base 15: mod_base = OTHER; note = 2'-O-methylguanosine-3'-phosphate
  modified_base 16: mod_base = OTHER; note = 2'-O-methylcytidine-3'-phosphate
  modified_base 17: mod_base = OTHER; note = 2'-O-methyladenosine-3'-phosphate
  modified_base 18: mod_base = OTHER; note = 2'-O-methylguanosine-3'-phosphate
  modified_base 19: mod_base = OTHER; note = 2'-O-methylcytidine-3'-phosphate
  modified_base 20: mod_base = OTHER; note = 2'-O-methyladenosine-3'-phosphate
  modified_base 21: mod_base = OTHER; note = 2'-O-methyluridine-3'-phosphate ((2S,4R)-1-[29-[[2-(acetylamino)-2-deoxy-beta-D-galactopyra nosyl]oxy]-14,14-bis[[3-[[3-[[5-[[2-(acetylamino)-2-deoxy-b eta-D-galactopyranosyl]oxy]-1-oxopentyl]amino]propyl]amino] -3-oxopropoxy]methyl]-1,12,19,25-tetraoxo-16-oxa-13,20,24-t riazanonacos-1-yl]-4-hydroxy-2-pyrrolidinyl)methyl ester
tggctgataatattgcagcat

SEQ ID NO: 2217 - RNA, 23 nt, synthetic construct
  source 1..23: mol_type = other RNA
  modified_base 1: mod_base = OTHER; note = 2'-O-methyladenosine-3'-phosphorothioate
  modified_base 2: mod_base = OTHER; note = 2'-deoxy-2'-fluorouridine-3'-phosphorothioate
  modified_base 3: mod_base = OTHER; note = 2'-O-methylguanosine-3'-phosphate
  modified_base 4: mod_base = OTHER; note = 2'-O-methylcytidine-3'-phosphate
  modified_base 5: mod_base = OTHER; note = 2'-O-methyluridine-3'-phosphate
  modified_base 6: mod_base = OTHER; note = 2'-deoxy-2'-fluoroguanosine-3'-phosphate
  modified_base 7: mod_base = OTHER; note = 2'-O-methylcytidine-3'-phosphate
  modified_base 8: mod_base = OTHER; note = 2'-deoxy-2'-fluoroadenosine-3'-phosphate
  modified_base 9: mod_base = OTHER; note = 2'-deoxy-2'-fluoroadenosine-3'-phosphate
  modified_base 10: mod_base = OTHER; note = 2'-O-methyluridine-3'-phosphate
  modified_base 11: mod_base = OTHER; note = 2'-O-methyladenosine-3'-phosphate
  modified_base 12: mod_base = OTHER; note = 2'-O-methyluridine-3'-phosphate
  modified_base 13: mod_base = OTHER; note = 2'-O-methyluridine-3'-phosphate
  modified_base 14: mod_base = OTHER; note = 2'-deoxy-2'-fluoroadenosine-3'-phosphate
  modified_base 15: mod_base = OTHER; note = 2'-O-methyluridine-3'-phosphate
  modified_base 16: mod_base = OTHER; note = 2'-deoxy-2'-fluorocytidine-3'-phosphate
  modified_base 17: mod_base = OTHER; note = 2'-O-methyladenosine-3'-phosphate
  modified_base 18: mod_base = OTHER; note = 2'-O-methylguanosine-3'-phosphate
  modified_base 19: mod_base = OTHER; note = 2'-O-methylcytidine-3'-phosphate
  modified_base 20: mod_base = OTHER; note = 2'-O-methylcytidine-3'-phosphate
  modified_base 21: mod_base = OTHER; note = 2'-O-methyladenosine-3'-phosphorothioate
  modified_base 22: mod_base = OTHER; note = 2'-O-methyladenosine-3'-phosphorothioate
  modified_base 23: mod_base = OTHER; note = 2'-O-methyladenosine
atgctgcaatattatcagccaaa

SEQ ID NO: 2218 - RNA, 21 nt, synthetic construct
  source 1..21: mol_type = other RNA
  modified_base 1: mod_base = OTHER; note = 2'-O-methylguanosine-3'-phosphorothioate
  modified_base 2: mod_base = OTHER; note = 2'-O-methylcytidine-3'-phosphorothioate
  modified_base 3: mod_base = OTHER; note = 2'-O-methyluridine-3'-phosphate
  modified_base 4: mod_base = OTHER; note = 2'-O-methyladenosine-3'-phosphate
  modified_base 5: mod_base = OTHER; note = 2'-O-methyladenosine-3'-phosphate
  modified_base 6: mod_base = OTHER; note = 2'-O-methyluridine-3'-phosphate
  modified_base 7: mod_base = OTHER; note = 2'-deoxy-2'-fluorouridine-3'-phosphate
  modified_base 8: mod_base = OTHER; note = 2'-O-methyluridine-3'-phosphate
  modified_base 9: mod_base = OTHER; note = 2'-deoxy-2'-fluoroguanosine-3'-phosphate
  modified_base 10: mod_base = OTHER; note = 2'-deoxy-2'-fluorouridine-3'-phosphate
  modified_base 11: mod_base = OTHER; note = 2'-deoxy-2'-fluoroadenosine-3'-phosphate
  modified_base 12: mod_base = OTHER; note = 2'-O-methyluridine-3'-phosphate
  modified_base 13: mod_base = OTHER; note = 2'-O-methylcytidine-3'-phosphate
  modified_base 14: mod_base = OTHER; note = 2'-O-methyladenosine-3'-phosphate
  modified_base 15: mod_base = OTHER; note = 2'-O-methyladenosine-3'-phosphate
  modified_base 16: mod_base = OTHER; note = 2'-O-methyluridine-3'-phosphate
  modified_base 17: mod_base = OTHER; note = 2'-O-methylguanosine-3'-phosphate
  modified_base 18: mod_base = OTHER; note = 2'-O-methyladenosine-3'-phosphate
  modified_base 19: mod_base = OTHER; note = 2'-O-methyluridine-3'-phosphate
  modified_base 20: mod_base = OTHER; note = 2'-O-methyluridine-3'-phosphate
  modified_base 21: mod_base = OTHER; note = 2'-O-methyladenosine-3'-phosphate ((2S,4R)-1-[29-[[2-(acetylamino)-2-deoxy-beta-D-galactopyra nosyl]oxy]-14,14-bis[[3-[[3-[[5-[[2-(acetylamino)-2-deoxy-b eta-D-galactopyranosyl]oxy]-1-oxopentyl]amino]propyl]amino] -3-oxopropoxy]methyl]-1,12,19,25-tetraoxo-16-oxa-13,20,24-t riazanonacos-1-yl]-4-hydroxy-2-pyrrolidinyl)methyl ester
gctaatttgtatcaatgatta

SEQ ID NO: 2219 - RNA, 23 nt, synthetic construct
  source 1..23: mol_type = other RNA
  modified_base 1: mod_base = OTHER; note = 2'-O-methyluridine-3'-phosphorothioate
  modified_base 2: mod_base = OTHER; note = 2'-deoxy-2'-fluoroadenosine-3'-phosphorothioate
  modified_base 3: mod_base = OTHER; note = 2'-O-methyladenosine-3'-phosphate
  modified_base 4: mod_base = OTHER; note = 2'-O-methyluridine-3'-phosphate
  modified_base 5: mod_base = OTHER; note = 2'-O-methylcytidine-3'-phosphate
  modified_base 6: mod_base = OTHER; note = 2'-deoxy-2'-fluoroadenosine-3'-phosphate
  modified_base 7: mod_base = OTHER; note = 2'-O-methyluridine-3'-phosphate
  modified_base 8: mod_base = OTHER; note = 2'-deoxy-2'-fluorouridine-3'-phosphate
  modified_base 9: mod_base = OTHER; note = 2'-deoxy-2'-fluoroguanosine-3'-phosphate
  modified_base 10: mod_base = OTHER; note = 2'-O-methyladenosine-3'-phosphate
  modified_base 11: mod_base = OTHER; note = 2'-O-methyluridine-3'-phosphate
  modified_base 12: mod_base = OTHER; note = 2'-O-methyladenosine-3'-phosphate
  modified_base 13: mod_base = OTHER; note = 2'-O-methylcytidine-3'-phosphate
  modified_base 14: mod_base = OTHER; note = 2'-deoxy-2'-fluoroadenosine-3'-phosphate
  modified_base 15: mod_base = OTHER; note = 2'-O-methyladenosine-3'-phosphate
  modified_base 16: mod_base = OTHER; note = 2'-deoxy-2'-fluoroadenosine-3'-phosphate
  modified_base 17: mod_base = OTHER; note = 2'-O-methyluridine-3'-phosphate
  modified_base 18: mod_base = OTHER; note = 2'-O-methyluridine-3'-phosphate
  modified_base 19: mod_base = OTHER; note = 2'-O-methyladenosine-3'-phosphate
  modified_base 20: mod_base = OTHER; note = 2'-O-methylguanosine-3'-phosphate
  modified_base 21: mod_base = OTHER; note = 2'-O-methylcytidine-3'-phosphorothioate
  modified_base 22: mod_base = OTHER; note = 2'-O-methylcytidine-3'-phosphorothioate
  modified_base 23: mod_base = OTHER; note = 2'-O-methylguanosine
taatcattgatacaaattagccg

SEQ ID NO: 2220 - RNA, 21 nt, synthetic construct
  source 1..21: mol_type = other RNA
  modified_base 1: mod_base = OTHER; note = 2'-O-methylcytidine-3'-phosphorothioate
  modified_base 2: mod_base = OTHER; note = 2'-O-methyluridine-3'-phosphorothioate
  modified_base 3: mod_base = OTHER; note = 2'-O-methyladenosine-3'-phosphate
  modified_base 4: mod_base = OTHER; note = 2'-O-methyladenosine-3'-phosphate
  modified_base 5: mod_base = OTHER; note = 2'-O-methyluridine-3'-phosphate
  modified_base 6: mod_base = OTHER; note = 2'-O-methyluridine-3'-phosphate
  modified_base 7: mod_base = OTHER; note = 2'-deoxy-2'-fluorouridine-3'-phosphate
  modified_base 8: mod_base = OTHER; note = 2'-O-methylguanosine-3'-phosphate
  modified_base 9: mod_base = OTHER; note = 2'-deoxy-2'-fluorouridine-3'-phosphate
  modified_base 10: mod_base = OTHER; note = 2'-deoxy-2'-fluoroadenosine-3'-phosphate
  modified_base 11: mod_base = OTHER; note = 2'-deoxy-2'-fluorouridine-3'-phosphate
  modified_base 12: mod_base = OTHER; note = 2'-O-methylcytidine-3'-phosphate
  modified_base 13: mod_base = OTHER; note = 2'-O-methyladenosine-3'-phosphate
  modified_base 14: mod_base = OTHER; note = 2'-O-methyladenosine-3'-phosphate
  modified_base 15: mod_base = OTHER; note = 2'-O-methyluridine-3'-phosphate
  modified_base 16: mod_base = OTHER; note = 2'-O-methylguanosine-3'-phosphate
  modified_base 17: mod_base = OTHER; note = 2'-O-methyladenosine-3'-phosphate
  modified_base 18: mod_base = OTHER; note = 2'-O-methyluridine-3'-phosphate
  modified_base 19: mod_base = OTHER; note = 2'-O-methyluridine-3'-phosphate
  modified_base 20: mod_base = OTHER; note = 2'-O-methyladenosine-3'-phosphate
  modified_base 21: mod_base = OTHER; note = 2'-O-methyluridine-3'-phosphate ((2S,4R)-1-[29-[[2-(acetylamino)-2-deoxy-beta-D-galactopyra nosyl]oxy]-14,14-bis[[3-[[3-[[5-[[2-(acetylamino)-2-deoxy-b eta-D-galactopyranosyl]oxy]-1-oxopentyl]amino]propyl]amino] -3-oxopropoxy]methyl]-1,12,19,25-tetraoxo-16-oxa-13,20,24-t riazanonacos-1-yl]-4-hydroxy-2-pyrrolidinyl)methyl ester
ctaatttgtatcaatgattat

SEQ ID NO: 2221 - RNA, 23 nt, synthetic construct
  source 1..23: mol_type = other RNA
  modified_base 1: mod_base = OTHER; note = 2'-O-methyladenosine-3'-phosphorothioate
  modified_base 2: mod_base = OTHER; note = 2'-deoxy-2'-fluorouridine-3'-phosphorothioate
  modified_base 3: mod_base = OTHER; note = 2'-O-methyladenosine-3'-phosphate
  modified_base 4: mod_base = OTHER; note = 2'-O-methyladenosine-3'-phosphate
  modified_base 5: mod_base = OTHER; note = 2'-O-methyluridine-3'-phosphate
  modified_base 6: mod_base = OTHER; note = 2'-deoxy-2'-fluorocytidine-3'-phosphate
  modified_base 7: mod_base = OTHER; note = 2'-O-methyladenosine-3'-phosphate
  modified_base 8: mod_base = OTHER; note = 2'-deoxy-2'-fluorouridine-3'-phosphate
  modified_base 9: mod_base = OTHER; note = 2'-deoxy-2'-fluorouridine-3'-phosphate
  modified_base 10: mod_base = OTHER; note = 2'-O-methylguanosine-3'-phosphate
  modified_base 11: mod_base = OTHER; note = 2'-O-methyladenosine-3'-phosphate
  modified_base 12: mod_base = OTHER; note = 2'-O-methyluridine-3'-phosphate
  modified_base 13: mod_base = OTHER; note = 2'-O-methyladenosine-3'-phosphate
  modified_base 14: mod_base = OTHER; note = 2'-deoxy-2'-fluorocytidine-3'-phosphate
  modified_base 15: mod_base = OTHER; note = 2'-O-methyladenosine-3'-phosphate
  modified_base 16: mod_base = OTHER; note = 2'-deoxy-2'-fluoroadenosine-3'-phosphate
  modified_base 17: mod_base = OTHER; note = 2'-O-methyladenosine-3'-phosphate
  modified_base 18: mod_base = OTHER; note = 2'-O-methyluridine-3'-phosphate
  modified_base 19: mod_base = OTHER; note = 2'-O-methyluridine-3'-phosphate
  modified_base 20: mod_base = OTHER; note = 2'-O-methyladenosine-3'-phosphate
  modified_base 21: mod_base = OTHER; note = 2'-O-methylguanosine-3'-phosphorothioate
  modified_base 22: mod_base = OTHER; note = 2'-O-methylcytidine-3'-phosphorothioate
  modified_base 23: mod_base = OTHER; note = 2'-O-methylcytidine
ataatcattgatacaaattagcc

SEQ ID NO: 2222 - RNA, 21 nt, synthetic construct
  source 1..21: mol_type = other RNA
  modified_base 1: mod_base = OTHER; note = 2'-O-methylcytidine-3'-phosphorothioate
  modified_base 2: mod_base = OTHER; note = 2'-O-methylcytidine-3'-phosphorothioate
  modified_base 3: mod_base = OTHER; note = 2'-O-methylcytidine-3'-phosphate
  modified_base 4: mod_base = OTHER; note = 2'-O-methylguanosine-3'-phosphate
  modified_base 5: mod_base = OTHER; note = 2'-O-methylguanosine-3'-phosphate
  modified_base 6: mod_base = OTHER; note = 2'-O-methylcytidine-3'-phosphate
  modified_base 7: mod_base = OTHER; note = 2'-deoxy-2'-fluorouridine-3'-phosphate
  modified_base 8: mod_base = OTHER; note = 2'-O-methyladenosine-3'-phosphate
  modified_base 9: mod_base = OTHER; note = 2'-deoxy-2'-fluoroadenosine-3'-phosphate
  modified_base 10: mod_base = OTHER; note = 2'-deoxy-2'-fluorouridine-3'-phosphate
  modified_base 11: mod_base = OTHER; note = 2'-deoxy-2'-fluorouridine-3'-phosphate
  modified_base 12: mod_base = OTHER; note = 2'-O-methyluridine-3'-phosphate
  modified_base 13: mod_base = OTHER; note = 2'-O-methylguanosine-3'-phosphate
  modified_base 14: mod_base = OTHER; note = 2'-O-methyluridine-3'-phosphate
  modified_base 15: mod_base = OTHER; note = 2'-O-methyladenosine-3'-phosphate
  modified_base 16: mod_base = OTHER; note = 2'-O-methyluridine-3'-phosphate
  modified_base 17: mod_base = OTHER; note = 2'-O-methylcytidine-3'-phosphate
  modified_base 18: mod_base = OTHER; note = 2'-O-methyladenosine-3'-phosphate
  modified_base 19: mod_base = OTHER; note = 2'-O-methyladenosine-3'-phosphate
  modified_base 20: mod_base = OTHER; note = 2'-O-methyluridine-3'-phosphate
  modified_base 21: mod_base = OTHER; note = 2'-O-methylguanosine-3'-phosphate ((2S,4R)-1-[29-[[2-(acetylamino)-2-deoxy-beta-D-galactopyra nosyl]oxy]-14,14-bis[[3-[[3-[[5-[[2-(acetylamino)-2-deoxy-b eta-D-galactopyranosyl]oxy]-1-oxopentyl]amino]propyl]amino] -3-oxopropoxy]methyl]-1,12,19,25-tetraoxo-16-oxa-13,20,24-t riazanonacos-1-yl]-4-hydroxy-2-pyrrolidinyl)methyl ester
cccggctaatttgtatcaatg

SEQ ID NO: 2223 - RNA, 23 nt, synthetic construct
  source 1..23: mol_type = other RNA
  modified_base 1: mod_base = OTHER; note = 2'-O-methylcytidine-3'-phosphorothioate
  modified_base 2: mod_base = OTHER; note = 2'-deoxy-2'-fluoroadenosine-3'-phosphorothioate
  modified_base 3: mod_base = OTHER; note = 2'-O-methyluridine-3'-phosphate
  modified_base 4: mod_base = OTHER; note = 2'-O-methyluridine-3'-phosphate
  modified_base 5: mod_base = OTHER; note = 2'-O-methylguanosine-3'-phosphate
  modified_base 6: mod_base = OTHER; note = 2'-deoxy-2'-fluoroadenosine-3'-phosphate
  modified_base 7: mod_base = OTHER; note = 2'-O-methyluridine-3'-phosphate
  modified_base 8: mod_base = OTHER; note = 2'-deoxy-2'-fluoroadenosine-3'-phosphate
  modified_base 9: mod_base = OTHER; note = 2'-deoxy-2'-fluorocytidine-3'-phosphate
  modified_base 10: mod_base = OTHER; note = 2'-O-methyladenosine-3'-phosphate
  modified_base 11: mod_base = OTHER; note = 2'-O-methyladenosine-3'-phosphate
  modified_base 12: mod_base = OTHER; note = 2'-O-methyladenosine-3'-phosphate
  modified_base 13: mod_base = OTHER; note = 2'-O-methyluridine-3'-phosphate
  modified_base 14: mod_base = OTHER; note = 2'-deoxy-2'-fluorouridine-3'-phosphate
  modified_base 15: mod_base = OTHER; note = 2'-O-methyladenosine-3'-phosphate
  modified_base 16: mod_base = OTHER; note = 2'-deoxy-2'-fluoroguanosine-3'-phosphate
  modified_base 17: mod_base = OTHER; note = 2'-O-methylcytidine-3'-phosphate
  modified_base 18: mod_base = OTHER; note = 2'-O-methylcytidine-3'-phosphate
  modified_base 19: mod_base = OTHER; note = 2'-O-methylguanosine-3'-phosphate
  modified_base 20: mod_base = OTHER; note = 2'-O-methylguanosine-3'-phosphate
  modified_base 21: mod_base = OTHER; note = 2'-O-methylguanosine-3'-phosphorothioate
  modified_base 22: mod_base = OTHER; note = 2'-O-methylguanosine-3'-phosphorothioate
  modified_base 23: mod_base = OTHER; note = 2'-O-methylguanosine
cattgatacaaattagccggggg

SEQ ID NO: 2224 - RNA, 21 nt, synthetic construct
  source 1..21: mol_type = other RNA
  modified_base 1: mod_base = OTHER; note = 2'-O-methylcytidine-3'-phosphorothioate
  modified_base 2: mod_base = OTHER; note = 2'-O-methylcytidine-3'-phosphorothioate
  modified_base 3: mod_base = OTHER; note = 2'-O-methylcytidine-3'-phosphate
  modified_base 4: mod_base = OTHER; note = 2'-O-methylcytidine-3'-phosphate
  modified_base 5: mod_base = OTHER; note = 2'-O-methylguanosine-3'-phosphate
  modified_base 6: mod_base = OTHER; note = 2'-O-methylguanosine-3'-phosphate
  modified_base 7: mod_base = OTHER; note = 2'-deoxy-2'-fluorocytidine-3'-phosphate
  modified_base 8: mod_base = OTHER; note = 2'-O-methyluridine-3'-phosphate
  modified_base 9: mod_base = OTHER; note = 2'-deoxy-2'-fluoroadenosine-3'-phosphate
  modified_base 10: mod_base = OTHER; note = 2'-deoxy-2'-fluoroadenosine-3'-phosphate
  modified_base 11: mod_base = OTHER; note = 2'-deoxy-2'-fluorouridine-3'-phosphate
  modified_base 12: mod_base = OTHER; note = 2'-O-methyluridine-3'-phosphate
  modified_base 13: mod_base = OTHER; note = 2'-O-methyluridine-3'-phosphate
  modified_base 14: mod_base = OTHER; note = 2'-O-methylguanosine-3'-phosphate
  modified_base 15: mod_base = OTHER; note = 2'-O-methyluridine-3'-phosphate
  modified_base 16: mod_base = OTHER; note = 2'-O-methyladenosine-3'-phosphate
  modified_base 17: mod_base = OTHER; note = 2'-O-methyluridine-3'-phosphate
  modified_base 18: mod_base = OTHER; note = 2'-O-methylcytidine-3'-phosphate
  modified_base 19: mod_base = OTHER; note = 2'-O-methyladenosine-3'-phosphate
  modified_base 20: mod_base = OTHER; note = 2'-O-methyladenosine-3'-phosphate
  modified_base 21: mod_base = OTHER; note = 2'-O-methyluridine-3'-phosphate ((2S,4R)-1-[29-[[2-(acetylamino)-2-deoxy-beta-D-galactopyra nosyl]oxy]-14,14-bis[[3-[[3-[[5-[[2-(acetylamino)-2-deoxy-b eta-D-galactopyranosyl]oxy]-1-oxopentyl]amino]propyl]amino] -3-oxopropoxy]methyl]-1,12,19,25-tetraoxo-16-oxa-13,20,24-t riazanonacos-1-yl]-4-hydroxy-2-pyrrolidinyl)methyl ester
ccccggctaatttgtatcaat

SEQ ID NO: 2225 - RNA, 23 nt, synthetic construct
  source 1..23: mol_type = other RNA
  modified_base 1: mod_base = OTHER; note = 2'-O-methyladenosine-3'-phosphorothioate
  modified_base 2: mod_base = OTHER; note = 2'-deoxy-2'-fluorouridine-3'-phosphorothioate
  modified_base 3: mod_base = OTHER; note = 2'-O-methyluridine-3'-phosphate
  modified_base 4: mod_base = OTHER; note = 2'-O-methylguanosine-3'-phosphate
  modified_base 5: mod_base = OTHER; note = 2'-O-methyladenosine-3'-phosphate
  modified_base 6: mod_base = OTHER; note = 2'-deoxy-2'-fluorouridine-3'-phosphate
  modified_base 7: mod_base = OTHER; note = 2'-O-methyladenosine-3'-phosphate
  modified_base 8: mod_base = OTHER; note = 2'-deoxy-2'-fluorocytidine-3'-phosphate
  modified_base 9: mod_base = OTHER; note = 2'-deoxy-2'-fluoroadenosine-3'-phosphate
  modified_base 10: mod_base = OTHER; note = 2'-O-methyladenosine-3'-phosphate
  modified_base 11: mod_base = OTHER; note = 2'-O-methyladenosine-3'-phosphate
  modified_base 12: mod_base = OTHER; note = 2'-O-methyluridine-3'-phosphate
  modified_base 13: mod_base = OTHER; note = 2'-O-methyluridine-3'-phosphate
  modified_base 14: mod_base = OTHER; note = 2'-deoxy-2'-fluoroadenosine-3'-phosphate
  modified_base 15: mod_base = OTHER; note = 2'-O-methylguanosine-3'-phosphate
  modified_base 16: mod_base = OTHER; note = 2'-deoxy-2'-fluorocytidine-3'-phosphate
  modified_base 17: mod_base = OTHER; note = 2'-O-methylcytidine-3'-phosphate
  modified_base 18: mod_base = OTHER; note = 2'-O-methylguanosine-3'-phosphate
  modified_base 19: mod_base = OTHER; note = 2'-O-methylguanosine-3'-phosphate
  modified_base 20: mod_base = OTHER; note = 2'-O-methylguanosine-3'-phosphate
  modified_base 21: mod_base = OTHER; note = 2'-O-methylguanosine-3'-phosphorothioate
  modified_base 22: mod_base = OTHER; note = 2'-O-methylguanosine-3'-phosphorothioate
  modified_base 23: mod_base = OTHER; note = 2'-O-methyladenosine
attgatacaaattagccggggga

SEQ ID NO: 2226 - RNA, 21 nt, synthetic construct
  source 1..21: mol_type = other RNA
  modified_base 1: mod_base = OTHER; note = 2'-O-methyluridine-3'-phosphorothioate
  modified_base 2: mod_base = OTHER; note = 2'-O-methyladenosine-3'-phosphorothioate
  modified_base 3: mod_base = OTHER; note = 2'-O-methyladenosine-3'-phosphate
  modified_base 4: mod_base = OTHER; note = 2'-O-methyluridine-3'-phosphate
  modified_base 5: mod_base = OTHER; note = 2'-O-methyluridine-3'-phosphate
  modified_base 6: mod_base = OTHER; note = 2'-O-methylguanosine-3'-phosphate
  modified_base 7: mod_base = OTHER; note = 2'-deoxy-2'-fluoroguanosine-3'-phosphate
  modified_base 8: mod_base = OTHER; note = 2'-O-methyluridine-3'-phosphate
  modified_base 9: mod_base = OTHER; note = 2'-deoxy-2'-fluoroguanosine-3'-phosphate
  modified_base 10: mod_base = OTHER; note = 2'-deoxy-2'-fluoroadenosine-3'-phosphate
  modified_base 11: mod_base = OTHER; note = 2'-deoxy-2'-fluorouridine-3'-phosphate
  modified_base 12: mod_base = OTHER; note = 2'-O-methyladenosine-3'-phosphate
  modified_base 13: mod_base = OTHER; note = 2'-O-methylcytidine-3'-phosphate
  modified_base 14: mod_base = OTHER; note = 2'-O-methyluridine-3'-phosphate
  modified_base 15: mod_base = OTHER; note = 2'-O-methyluridine-3'-phosphate
  modified_base 16: mod_base = OTHER; note = 2'-O-methylcytidine-3'-phosphate
  modified_base 17: mod_base = OTHER; note = 2'-O-methyluridine-3'-phosphate
  modified_base 18: mod_base = OTHER; note = 2'-O-methyluridine-3'-phosphate
  modified_base 19: mod_base = OTHER; note = 2'-O-methyluridine-3'-phosphate
  modified_base 20: mod_base = OTHER; note = 2'-O-methylguanosine-3'-phosphate
  modified_base 21: mod_base = OTHER; note = 2'-O-methyladenosine-3'-phosphate ((2S,4R)-1-[29-[[2-(acetylamino)-2-deoxy-beta-D-galactopyra nosyl]oxy]-14,14-bis[[3-[[3-[[5-[[2-(acetylamino)-2-deoxy-b eta-D-galactopyranosyl]oxy]-1-oxopentyl]amino]propyl]amino] -3-oxopropoxy]methyl]-1,12,19,25-tetraoxo-16-oxa-13,20,24-t riazanonacos-1-yl]-4-hydroxy-2-pyrrolidinyl)methyl ester
taattggtgatacttctttga

SEQ ID NO: 2227 - RNA, 23 nt, synthetic construct
  source 1..23: mol_type = other RNA
  modified_base 1: mod_base = OTHER; note = 2'-O-methyluridine-3'-phosphorothioate
  modified_base 2: mod_base = OTHER; note = 2'-deoxy-2'-fluorocytidine-3'-phosphorothioate
  modified_base 3: mod_base = OTHER; note = 2'-O-methyladenosine-3'-phosphate
  modified_base 4: mod_base = OTHER; note = 2'-O-methyladenosine-3'-phosphate
  modified_base 5: mod_base = OTHER; note = 2'-O-methyladenosine-3'-phosphate
  modified_base 6: mod_base = OTHER; note = 2'-deoxy-2'-fluoroguanosine-3'-phosphate
  modified_base 7: mod_base = OTHER; note = 2'-O-methyladenosine-3'-phosphate
  modified_base 8: mod_base = OTHER; note = 2'-deoxy-2'-fluoroadenosine-3'-phosphate
  modified_base 9: mod_base = OTHER; note = 2'-deoxy-2'-fluoroguanosine-3'-phosphate
  modified_base 10: mod_base = OTHER; note = 2'-O-methyluridine-3'-phosphate
  modified_base 11: mod_base = OTHER; note = 2'-O-methyladenosine-3'-phosphate
  modified_base 12: mod_base = OTHER; note = 2'-O-methyluridine-3'-phosphate
  modified_base 13: mod_base = OTHER; note = 2'-O-methylcytidine-3'-phosphate
  modified_base 14: mod_base = OTHER; note = 2'-deoxy-2'-fluoroadenosine-3'-phosphate
  modified_base 15: mod_base = OTHER; note = 2'-O-methylcytidine-3'-phosphate
  modified_base 16: mod_base = OTHER; note = 2'-deoxy-2'-fluorocytidine-3'-phosphate
  modified_base 17: mod_base = OTHER; note = 2'-O-methyladenosine-3'-phosphate
  modified_base 18: mod_base = OTHER; note = 2'-O-methyladenosine-3'-phosphate
  modified_base 19: mod_base = OTHER; note = 2'-O-methyluridine-3'-phosphate
  modified_base 20: mod_base = OTHER; note = 2'-O-methyluridine-3'-phosphate
  modified_base 21: mod_base = OTHER; note = 2'-O-methyladenosine-3'-phosphorothioate
  modified_base 22: mod_base = OTHER; note = 2'-O-methylcytidine-3'-phosphorothioate
  modified_base 23: mod_base = OTHER; note = 2'-O-methylcytidine
tcaaagaagtatcaccaattacc

SEQ ID NO: 2228 - RNA, 21 nt, synthetic construct
  source 1..21: mol_type = other RNA
  modified_base 1: mod_base = OTHER; note = 2'-O-methyladenosine-3'-phosphorothioate
  modified_base 2: mod_base = OTHER; note = 2'-O-methyladenosine-3'-phosphorothioate
  modified_base 3: mod_base = OTHER; note = 2'-O-methyluridine-3'-phosphate
  modified_base 4: mod_base = OTHER; note = 2'-O-methyluridine-3'-phosphate
  modified_base 5: mod_base = OTHER; note = 2'-O-methylguanosine-3'-phosphate
  modified_base 6: mod_base = OTHER; note = 2'-O-methylguanosine-3'-phosphate
  modified_base 7: mod_base = OTHER; note = 2'-deoxy-2'-fluorouridine-3'-phosphate
  modified_base 8: mod_base = OTHER; note = 2'-O-methylguanosine-3'-phosphate
  modified_base 9: mod_base = OTHER; note = 2'-deoxy-2'-fluoroadenosine-3'-phosphate
  modified_base 10: mod_base = OTHER; note = 2'-deoxy-2'-fluorouridine-3'-phosphate
  modified_base 11: mod_base = OTHER; note = 2'-deoxy-2'-fluoroadenosine-3'-phosphate
  modified_base 12: mod_base = OTHER; note = 2'-O-methylcytidine-3'-phosphate
  modified_base 13: mod_base = OTHER; note = 2'-O-methyluridine-3'-phosphate
  modified_base 14: mod_base = OTHER; note = 2'-O-methyluridine-3'-phosphate
  modified_base 15: mod_base = OTHER; note = 2'-O-methylcytidine-3'-phosphate
  modified_base 16: mod_base = OTHER; note = 2'-O-methyluridine-3'-phosphate
  modified_base 17: mod_base = OTHER; note = 2'-O-methyluridine-3'-phosphate
  modified_base 18: mod_base = OTHER; note = 2'-O-methyluridine-3'-phosphate
  modified_base 19: mod_base = OTHER; note = 2'-O-methylguanosine-3'-phosphate
  modified_base 20: mod_base = OTHER; note = 2'-O-methyladenosine-3'-phosphate
  modified_base 21: mod_base = OTHER; note = 2'-O-methyladenosine-3'-phosphate ((2S,4R)-1-[29-[[2-(acetylamino)-2-deoxy-beta-D-galactopyra nosyl]oxy]-14,14-bis[[3-[[3-[[5-[[2-(acetylamino)-2-deoxy-b eta-D-galactopyranosyl]oxy]-1-oxopentyl]amino]propyl]amino] -3-oxopropoxy]methyl]-1,12,19,25-tetraoxo-16-oxa-13,20,24-t riazanonacos-1-yl]-4-hydroxy-2-pyrrolidinyl)methyl ester
aattggtgatacttctttgaa

SEQ ID NO: 2229 - RNA, 23 nt, synthetic construct
  source 1..23: mol_type = other RNA
  modified_base 1: mod_base = OTHER; note = 2'-O-methyluridine-3'-phosphorothioate
  modified_base 2: mod_base = OTHER; note = 2'-deoxy-2'-fluorouridine-3'-phosphorothioate
  modified_base 3: mod_base = OTHER; note = 2'-O-methylcytidine-3'-phosphate
  modified_base 4: mod_base = OTHER; note = 2'-O-methyladenosine-3'-phosphate
  modified_base 5: mod_base = OTHER; note = 2'-O-methyladenosine-3'-phosphate
  modified_base 6: mod_base = OTHER; note = 2'-deoxy-2'-fluoroadenosine-3'-phosphate
  modified_base 7: mod_base = OTHER; note = 2'-O-methylguanosine-3'-phosphate
  modified_base 8: mod_base = OTHER; note = 2'-deoxy-2'-fluoroadenosine-3'-phosphate
  modified_base 9: mod_base = OTHER; note = 2'-deoxy-2'-fluoroadenosine-3'-phosphate
  modified_base 10: mod_base = OTHER; note = 2'-O-methylguanosine-3'-phosphate
  modified_base 11: mod_base = OTHER; note = 2'-O-methyluridine-3'-phosphate
  modified_base 12: mod_base = OTHER; note = 2'-O-methyladenosine-3'-phosphate
  modified_base 13: mod_base = OTHER; note = 2'-O-methyluridine-3'-phosphate
  modified_base 14: mod_base = OTHER; note = 2'-deoxy-2'-fluorocytidine-3'-phosphate
  modified_base 15: mod_base = OTHER; note = 2'-O-methyladenosine-3'-phosphate
  modified_base 16: mod_base = OTHER; note = 2'-deoxy-2'-fluorocytidine-3'-phosphate
  modified_base 17: mod_base = OTHER; note = 2'-O-methylcytidine-3'-phosphate
  modified_base 18: mod_base = OTHER; note = 2'-O-methyladenosine-3'-phosphate
  modified_base 19: mod_base = OTHER; note = 2'-O-methyladenosine-3'-phosphate
  modified_base 20: mod_base = OTHER; note = 2'-O-methyluridine-3'-phosphate
  modified_base 21: mod_base = OTHER; note = 2'-O-methyluridine-3'-phosphorothioate
  modified_base 22: mod_base = OTHER; note = 2'-O-methyladenosine-3'-phosphorothioate
  modified_base 23: mod_base = OTHER; note = 2'-O-methylcytidine
ttcaaagaagtatcaccaattac

SEQ ID NO: 2230 - RNA, 21 nt, synthetic construct
  source 1..21: mol_type = other RNA
  modified_base 1: mod_base = OTHER; note = 2'-O-methylguanosine-3'-phosphorothioate
  modified_base 2: mod_base = OTHER; note = 2'-O-methylcytidine-3'-phosphorothioate
  modified_base 3: mod_base = OTHER; note = 2'-O-methylguanosine-3'-phosphate
  modified_base 4: mod_base = OTHER; note = 2'-O-methylguanosine-3'-phosphate
  modified_base 5: mod_base = OTHER; note = 2'-O-methyluridine-3'-phosphate
  modified_base 6: mod_base = OTHER; note = 2'-O-methyladenosine-3'-phosphate
  modified_base 7: mod_base = OTHER; note = 2'-deoxy-2'-fluoroadenosine-3'-phosphate
  modified_base 8: mod_base = OTHER; note = 2'-O-methyluridine-3'-phosphate
  modified_base 9: mod_base = OTHER; note = 2'-deoxy-2'-fluorouridine-3'-phosphate
  modified_base 10: mod_base = OTHER; note = 2'-deoxy-2'-fluoroguanosine-3'-phosphate
  modified_base 11: mod_base = OTHER; note = 2'-deoxy-2'-fluoroguanosine-3'-phosphate
  modified_base 12: mod_base = OTHER; note = 2'-O-methyluridine-3'-phosphate
  modified_base 13: mod_base = OTHER; note = 2'-O-methylguanosine-3'-phosphate
  modified_base 14: mod_base = OTHER; note = 2'-O-methyladenosine-3'-phosphate
  modified_base 15: mod_base = OTHER; note = 2'-O-methyluridine-3'-phosphate
  modified_base 16: mod_base = OTHER; note = 2'-O-methyladenosine-3'-phosphate
  modified_base 17: mod_base = OTHER; note = 2'-O-methylcytidine-3'-phosphate
  modified_base 18: mod_base = OTHER; note = 2'-O-methyluridine-3'-phosphate
  modified_base 19: mod_base = OTHER; note = 2'-O-methyluridine-3'-phosphate
  modified_base 20: mod_base = OTHER; note = 2'-O-methylcytidine-3'-phosphate
  modified_base 21: mod_base = OTHER; note = 2'-O-methyluridine-3'-phosphate ((2S,4R)-1-[29-[[2-(acetylamino)-2-deoxy-beta-D-galactopyra nosyl]oxy]-14,14-bis[[3-[[3-[[5-[[2-(acetylamino)-2-deoxy-b eta-D-galactopyranosyl]oxy]-1-oxopentyl]amino]propyl]amino] -3-oxopropoxy]methyl]-1,12,19,25-tetraoxo-16-oxa-13,20,24-t riazanonacos-1-yl]-4-hydroxy-2-pyrrolidinyl)methyl ester
gcggtaattggtgatacttct

SEQ ID NO: 2231 - RNA, 23 nt, synthetic construct
  source 1..23: mol_type = other RNA
  modified_base 1: mod_base = OTHER; note = 2'-O-methyladenosine-3'-phosphorothioate
  modified_base 2: mod_base = OTHER; note = 2'-deoxy-2'-fluoroguanosine-3'-phosphorothioate
  modified_base 3: mod_base = OTHER; note = 2'-O-methyladenosine-3'-phosphate
  modified_base 4: mod_base = OTHER; note = 2'-O-methyladenosine-3'-phosphate
  modified_base 5: mod_base = OTHER; note = 2'-O-methylguanosine-3'-phosphate
  modified_base 6: mod_base = OTHER; note = 2'-deoxy-2'-fluorouridine-3'-phosphate
  modified_base 7: mod_base = OTHER; note = 2'-O-methyladenosine-3'-phosphate
  modified_base 8: mod_base = OTHER; note = 2'-deoxy-2'-fluorouridine-3'-phosphate
  modified_base 9: mod_base = OTHER; note = 2'-deoxy-2'-fluorocytidine-3'-phosphate
  modified_base 10: mod_base = OTHER; note = 2'-O-methyladenosine-3'-phosphate
  modified_base 11: mod_base = OTHER; note = 2'-O-methylcytidine-3'-phosphate
  modified_base 12: mod_base = OTHER; note = 2'-O-methylcytidine-3'-phosphate
  modified_base 13: mod_base = OTHER; note = 2'-O-methyladenosine-3'-phosphate
  modified_base 14: mod_base = OTHER; note = 2'-deoxy-2'-fluoroadenosine-3'-phosphate
  modified_base 15: mod_base = OTHER; note = 2'-O-methyluridine-3'-phosphate
  modified_base 16: mod_base = OTHER; note = 2'-deoxy-2'-fluorouridine-3'-phosphate
  modified_base 17: mod_base = OTHER; note = 2'-O-methyladenosine-3'-phosphate
  modified_base 18: mod_base = OTHER; note = 2'-O-methylcytidine-3'-phosphate
  modified_base 19: mod_base = OTHER; note = 2'-O-methylcytidine-3'-phosphate
  modified_base 20: mod_base = OTHER; note = 2'-O-methylguanosine-3'-phosphate
  modified_base 21: mod_base = OTHER; note = 2'-O-methylcytidine-3'-phosphorothioate
  modified_base 22: mod_base = OTHER; note = 2'-O-methylcytidine-3'-phosphorothioate
  modified_base 23: mod_base = OTHER; note = 2'-O-methyladenosine
agaagtatcaccaattaccgcca

SEQ ID NO: 2232 - RNA, 21 nt, synthetic construct
  source 1..21: mol_type = other RNA
  modified_base 1: mod_base = OTHER; note = 2'-O-methylguanosine-3'-phosphorothioate
  modified_base 2: mod_base = OTHER; note = 2'-O-methylguanosine-3'-phosphorothioate
  modified_base 3: mod_base = OTHER; note = 2'-O-methylcytidine-3'-phosphate
  modified_base 4: mod_base = OTHER; note = 2'-O-methylguanosine-3'-phosphate
  modified_base 5: mod_base = OTHER; note = 2'-O-methylguanosine-3'-phosphate
  modified_base 6: mod_base = OTHER; note = 2'-O-methyluridine-3'-phosphate
  modified_base 7: mod_base = OTHER; note = 2'-deoxy-2'-fluoroadenosine-3'-phosphate
  modified_base 8: mod_base = OTHER; note = 2'-O-methyladenosine-3'-phosphate
  modified_base 9: mod_base = OTHER; note = 2'-deoxy-2'-fluorouridine-3'-phosphate
  modified_base 10: mod_base = OTHER; note = 2'-deoxy-2'-fluorouridine-3'-phosphate
  modified_base 11: mod_base = OTHER; note = 2'-deoxy-2'-fluoroguanosine-3'-phosphate
  modified_base 12: mod_base = OTHER; note = 2'-O-methylguanosine-3'-phosphate
  modified_base 13: mod_base = OTHER; note = 2'-O-methyluridine-3'-phosphate
  modified_base 14: mod_base = OTHER; note = 2'-O-methylguanosine-3'-phosphate
  modified_base 15: mod_base = OTHER; note = 2'-O-methyladenosine-3'-phosphate
  modified_base 16: mod_base = OTHER; note = 2'-O-methyluridine-3'-phosphate
  modified_base 17: mod_base = OTHER; note = 2'-O-methyladenosine-3'-phosphate
  modified_base 18: mod_base = OTHER; note = 2'-O-methylcytidine-3'-phosphate
  modified_base 19: mod_base = OTHER; note = 2'-O-methyluridine-3'-phosphate
  modified_base 20: mod_base = OTHER; note = 2'-O-methyluridine-3'-phosphate
  modified_base 21: mod_base = OTHER; note = 2'-O-methylcytidine-3'-phosphate ((2S,4R)-1-[29-[[2-(acetylamino)-2-deoxy-beta-D-galactopyra nosyl]oxy]-14,14-bis[[3-[[3-[[5-[[2-(acetylamino)-2-deoxy-b eta-D-galactopyranosyl]oxy]-1-oxopentyl]amino]propyl]amino] -3-oxopropoxy]methyl]-1,12,19,25-tetraoxo-16-oxa-13,20,24-t riazanonacos-1-yl]-4-hydroxy-2-pyrrolidinyl)methyl ester
ggcggtaattggtgatacttc

SEQ ID NO: 2233 - RNA, 23 nt, synthetic construct
  source 1..23: mol_type = other RNA
  modified_base 1: mod_base = OTHER; note = 2'-O-methylguanosine-3'-phosphorothioate
  modified_base 2: mod_base = OTHER; note = 2'-deoxy-2'-fluoroadenosine-3'-phosphorothioate
  modified_base 3: mod_base = OTHER; note = 2'-O-methyladenosine-3'-phosphate
  modified_base 4: mod_base = OTHER; note = 2'-O-methylguanosine-3'-phosphate
  modified_base 5: mod_base = OTHER; note = 2'-O-methyluridine-3'-phosphate
  modified_base 6: mod_base = OTHER; note = 2'-deoxy-2'-fluoroadenosine-3'-phosphate
  modified_base 7: mod_base = OTHER; note = 2'-O-methyluridine-3'-phosphate
  modified_base 8: mod_base = OTHER; note = 2'-deoxy-2'-fluorocytidine-3'-phosphate
  modified_base 9: mod_base = OTHER; note = 2'-deoxy-2'-fluoroadenosine-3'-phosphate
  modified_base 10: mod_base = OTHER; note = 2'-O-methylcytidine-3'-phosphate
  modified_base 11: mod_base = OTHER; note = 2'-O-methylcytidine-3'-phosphate
  modified_base 12: mod_base = OTHER; note = 2'-O-methyladenosine-3'-phosphate
  modified_base 13: mod_base = OTHER; note = 2'-O-methyladenosine-3'-phosphate
  modified_base 14: mod_base = OTHER; note = 2'-deoxy-2'-fluorouridine-3'-phosphate
  modified_base 15: mod_base = OTHER; note = 2'-O-methyluridine-3'-phosphate
  modified_base 16: mod_base = OTHER; note = 2'-deoxy-2'-fluoroadenosine-3'-phosphate
  modified_base 17: mod_base = OTHER; note = 2'-O-methylcytidine-3'-phosphate
  modified_base 18: mod_base = OTHER; note = 2'-O-methylcytidine-3'-phosphate
  modified_base 19: mod_base = OTHER; note = 2'-O-methylguanosine-3'-phosphate
  modified_base 20: mod_base = OTHER; note = 2'-O-methylcytidine-3'-phosphate
  modified_base 21: mod_base = OTHER; note = 2'-O-methylcytidine-3'-phosphorothioate
  modified_base 22: mod_base = OTHER; note = 2'-O-methyladenosine-3'-phosphorothioate
  modified_base 23: mod_base = OTHER; note = 2'-O-methylcytidine
gaagtatcaccaattaccgccac

SEQ ID NO: 2234 - RNA, 21 nt, synthetic construct
  source 1..21: mol_type = other RNA
  modified_base 1: mod_base = OTHER; note = 2'-O-methylcytidine-3'-phosphorothioate
  modified_base 2: mod_base = OTHER; note = 2'-O-methyladenosine-3'-phosphorothioate
  modified_base 3: mod_base = OTHER; note = 2'-O-methylguanosine-3'-phosphate
  modified_base 4: mod_base = OTHER; note = 2'-O-methyluridine-3'-phosphate
  modified_base 5: mod_base = OTHER; note = 2'-O-methylguanosine-3'-phosphate
  modified_base 6: mod_base = OTHER; note = 2'-O-methylguanosine-3'-phosphate
  modified_base 7: mod_base = OTHER; note = 2'-deoxy-2'-fluorouridine-3'-phosphate
  modified_base 8: mod_base = OTHER; note = 2'-O-methyluridine-3'-phosphate
  modified_base 9: mod_base = OTHER; note = 2'-deoxy-2'-fluorocytidine-3'-phosphate
  modified_base 10: mod_base = OTHER; note = 2'-deoxy-2'-fluorouridine-3'-phosphate
  modified_base 11: mod_base = OTHER; note = 2'-deoxy-2'-fluorouridine-3'-phosphate
  modified_base 12: mod_base = OTHER; note = 2'-O-methyladenosine-3'-phosphate
  modified_base 13: mod_base = OTHER; note = 2'-O-methyladenosine-3'-phosphate
  modified_base 14: mod_base = OTHER; note = 2'-O-methyladenosine-3'-phosphate
  modified_base 15: mod_base = OTHER; note = 2'-O-methyluridine-3'-phosphate
  modified_base 16: mod_base = OTHER; note = 2'-O-methyluridine-3'-phosphate
  modified_base 17: mod_base = OTHER; note = 2'-O-methylguanosine-3'-phosphate
  modified_base 18: mod_base = OTHER; note = 2'-O-methyluridine-3'-phosphate
  modified_base 19: mod_base = OTHER; note = 2'-O-methyladenosine-3'-phosphate
  modified_base 20: mod_base = OTHER; note = 2'-O-methyladenosine-3'-phosphate
  modified_base 21: mod_base = OTHER; note = 2'-O-methylguanosine-3'-phosphate ((2S,4R)-1-[29-[[2-(acetylamino)-2-deoxy-beta-D-galactopyra nosyl]oxy]-14,14-bis[[3-[[3-[[5-[[2-(acetylamino)-2-deoxy-b eta-D-galactopyranosyl]oxy]-1-oxopentyl]amino]propyl]amino] -3-oxopropoxy]methyl]-1,12,19,25-tetraoxo-16-oxa-13,20,24-t riazanonacos-1-yl]-4-hydroxy-2-pyrrolidinyl)methyl ester
cagtggttcttaaattgtaag

SEQ ID NO: 2235 - RNA, 23 nt, synthetic construct
  source 1..23: mol_type = other RNA
  modified_base 1: mod_base = OTHER; note = 2'-O-methylcytidine-3'-phosphorothioate
  modified_base 2: mod_base = OTHER; note = 2'-deoxy-2'-fluorouridine-3'-phosphorothioate
  modified_base 3: mod_base = OTHER; note = 2'-O-methyluridine-3'-phosphate
  modified_base 4: mod_base = OTHER; note = 2'-O-methyladenosine-3'-phosphate
  modified_base 5: mod_base = OTHER; note = 2'-O-methylcytidine-3'-phosphate
  modified_base 6: mod_base = OTHER; note = 2'-deoxy-2'-fluoroadenosine-3'-phosphate
  modified_base 7: mod_base = OTHER; note = 2'-O-methyladenosine-3'-phosphate
  modified_base 8: mod_base = OTHER; note = 2'-deoxy-2'-fluorouridine-3'-phosphate
  modified_base 9: mod_base = OTHER; note = 2'-deoxy-2'-fluorouridine-3'-phosphate
  modified_base 10: mod_base = OTHER; note = 2'-O-methyluridine-3'-phosphate
  modified_base 11: mod_base = OTHER; note = 2'-O-methyladenosine-3'-phosphate
  modified_base 12: mod_base = OTHER; note = 2'-O-methyladenosine-3'-phosphate
  modified_base 13: mod_base = OTHER; note = 2'-O-methylguanosine-3'-phosphate
  modified_base 14: mod_base = OTHER; note = 2'-deoxy-2'-fluoroadenosine-3'-phosphate
  modified_base 15: mod_base = OTHER; note = 2'-O-methyladenosine-3'-phosphate
  modified_base 16: mod_base = OTHER; note = 2'-deoxy-2'-fluorocytidine-3'-phosphate
  modified_base 17: mod_base = OTHER; note = 2'-O-methylcytidine-3'-phosphate
  modified_base 18: mod_base = OTHER; note = 2'-O-methyladenosine-3'-phosphate
  modified_base 19: mod_base = OTHER; note = 2'-O-methylcytidine-3'-phosphate
  modified_base 20: mod_base = OTHER; note = 2'-O-methyluridine-3'-phosphate
  modified_base 21: mod_base = OTHER; note = 2'-O-methylguanosine-3'-phosphorothioate
  modified_base 22: mod_base = OTHER; note = 2'-O-methyluridine-3'-phosphorothioate
  modified_base 23: mod_base = OTHER; note = 2'-O-methyluridine
cttacaatttaagaaccactgtt

SEQ ID NO: 2236 - RNA, 21 nt, synthetic construct
  source 1..21: mol_type = other RNA
  modified_base 1: mod_base = OTHER; note = 2'-O-methyladenosine-3'-phosphorothioate
  modified_base 2: mod_base = OTHER; note = 2'-O-methylguanosine-3'-phosphorothioate
  modified_base 3: mod_base = OTHER; note = 2'-O-methyluridine-3'-phosphate
  modified_base 4: mod_base = OTHER; note = 2'-O-methylguanosine-3'-phosphate
  modified_base 5: mod_base = OTHER; note = 2'-O-methylguanosine-3'-phosphate
  modified_base 6: mod_base = OTHER; note = 2'-O-methyluridine-3'-phosphate
  modified_base 7: mod_base = OTHER; note = 2'-deoxy-2'-fluorouridine-3'-phosphate
  modified_base 8: mod_base = OTHER; note = 2'-O-methylcytidine-3'-phosphate
  modified_base 9: mod_base = OTHER; note = 2'-deoxy-2'-fluorouridine-3'-phosphate
  modified_base 10: mod_base = OTHER; note = 2'-deoxy-2'-fluorouridine-3'-phosphate
  modified_base 11: mod_base = OTHER; note = 2'-deoxy-2'-fluoroadenosine-3'-phosphate
  modified_base 12: mod_base = OTHER; note = 2'-O-methyladenosine-3'-phosphate
  modified_base 13: mod_base = OTHER; note = 2'-O-methyladenosine-3'-phosphate
  modified_base 14: mod_base = OTHER; note = 2'-O-methyluridine-3'-phosphate
  modified_base 15: mod_base = OTHER; note = 2'-O-methyluridine-3'-phosphate
  modified_base 16: mod_base = OTHER; note = 2'-O-methylguanosine-3'-phosphate
  modified_base 17: mod_base = OTHER; note = 2'-O-methyluridine-3'-phosphate
  modified_base 18: mod_base = OTHER; note = 2'-O-methyladenosine-3'-phosphate
  modified_base 19: mod_base = OTHER; note = 2'-O-methyladenosine-3'-phosphate
  modified_base 20: mod_base = OTHER; note = 2'-O-methylguanosine-3'-phosphate
  modified_base 21: mod_base = OTHER; note = 2'-O-methylcytidine-3'-phosphate ((2S,4R)-1-[29-[[2-(acetylamino)-2-deoxy-beta-D-galactopyra nosyl]oxy]-14,14-bis[[3-[[3-[[5-[[2-(acetylamino)-2-deoxy-b eta-D-galactopyranosyl]oxy]-1-oxopentyl]amino]propyl]amino] -3-oxopropoxy]methyl]-1,12,19,25-tetraoxo-16-oxa-13,20,24-t riazanonacos-1-yl]-4-hydroxy-2-pyrrolidinyl)methyl ester
agtggttcttaaattgtaagc

SEQ ID NO: 2237 - RNA, 23 nt, synthetic construct
  source 1..23: mol_type = other RNA
  modified_base 1: mod_base = OTHER; note = 2'-O-methylguanosine-3'-phosphorothioate
  modified_base 2: mod_base = OTHER; note = 2'-deoxy-2'-fluorocytidine-3'-phosphorothioate
  modified_base 3: mod_base = OTHER; note = 2'-O-methyluridine-3'-phosphate
  modified_base 4: mod_base = OTHER; note = 2'-O-methyluridine-3'-phosphate
  modified_base 5: mod_base = OTHER; note = 2'-O-methyladenosine-3'-phosphate
  modified_base 6: mod_base = OTHER; note = 2'-deoxy-2'-fluorocytidine-3'-phosphate
  modified_base 7: mod_base = OTHER; note = 2'-O-methyladenosine-3'-phosphate
  modified_base 8: mod_base = OTHER; note = 2'-deoxy-2'-fluoroadenosine-3'-phosphate
  modified_base 9: mod_base = OTHER; note = 2'-deoxy-2'-fluorouridine-3'-phosphate
  modified_base 10: mod_base = OTHER; note = 2'-O-methyluridine-3'-phosphate
  modified_base 11: mod_base = OTHER; note = 2'-O-methyluridine-3'-phosphate
  modified_base 12: mod_base = OTHER; note = 2'-O-methyladenosine-3'-phosphate
  modified_base 13: mod_base = OTHER; note = 2'-O-methyladenosine-3'-phosphate
  modified_base 14: mod_base = OTHER; note = 2'-deoxy-2'-fluoroguanosine-3'-phosphate
  modified_base 15: mod_base = OTHER; note = 2'-O-methyladenosine-3'-phosphate
  modified_base 16: mod_base = OTHER; note = 2'-deoxy-2'-fluoroadenosine-3'-phosphate
  modified_base 17: mod_base = OTHER; note = 2'-O-methylcytidine-3'-phosphate
  modified_base 18: mod_base = OTHER; note = 2'-O-methylcytidine-3'-phosphate
  modified_base 19: mod_base = OTHER; note = 2'-O-methyladenosine-3'-phosphate
  modified_base 20: mod_base = OTHER; note = 2'-O-methylcytidine-3'-phosphate
  modified_base 21: mod_base = OTHER; note = 2'-O-methyluridine-3'-phosphorothioate
  modified_base 22: mod_base = OTHER; note = 2'-O-methylguanosine-3'-phosphorothioate
  modified_base 23: mod_base = OTHER; note = 2'-O-methyluridine
gcttacaatttaagaaccactgt

SEQ ID NO: 2238 - RNA, 21 nt, synthetic construct
  source 1..21: mol_type = other RNA
  modified_base 1: mod_base = OTHER; note = 2'-O-methyladenosine-3'-phosphorothioate
  modified_base 2: mod_base = OTHER; note = 2'-O-methyladenosine-3'-phosphorothioate
  modified_base 3: mod_base = OTHER; note = 2'-O-methyladenosine-3'-phosphate
  modified_base 4: mod_base = OTHER; note = 2'-O-methyladenosine-3'-phosphate
  modified_base 5: mod_base = OTHER; note = 2'-O-methylcytidine-3'-phosphate
  modified_base 6: mod_base = OTHER; note = 2'-O-methyladenosine-3'-phosphate
  modified_base 7: mod_base = OTHER; note = 2'-deoxy-2'-fluoroguanosine-3'-phosphate
  modified_base 8: mod_base = OTHER; note = 2'-O-methyluridine-3'-phosphate
  modified_base 9: mod_base = OTHER; note = 2'-deoxy-2'-fluoroguanosine-3'-phosphate
  modified_base 10: mod_base = OTHER; note = 2'-deoxy-2'-fluoroguanosine-3'-phosphate
  modified_base 11: mod_base = OTHER; note = 2'-deoxy-2'-fluorouridine-3'-phosphate
  modified_base 12: mod_base = OTHER; note = 2'-O-methyluridine-3'-phosphate
  modified_base 13: mod_base = OTHER; note = 2'-O-methylcytidine-3'-phosphate
  modified_base 14: mod_base = OTHER; note = 2'-O-methyluridine-3'-phosphate
  modified_base 15: mod_base = OTHER; note = 2'-O-methyluridine-3'-phosphate
  modified_base 16: mod_base = OTHER; note = 2'-O-methyladenosine-3'-phosphate
  modified_base 17: mod_base = OTHER; note = 2'-O-methyladenosine-3'-phosphate
  modified_base 18: mod_base = OTHER; note = 2'-O-methyladenosine-3'-phosphate
  modified_base 19: mod_base = OTHER; note = 2'-O-methyluridine-3'-phosphate
  modified_base 20: mod_base = OTHER; note = 2'-O-methyluridine-3'-phosphate
  modified_base 21: mod_base = OTHER; note = 2'-O-methylguanosine-3'-phosphate ((2S,4R)-1-[29-[[2-(acetylamino)-2-deoxy-beta-D-galactopyra nosyl]oxy]-14,14-bis[[3-[[3-[[5-[[2-(acetylamino)-2-deoxy-b eta-D-galactopyranosyl]oxy]-1-oxopentyl]amino]propyl]amino] -3-oxopropoxy]methyl]-1,12,19,25-tetraoxo-16-oxa-13,20,24-t riazanonacos-1-yl]-4-hydroxy-2-pyrrolidinyl)methyl ester
aaaacagtggttcttaaattg

SEQ ID NO: 2239 - RNA, 23 nt, synthetic construct
  source 1..23: mol_type = other RNA
  modified_base 1: mod_base = OTHER; note = 2'-O-methylcytidine-3'-phosphorothioate
  modified_base 2: mod_base = OTHER; note = 2'-deoxy-2'-fluoroadenosine-3'-phosphorothioate
  modified_base 3: mod_base = OTHER; note = 2'-O-methyladenosine-3'-phosphate
  modified_base 4: mod_base = OTHER; note = 2'-O-methyluridine-3'-phosphate
  modified_base 5: mod_base = OTHER; note = 2'-O-methyluridine-3'-phosphate
  modified_base 6: mod_base = OTHER; note = 2'-deoxy-2'-fluorouridine-3'-phosphate
  modified_base 7: mod_base = OTHER; note = 2'-O-methyladenosine-3'-phosphate
  modified_base 8: mod_base = OTHER; note = 2'-deoxy-2'-fluoroadenosine-3'-phosphate
  modified_base 9: mod_base = OTHER; note = 2'-deoxy-2'-fluoroguanosine-3'-phosphate
  modified_base 10: mod_base = OTHER; note = 2'-O-methyladenosine-3'-phosphate
  modified_base 11: mod_base = OTHER; note = 2'-O-methyladenosine-3'-phosphate
  modified_base 12: mod_base = OTHER; note = 2'-O-methylcytidine-3'-phosphate
  modified_base 13: mod_base = OTHER; note = 2'-O-methylcytidine-3'-phosphate
  modified_base 14: mod_base = OTHER; note = 2'-deoxy-2'-fluoroadenosine-3'-phosphate
  modified_base 15: mod_base = OTHER; note = 2'-O-methylcytidine-3'-phosphate
  modified_base 16: mod_base = OTHER; note = 2'-deoxy-2'-fluorouridine-3'-phosphate
  modified_base 17: mod_base = OTHER; note = 2'-O-methylguanosine-3'-phosphate
  modified_base 18: mod_base = OTHER; note = 2'-O-methyluridine-3'-phosphate
  modified_base 19: mod_base = OTHER; note = 2'-O-methyluridine-3'-phosphate
  modified_base 20: mod_base = OTHER; note = 2'-O-methyluridine-3'-phosphate
  modified_base 21: mod_base = OTHER; note = 2'-O-methyluridine-3'-phosphorothioate
  modified_base 22: mod_base = OTHER; note = 2'-O-methyladenosine-3'-phosphorothioate
  modified_base 23: mod_base = OTHER; note = 2'-O-methyladenosine
caatttaagaaccactgttttaa

SEQ ID NO: 2240 - RNA, 21 nt, synthetic construct
  source 1..21: mol_type = other RNA
  modified_base 1: mod_base = OTHER; note = 2'-O-methyluridine-3'-phosphorothioate
  modified_base 2: mod_base = OTHER; note = 2'-O-methyladenosine-3'-phosphorothioate
  modified_base 3: mod_base = OTHER; note = 2'-O-methyladenosine-3'-phosphate
  modified_base 4: mod_base = OTHER; note = 2'-O-methyladenosine-3'-phosphate
  modified_base 5: mod_base = OTHER; note = 2'-O-methyladenosine-3'-phosphate
  modified_base 6: mod_base = OTHER; note = 2'-O-methylcytidine-3'-phosphate
  modified_base 7: mod_base = OTHER; note = 2'-deoxy-2'-fluoroadenosine-3'-phosphate
  modified_base 8: mod_base = OTHER; note = 2'-O-methylguanosine-3'-phosphate
  modified_base 9: mod_base = OTHER; note = 2'-deoxy-2'-fluorouridine-3'-phosphate
  modified_base 10: mod_base = OTHER; note = 2'-deoxy-2'-fluoroguanosine-3'-phosphate
  modified_base 11: mod_base = OTHER; note = 2'-deoxy-2'-fluoroguanosine-3'-phosphate
  modified_base 12: mod_base = OTHER; note = 2'-O-methyluridine-3'-phosphate
  modified_base 13: mod_base = OTHER; note = 2'-O-methyluridine-3'-phosphate
  modified_base 14: mod_base = OTHER; note = 2'-O-methylcytidine-3'-phosphate
  modified_base 15: mod_base = OTHER; note = 2'-O-methyluridine-3'-phosphate
  modified_base 16: mod_base = OTHER; note = 2'-O-methyluridine-3'-phosphate
  modified_base 17: mod_base = OTHER; note = 2'-O-methyladenosine-3'-phosphate
  modified_base 18: mod_base = OTHER; note = 2'-O-methyladenosine-3'-phosphate
  modified_base 19: mod_base = OTHER; note = 2'-O-methyladenosine-3'-phosphate
  modified_base 20: mod_base = OTHER; note = 2'-O-methyluridine-3'-phosphate
  modified_base 21: mod_base = OTHER; note = 2'-O-methyluridine-3'-phosphate ((2S,4R)-1-[29-[[2-(acetylamino)-2-deoxy-beta-D-galactopyra nosyl]oxy]-14,14-bis[[3-[[3-[[5-[[2-(acetylamino)-2-deoxy-b eta-D-galactopyranosyl]oxy]-1-oxopentyl]amino]propyl]amino] -3-oxopropoxy]methyl]-1,12,19,25-tetraoxo-16-oxa-13,20,24-t riazanonacos-1-yl]-4-hydroxy-2-pyrrolidinyl)methyl ester
taaaacagtggttcttaaatt

SEQ ID NO: 2241 - RNA, 23 nt, synthetic construct
  source 1..23: mol_type = other RNA
  modified_base 1: mod_base = OTHER; note = 2'-O-methyladenosine-3'-phosphorothioate
  modified_base 2: mod_base = OTHER; note = 2'-deoxy-2'-fluoroadenosine-3'-phosphorothioate
  modified_base 3: mod_base = OTHER; note = 2'-O-methyluridine-3'-phosphate
  modified_base 4: mod_base = OTHER; note = 2'-O-methyluridine-3'-phosphate
  modified_base 5: mod_base = OTHER; note = 2'-O-methyluridine-3'-phosphate
  modified_base 6: mod_base = OTHER; note = 2'-deoxy-2'-fluoroadenosine-3'-phosphate
  modified_base 7: mod_base = OTHER; note = 2'-O-methyladenosine-3'-phosphate
  modified_base 8: mod_base = OTHER; note = 2'-deoxy-2'-fluoroguanosine-3'-phosphate
  modified_base 9: mod_base = OTHER; note = 2'-deoxy-2'-fluoroadenosine-3'-phosphate
  modified_base 10: mod_base = OTHER; note = 2'-O-methyladenosine-3'-phosphate
  modified_base 11: mod_base = OTHER; note = 2'-O-methylcytidine-3'-phosphate
  modified_base 12: mod_base = OTHER; note = 2'-O-methylcytidine-3'-phosphate
  modified_base 13: mod_base = OTHER; note = 2'-O-methyladenosine-3'-phosphate
  modified_base 14: mod_base = OTHER; note = 2'-deoxy-2'-fluorocytidine-3'-phosphate
  modified_base 15: mod_base = OTHER; note = 2'-O-methyluridine-3'-phosphate
  modified_base 16: mod_base = OTHER; note = 2'-deoxy-2'-fluoroguanosine-3'-phosphate
  modified_base 17: mod_base = OTHER; note = 2'-O-methyluridine-3'-phosphate
  modified_base 18: mod_base = OTHER; note = 2'-O-methyluridine-3'-phosphate
  modified_base 19: mod_base = OTHER; note = 2'-O-methyluridine-3'-phosphate
  modified_base 20: mod_base = OTHER; note = 2'-O-methyluridine-3'-phosphate
  modified_base 21: mod_base = OTHER; note = 2'-O-methyladenosine-3'-phosphorothioate
  modified_base 22: mod_base = OTHER; note = 2'-O-methyladenosine-3'-phosphorothioate
  modified_base 23: mod_base = OTHER; note = 2'-O-methyladenosine
aatttaagaaccactgttttaaa

SEQ ID NO: 2242 - RNA, 21 nt, synthetic construct
  source 1..21: mol_type = other RNA
  modified_base 1: mod_base = OTHER; note = 2'-O-methyladenosine-3'-phosphorothioate
  modified_base 2: mod_base = OTHER; note = 2'-O-methylcytidine-3'-phosphorothioate
  modified_base 3: mod_base = OTHER; note = 2'-O-methylcytidine-3'-phosphate
  modified_base 4: mod_base = OTHER; note = 2'-O-methyluridine-3'-phosphate
  modified_base 5: mod_base = OTHER; note = 2'-O-methylguanosine-3'-phosphate
  modified_base 6: mod_base = OTHER; note = 2'-O-methyluridine-3'-phosphate
  modified_base 7: mod_base = OTHER; note = 2'-deoxy-2'-fluoroadenosine-3'-phosphate
  modified_base 8: mod_base = OTHER; note = 2'-O-methyluridine-3'-phosphate
  modified_base 9: mod_base = OTHER; note = 2'-deoxy-2'-fluorouridine-3'-phosphate
  modified_base 10: mod_base = OTHER; note = 2'-deoxy-2'-fluorocytidine-3'-phosphate
  modified_base 11: mod_base = OTHER; note = 2'-deoxy-2'-fluorouridine-3'-phosphate
  modified_base 12: mod_base = OTHER; note = 2'-O-methylguanosine-3'-phosphate
  modified_base 13: mod_base = OTHER; note = 2'-O-methyluridine-3'-phosphate
  modified_base 14: mod_base = OTHER; note = 2'-O-methyluridine-3'-phosphate
  modified_base 15: mod_base = OTHER; note = 2'-O-methyluridine-3'-phosphate
  modified_base 16: mod_base = OTHER; note = 2'-O-methyladenosine-3'-phosphate
  modified_base 17: mod_base = OTHER; note = 2'-O-methylcytidine-3'-phosphate
  modified_base 18: mod_base = OTHER; note = 2'-O-methyladenosine-3'-phosphate
  modified_base 19: mod_base = OTHER; note = 2'-O-methyluridine-3'-phosphate
  modified_base 20: mod_base = OTHER; note = 2'-O-methylguanosine-3'-phosphate
  modified_base 21: mod_base = OTHER; note = 2'-O-methyluridine-3'-phosphate ((2S,4R)-1-[29-[[2-(acetylamino)-2-deoxy-beta-D-galactopyra nosyl]oxy]-14,14-bis[[3-[[3-[[5-[[2-(acetylamino)-2-deoxy-b eta-D-galactopyranosyl]oxy]-1-oxopentyl]amino]propyl]amino] -3-oxopropoxy]methyl]-1,12,19,25-tetraoxo-16-oxa-13,20,24-t riazanonacos-1-yl]-4-hydroxy-2-pyrrolidinyl)methyl ester
acctgtattctgtttacatgt

SEQ ID NO: 2243 - RNA, 23 nt, synthetic construct
  source 1..23: mol_type = other RNA
  modified_base 1: mod_base = OTHER; note = 2'-O-methyladenosine-3'-phosphorothioate
  modified_base 2: mod_base = OTHER; note = 2'-deoxy-2'-fluorocytidine-3'-phosphorothioate
  modified_base 3: mod_base = OTHER; note = 2'-O-methyladenosine-3'-phosphate
  modified_base 4: mod_base = OTHER; note = 2'-O-methyluridine-3'-phosphate
  modified_base 5: mod_base = OTHER; note = 2'-O-methylguanosine-3'-phosphate
  modified_base 6: mod_base = OTHER; note = 2'-deoxy-2'-fluorouridine-3'-phosphate
  modified_base 7: mod_base = OTHER; note = 2'-O-methyladenosine-3'-phosphate
  modified_base 8: mod_base = OTHER; note = 2'-deoxy-2'-fluoroadenosine-3'-phosphate
  modified_base 9: mod_base = OTHER; note = 2'-deoxy-2'-fluoroadenosine-3'-phosphate
  modified_base 10: mod_base = OTHER; note = 2'-O-methylcytidine-3'-phosphate
  modified_base 11: mod_base = OTHER; note = 2'-O-methyladenosine-3'-phosphate
  modified_base 12: mod_base = OTHER; note = 2'-O-methylguanosine-3'-phosphate
  modified_base 13: mod_base = OTHER; note = 2'-O-methyladenosine-3'-phosphate
  modified_base 14: mod_base = OTHER; note = 2'-deoxy-2'-fluoroadenosine-3'-phosphate
  modified_base 15: mod_base = OTHER; note = 2'-O-methyluridine-3'-phosphate
  modified_base 16: mod_base = OTHER; note = 2'-deoxy-2'-fluoroadenosine-3'-phosphate
  modified_base 17: mod_base = OTHER; note = 2'-O-methylcytidine-3'-phosphate
  modified_base 18: mod_base = OTHER; note = 2'-O-methyladenosine-3'-phosphate
  modified_base 19: mod_base = OTHER; note = 2'-O-methylguanosine-3'-phosphate
  modified_base 20: mod_base = OTHER; note = 2'-O-methylguanosine-3'-phosphate
  modified_base 21: mod_base = OTHER; note = 2'-O-methyluridine-3'-phosphorothioate
  modified_base 22: mod_base = OTHER; note = 2'-O-methyluridine-3'-phosphorothioate
  modified_base 23: mod_base = OTHER; note = 2'-O-methyladenosine
acatgtaaacagaatacaggtta

SEQ ID NO: 2244 - RNA, 21 nt, synthetic construct
  source 1..21: mol_type = other RNA
  modified_base 1: mod_base = OTHER; note = 2'-O-methylcytidine-3'-phosphorothioate
  modified_base 2: mod_base = OTHER; note = 2'-O-methylcytidine-3'-phosphorothioate
  modified_base 3: mod_base = OTHER; note = 2'-O-methyluridine-3'-phosphate
  modified_base 4: mod_base = OTHER; note = 2'-O-methylguanosine-3'-phosphate
  modified_base 5: mod_base = OTHER; note = 2'-O-methyluridine-3'-phosphate
  modified_base 6: mod_base = OTHER; note = 2'-O-methyladenosine-3'-phosphate
  modified_base 7: mod_base = OTHER; note = 2'-deoxy-2'-fluorouridine-3'-phosphate
  modified_base 8: mod_base = OTHER; note = 2'-O-methyluridine-3'-phosphate
  modified_base 9: mod_base = OTHER; note = 2'-deoxy-2'-fluorocytidine-3'-phosphate
  modified_base 10: mod_base = OTHER; note = 2'-deoxy-2'-fluorouridine-3'-phosphate
  modified_base 11: mod_base = OTHER; note = 2'-deoxy-2'-fluoroguanosine-3'-phosphate
  modified_base 12: mod_base = OTHER; note = 2'-O-methyluridine-3'-phosphate
  modified_base 13: mod_base = OTHER; note = 2'-O-methyluridine-3'-phosphate
  modified_base 14: mod_base = OTHER; note = 2'-O-methyluridine-3'-phosphate
  modified_base 15: mod_base = OTHER; note = 2'-O-methyladenosine-3'-phosphate
  modified_base 16: mod_base = OTHER; note = 2'-O-methylcytidine-3'-phosphate
  modified_base 17: mod_base = OTHER; note = 2'-O-methyladenosine-3'-phosphate
  modified_base 18: mod_base = OTHER; note = 2'-O-methyluridine-3'-phosphate
  modified_base 19: mod_base = OTHER; note = 2'-O-methylguanosine-3'-phosphate
  modified_base 20: mod_base = OTHER; note = 2'-O-methyluridine-3'-phosphate
  modified_base 21: mod_base = OTHER; note = 2'-O-methylcytidine-3'-phosphate ((2S,4R)-1-[29-[[2-(acetylamino)-2-deoxy-beta-D-galactopyra nosyl]oxy]-14,14-bis[[3-[[3-[[5-[[2-(acetylamino)-2-deoxy-b eta-D-galactopyranosyl]oxy]-1-oxopentyl]amino]propyl]amino] -3-oxopropoxy]methyl]-1,12,19,25-tetraoxo-16-oxa-13,20,24-t riazanonacos-1-yl]-4-hydroxy-2-pyrrolidinyl)methyl ester
cctgtattctgtttacatgtc

SEQ ID NO: 2245 - RNA, 23 nt, synthetic construct
  source 1..23: mol_type = other RNA
  modified_base 1: mod_base = OTHER; note = 2'-O-methylguanosine-3'-phosphorothioate
  modified_base 2: mod_base = OTHER; note = 2'-deoxy-2'-fluoroadenosine-3'-phosphorothioate
  modified_base 3: mod_base = OTHER; note = 2'-O-methylcytidine-3'-phosphate
  modified_base 4: mod_base = OTHER; note = 2'-O-methyladenosine-3'-phosphate
  modified_base 5: mod_base = OTHER; note = 2'-O-methyluridine-3'-phosphate
  modified_base 6: mod_base = OTHER; note = 2'-deoxy-2'-fluoroguanosine-3'-phosphate
  modified_base 7: mod_base = OTHER; note = 2'-O-methyluridine-3'-phosphate
  modified_base 8: mod_base = OTHER; note = 2'-deoxy-2'-fluoroadenosine-3'-phosphate
  modified_base 9: mod_base = OTHER; note = 2'-deoxy-2'-fluoroadenosine-3'-phosphate
  modified_base 10: mod_base = OTHER; note = 2'-O-methyladenosine-3'-phosphate
  modified_base 11: mod_base = OTHER; note = 2'-O-methylcytidine-3'-phosphate
  modified_base 12: mod_base = OTHER; note = 2'-O-methyladenosine-3'-phosphate
  modified_base 13: mod_base = OTHER; note = 2'-O-methylguanosine-3'-phosphate
  modified_base 14: mod_base = OTHER; note = 2'-deoxy-2'-fluoroadenosine-3'-phosphate
  modified_base 15: mod_base = OTHER; note = 2'-O-methyladenosine-3'-phosphate
  modified_base 16: mod_base = OTHER; note = 2'-deoxy-2'-fluorouridine-3'-phosphate
  modified_base 17: mod_base = OTHER; note = 2'-O-methyladenosine-3'-phosphate
  modified_base 18: mod_base = OTHER; note = 2'-O-methylcytidine-3'-phosphate
  modified_base 19: mod_base = OTHER; note = 2'-O-methyladenosine-3'-phosphate
  modified_base 20: mod_base = OTHER; note = 2'-O-methylguanosine-3'-phosphate
  modified_base 21: mod_base = OTHER; note = 2'-O-methylguanosine-3'-phosphorothioate
  modified_base 22: mod_base = OTHER; note = 2'-O-methyluridine-3'-phosphorothioate
  modified_base 23: mod_base = OTHER; note = 2'-O-methyluridine
gacatgtaaacagaatacaggtt

SEQ ID NO: 2246 - RNA, 21 nt, synthetic construct
  source 1..21: mol_type = other RNA
  modified_base 1: mod_base = OTHER; note = 2'-O-methyladenosine-3'-phosphorothioate
  modified_base 2: mod_base = OTHER; note = 2'-O-methyluridine-3'-phosphorothioate
  modified_base 3: mod_base = OTHER; note = 2'-O-methyluridine-3'-phosphate
  modified_base 4: mod_base = OTHER; note = 2'-O-methyladenosine-3'-phosphate
  modified_base 5: mod_base = OTHER; note = 2'-O-methyladenosine-3'-phosphate
  modified_base 6: mod_base = OTHER; note = 2'-O-methylcytidine-3'-phosphate
  modified_base 7: mod_base = OTHER; note = 2'-deoxy-2'-fluorocytidine-3'-phosphate
  modified_base 8: mod_base = OTHER; note = 2'-O-methyluridine-3'-phosphate
  modified_base 9: mod_base = OTHER; note = 2'-deoxy-2'-fluoroguanosine-3'-phosphate
  modified_base 10: mod_base = OTHER; note = 2'-deoxy-2'-fluorouridine-3'-phosphate
  modified_base 11: mod_base = OTHER; note = 2'-deoxy-2'-fluoroadenosine-3'-phosphate
  modified_base 12: mod_base = OTHER; note = 2'-O-methyluridine-3'-phosphate
  modified_base 13: mod_base = OTHER; note = 2'-O-methyluridine-3'-phosphate
  modified_base 14: mod_base = OTHER; note = 2'-O-methylcytidine-3'-phosphate
  modified_base 15: mod_base = OTHER; note = 2'-O-methyluridine-3'-phosphate
  modified_base 16: mod_base = OTHER; note = 2'-O-methylguanosine-3'-phosphate
  modified_base 17: mod_base = OTHER; note = 2'-O-methyluridine-3'-phosphate
  modified_base 18: mod_base = OTHER; note = 2'-O-methyluridine-3'-phosphate
  modified_base 19: mod_base = OTHER; note = 2'-O-methyluridine-3'-phosphate
  modified_base 20: mod_base = OTHER; note = 2'-O-methyladenosine-3'-phosphate
  modified_base 21: mod_base = OTHER; note = 2'-O-methylcytidine-3'-phosphate ((2S,4R)-1-[29-[[2-(acetylamino)-2-deoxy-beta-D-galactopyra nosyl]oxy]-14,14-bis[[3-[[3-[[5-[[2-(acetylamino)-2-deoxy-b eta-D-galactopyranosyl]oxy]-1-oxopentyl]amino]propyl]amino] -3-oxopropoxy]methyl]-1,12,19,25-tetraoxo-16-oxa-13,20,24-t riazanonacos-1-yl]-4-hydroxy-2-pyrrolidinyl)methyl ester
attaacctgtattctgtttac

SEQ ID NO: 2247 - RNA, 23 nt, synthetic construct
  source 1..23: mol_type = other RNA
  modified_base 1: mod_base = OTHER; note = 2'-O-methylguanosine-3'-phosphorothioate
  modified_base 2: mod_base = OTHER; note = 2'-deoxy-2'-fluorouridine-3'-phosphorothioate
  modified_base 3: mod_base = OTHER; note = 2'-O-methyladenosine-3'-phosphate
  modified_base 4: mod_base = OTHER; note = 2'-O-methyladenosine-3'-phosphate
  modified_base 5: mod_base = OTHER; note = 2'-O-methyladenosine-3'-phosphate
  modified_base 6: mod_base = OTHER; note = 2'-deoxy-2'-fluorocytidine-3'-phosphate
  modified_base 7: mod_base = OTHER; note = 2'-O-methyladenosine-3'-phosphate
  modified_base 8: mod_base = OTHER; note = 2'-deoxy-2'-fluoroguanosine-3'-phosphate
  modified_base 9: mod_base = OTHER; note = 2'-deoxy-2'-fluoroadenosine-3'-phosphate
  modified_base 10: mod_base = OTHER; note = 2'-O-methyladenosine-3'-phosphate
  modified_base 11: mod_base = OTHER; note = 2'-O-methyluridine-3'-phosphate
  modified_base 12: mod_base = OTHER; note = 2'-O-methyladenosine-3'-phosphate
  modified_base 13: mod_base = OTHER; note = 2'-O-methylcytidine-3'-phosphate
  modified_base 14: mod_base = OTHER; note = 2'-deoxy-2'-fluoroadenosine-3'-phosphate
  modified_base 15: mod_base = OTHER; note = 2'-O-methylguanosine-3'-phosphate
  modified_base 16: mod_base = OTHER; note = 2'-deoxy-2'-fluoroguanosine-3'-phosphate
  modified_base 17: mod_base = OTHER; note = 2'-O-methyluridine-3'-phosphate
  modified_base 18: mod_base = OTHER; note = 2'-O-methyluridine-3'-phosphate
  modified_base 19: mod_base = OTHER; note = 2'-O-methyladenosine-3'-phosphate
  modified_base 20: mod_base = OTHER; note = 2'-O-methyladenosine-3'-phosphate
  modified_base 21: mod_base = OTHER; note = 2'-O-methyluridine-3'-phosphorothioate
  modified_base 22: mod_base = OTHER; note = 2'-O-methyladenosine-3'-phosphorothioate
  modified_base 23: mod_base = OTHER; note = 2'-O-methyladenosine
gtaaacagaatacaggttaataa

SEQ ID NO: 2248 - RNA, 21 nt, synthetic construct
  source 1..21: mol_type = other RNA
  modified_base 1: mod_base = OTHER; note = 2'-O-methyluridine-3'-phosphorothioate
  modified_base 2: mod_base = OTHER; note = 2'-O-methyladenosine-3'-phosphorothioate
  modified_base 3: mod_base = OTHER; note = 2'-O-methyluridine-3'-phosphate
  modified_base 4: mod_base = OTHER; note = 2'-O-methyluridine-3'-phosphate
  modified_base 5: mod_base = OTHER; note = 2'-O-methyladenosine-3'-phosphate
  modified_base 6: mod_base = OTHER; note = 2'-O-methyladenosine-3'-phosphate
  modified_base 7: mod_base = OTHER; note = 2'-deoxy-2'-fluorocytidine-3'-phosphate
  modified_base 8: mod_base = OTHER; note = 2'-O-methylcytidine-3'-phosphate
  modified_base 9: mod_base = OTHER; note = 2'-deoxy-2'-fluorouridine-3'-phosphate
  modified_base 10: mod_base = OTHER; note = 2'-deoxy-2'-fluoroguanosine-3'-phosphate
  modified_base 11: mod_base = OTHER; note = 2'-deoxy-2'-fluorouridine-3'-phosphate
  modified_base 12: mod_base = OTHER; note = 2'-O-methyladenosine-3'-phosphate
  modified_base 13: mod_base = OTHER; note = 2'-O-methyluridine-3'-phosphate
  modified_base 14: mod_base = OTHER; note = 2'-O-methyluridine-3'-phosphate
  modified_base 15: mod_base = OTHER; note = 2'-O-methylcytidine-3'-phosphate
  modified_base 16: mod_base = OTHER; note = 2'-O-methyluridine-3'-phosphate
  modified_base 17: mod_base = OTHER; note = 2'-O-methylguanosine-3'-phosphate
  modified_base 18: mod_base = OTHER; note = 2'-O-methyluridine-3'-phosphate
  modified_base 19: mod_base = OTHER; note = 2'-O-methyluridine-3'-phosphate
  modified_base 20: mod_base = OTHER; note = 2'-O-methyluridine-3'-phosphate
  modified_base 21: mod_base = OTHER; note = 2'-O-methyladenosine-3'-phosphate ((2S,4R)-1-[29-[[2-(acetylamino)-2-deoxy-beta-D-galactopyra nosyl]oxy]-14,14-bis[[3-[[3-[[5-[[2-(acetylamino)-2-deoxy-b eta-D-galactopyranosyl]oxy]-1-oxopentyl]amino]propyl]amino] -3-oxopropoxy]methyl]-1,12,19,25-tetraoxo-16-oxa-13,20,24-t riazanonacos-1-yl]-4-hydroxy-2-pyrrolidinyl)methyl ester
tattaacctgtattctgttta

SEQ ID NO: 2249 - RNA, 23 nt, synthetic construct
  source 1..23: mol_type = other RNA
  modified_base 1: mod_base = OTHER; note = 2'-O-methyluridine-3'-phosphorothioate
  modified_base 2: mod_base = OTHER; note = 2'-deoxy-2'-fluoroadenosine-3'-phosphorothioate
  modified_base 3: mod_base = OTHER; note = 2'-O-methyladenosine-3'-phosphate
  modified_base 4: mod_base = OTHER; note = 2'-O-methyladenosine-3'-phosphate
  modified_base 5: mod_base = OTHER; note = 2'-O-methylcytidine-3'-phosphate
  modified_base 6: mod_base = OTHER; note = 2'-deoxy-2'-fluoroadenosine-3'-phosphate
  modified_base 7: mod_base = OTHER; note = 2'-O-methylguanosine-3'-phosphate
  modified_base 8: mod_base = OTHER; note = 2'-deoxy-2'-fluoroadenosine-3'-phosphate
  modified_base 9: mod_base = OTHER; note = 2'-deoxy-2'-fluoroadenosine-3'-phosphate
  modified_base 10: mod_base = OTHER; note = 2'-O-methyluridine-3'-phosphate
  modified_base 11: mod_base = OTHER; note = 2'-O-methyladenosine-3'-phosphate
  modified_base 12: mod_base = OTHER; note = 2'-O-methylcytidine-3'-phosphate
  modified_base 13: mod_base = OTHER; note = 2'-O-methyladenosine-3'-phosphate
  modified_base 14: mod_base = OTHER; note = 2'-deoxy-2'-fluoroguanosine-3'-phosphate
  modified_base 15: mod_base = OTHER; note = 2'-O-methylguanosine-3'-phosphate
  modified_base 16: mod_base = OTHER; note = 2'-deoxy-2'-fluorouridine-3'-phosphate
  modified_base 17: mod_base = OTHER; note = 2'-O-methyluridine-3'-phosphate
  modified_base 18: mod_base = OTHER; note = 2'-O-methyladenosine-3'-phosphate
  modified_base 19: mod_base = OTHER; note = 2'-O-methyladenosine-3'-phosphate
  modified_base 20: mod_base = OTHER; note = 2'-O-methyluridine-3'-phosphate
  modified_base 21: mod_base = OTHER; note = 2'-O-methyladenosine-3'-phosphorothioate
  modified_base 22: mod_base = OTHER; note = 2'-O-methyladenosine-3'-phosphorothioate
  modified_base 23: mod_base = OTHER; note = 2'-O-methyladenosine
taaacagaatacaggttaataaa

SEQ ID NO: 2250 - RNA, 21 nt, synthetic construct
  source 1..21: mol_type = other RNA
  modified_base 1: mod_base = OTHER; note = 2'-O-methyladenosine-3'-phosphorothioate
  modified_base 2: mod_base = OTHER; note = 2'-O-methyladenosine-3'-phosphorothioate
  modified_base 3: mod_base = OTHER; note = 2'-O-methylguanosine-3'-phosphate
  modified_base 4: mod_base = OTHER; note = 2'-O-methyladenosine-3'-phosphate
  modified_base 5: mod_base = OTHER; note = 2'-O-methyladenosine-3'-phosphate
  modified_base 6: mod_base = OTHER; note = 2'-O-methyladenosine-3'-phosphate
  modified_base 7: mod_base = OTHER; note = 2'-deoxy-2'-fluorocytidine-3'-phosphate
  modified_base 8: mod_base = OTHER; note = 2'-O-methyluridine-3'-phosphate
  modified_base 9: mod_base = OTHER; note = 2'-deoxy-2'-fluorouridine-3'-phosphate
  modified_base 10: mod_base = OTHER; note = 2'-deoxy-2'-fluorouridine-3'-phosphate
  modified_base 11: mod_base = OTHER; note = 2'-deoxy-2'-fluoroguanosine-3'-phosphate
  modified_base 12: mod_base = OTHER; note = 2'-O-methylguanosine-3'-phosphate
  modified_base 13: mod_base = OTHER; note = 2'-O-methylcytidine-3'-phosphate
  modified_base 14: mod_base = OTHER; note = 2'-O-methyluridine-3'-phosphate
  modified_base 15: mod_base = OTHER; note = 2'-O-methylguanosine-3'-phosphate
  modified_base 16: mod_base = OTHER; note = 2'-O-methyladenosine-3'-phosphate
  modified_base 17: mod_base = OTHER; note = 2'-O-methyluridine-3'-phosphate
  modified_base 18: mod_base = OTHER; note = 2'-O-methyladenosine-3'-phosphate
  modified_base 19: mod_base = OTHER; note = 2'-O-methyladenosine-3'-phosphate
  modified_base 20: mod_base = OTHER; note = 2'-O-methyluridine-3'-phosphate
  modified_base 21: mod_base = OTHER; note = 2'-O-methyladenosine-3'-phosphate ((2S,4R)-1-[29-[[2-(acetylamino)-2-deoxy-beta-D-galactopyra nosyl]oxy]-14,14-bis[[3-[[3-[[5-[[2-(acetylamino)-2-deoxy-b eta-D-galactopyranosyl]oxy]-1-oxopentyl]amino]propyl]amino] -3-oxopropoxy]methyl]-1,12,19,25-tetraoxo-16-oxa-13,20,24-t riazanonacos-1-yl]-4-hydroxy-2-pyrrolidinyl)methyl ester
aagaaactttggctgataata

SEQ ID NO: 2251 - RNA, 23 nt, synthetic construct
  source 1..23: mol_type = other RNA
  modified_base 1: mod_base = OTHER; note = 2'-O-methyluridine-3'-phosphorothioate
  modified_base 2: mod_base = OTHER; note = 2'-deoxy-2'-fluoroadenosine-3'-phosphorothioate
  modified_base 3: mod_base = OTHER; note = 2'-O-methyluridine-3'-phosphate
  modified_base 4: mod_base = OTHER; note = 2'-O-methyluridine-3'-phosphate
  modified_base 5: mod_base = OTHER; note = 2'-O-methyladenosine-3'-phosphate
  modified_base 6: mod_base = OTHER; note = 2'-deoxy-2'-fluorouridine-3'-phosphate
  modified_base 7: mod_base = OTHER; note = 2'-O-methylcytidine-3'-phosphate
  modified_base 8: mod_base = OTHER; note = 2'-deoxy-2'-fluoroadenosine-3'-phosphate
  modified_base 9: mod_base = OTHER; note = 2'-deoxy-2'-fluoroguanosine-3'-phosphate
  modified_base 10: mod_base = OTHER; note = 2'-O-methylcytidine-3'-phosphate
  modified_base 11: mod_base = OTHER; note = 2'-O-methylcytidine-3'-phosphate
  modified_base 12: mod_base = OTHER; note = 2'-O-methyladenosine-3'-phosphate
  modified_base 13: mod_base = OTHER; note = 2'-O-methyladenosine-3'-phosphate
  modified_base 14: mod_base = OTHER; note = 2'-deoxy-2'-fluoroadenosine-3'-phosphate
  modified_base 15: mod_base = OTHER; note = 2'-O-methylguanosine-3'-phosphate
  modified_base 16: mod_base = OTHER; note = 2'-deoxy-2'-fluorouridine-3'-phosphate
  modified_base 17: mod_base = OTHER; note = 2'-O-methyluridine-3'-phosphate
  modified_base 18: mod_base = OTHER; note = 2'-O-methyluridine-3'-phosphate
  modified_base 19: mod_base = OTHER; note = 2'-O-methylcytidine-3'-phosphate
  modified_base 20: mod_base = OTHER; note = 2'-O-methyluridine-3'-phosphate
  modified_base 21: mod_base = OTHER; note = 2'-O-methyluridine-3'-phosphorothioate
  modified_base 22: mod_base = OTHER; note = 2'-O-methylcytidine-3'-phosphorothioate
  modified_base 23: mod_base = OTHER; note = 2'-O-methyladenosine
tattatcagccaaagtttcttca

SEQ ID NO: 2252 - RNA, 21 nt, synthetic construct
  source 1..21: mol_type = other RNA
  modified_base 1: mod_base = OTHER; note = 2'-O-methyladenosine-3'-phosphorothioate
  modified_base 2: mod_base = OTHER; note = 2'-O-methylguanosine-3'-phosphorothioate
  modified_base 3: mod_base = OTHER; note = 2'-O-methyladenosine-3'-phosphate
  modified_base 4: mod_base = OTHER; note = 2'-O-methyladenosine-3'-phosphate
  modified_base 5: mod_base = OTHER; note = 2'-O-methyladenosine-3'-phosphate
  modified_base 6: mod_base = OTHER; note = 2'-O-methylcytidine-3'-phosphate
  modified_base 7: mod_base = OTHER; note = 2'-deoxy-2'-fluorouridine-3'-phosphate
  modified_base 8: mod_base = OTHER; note = 2'-O-methyluridine-3'-phosphate
  modified_base 9: mod_base = OTHER; note = 2'-deoxy-2'-fluorouridine-3'-phosphate
  modified_base 10: mod_base = OTHER; note = 2'-deoxy-2'-fluoroguanosine-3'-phosphate
  modified_base 11: mod_base = OTHER; note = 2'-deoxy-2'-fluoroguanosine-3'-phosphate
  modified_base 12: mod_base = OTHER; note = 2'-O-methylcytidine-3'-phosphate
  modified_base 13: mod_base = OTHER; note = 2'-O-methyluridine-3'-phosphate
  modified_base 14: mod_base = OTHER; note = 2'-O-methylguanosine-3'-phosphate
  modified_base 15: mod_base = OTHER; note = 2'-O-methyladenosine-3'-phosphate
  modified_base 16: mod_base = OTHER; note = 2'-O-methyluridine-3'-phosphate
  modified_base 17: mod_base = OTHER; note = 2'-O-methyladenosine-3'-phosphate
  modified_base 18: mod_base = OTHER; note = 2'-O-methyladenosine-3'-phosphate
  modified_base 19: mod_base = OTHER; note = 2'-O-methyluridine-3'-phosphate
  modified_base 20: mod_base = OTHER; note = 2'-O-methyladenosine-3'-phosphate
  modified_base 21: mod_base = OTHER; note = 2'-O-methyluridine-3'-phosphate ((2S,4R)-1-[29-[[2-(acetylamino)-2-deoxy-beta-D-galactopyra nosyl]oxy]-14,14-bis[[3-[[3-[[5-[[2-(acetylamino)-2-deoxy-b eta-D-galactopyranosyl]oxy]-1-oxopentyl]amino]propyl]amino] -3-oxopropoxy]methyl]-1,12,19,25-tetraoxo-16-oxa-13,20,24-t riazanonacos-1-yl]-4-hydroxy-2-pyrrolidinyl)methyl ester
agaaactttggctgataatat

SEQ ID NO: 2253 - RNA, 23 nt, synthetic construct
  source 1..23: mol_type = other RNA
  modified_base 1: mod_base = OTHER; note = 2'-O-methyladenosine-3'-phosphorothioate
  modified_base 2: mod_base = OTHER; note = 2'-deoxy-2'-fluorouridine-3'-phosphorothioate
  modified_base 3: mod_base = OTHER; note = 2'-O-methyladenosine-3'-phosphate
  modified_base 4: mod_base = OTHER; note = 2'-O-methyluridine-3'-phosphate
  modified_base 5: mod_base = OTHER; note = 2'-O-methyluridine-3'-phosphate
  modified_base 6: mod_base = OTHER; note = 2'-deoxy-2'-fluoroadenosine-3'-phosphate
  modified_base 7: mod_base = OTHER; note = 2'-O-methyluridine-3'-phosphate
  modified_base 8: mod_base = OTHER; note = 2'-deoxy-2'-fluorocytidine-3'-phosphate
  modified_base 9: mod_base = OTHER; note = 2'-deoxy-2'-fluoroadenosine-3'-phosphate
  modified_base 10: mod_base = OTHER; note = 2'-O-methylguanosine-3'-phosphate
  modified_base 11: mod_base = OTHER; note = 2'-O-methylcytidine-3'-phosphate
  modified_base 12: mod_base = OTHER; note = 2'-O-methylcytidine-3'-phosphate
  modified_base 13: mod_base = OTHER; note = 2'-O-methyladenosine-3'-phosphate
  modified_base 14: mod_base = OTHER; note = 2'-deoxy-2'-fluoroadenosine-3'-phosphate
  modified_base 15: mod_base = OTHER; note = 2'-O-methyladenosine-3'-phosphate
  modified_base 16: mod_base = OTHER; note = 2'-deoxy-2'-fluoroguanosine-3'-phosphate
  modified_base 17: mod_base = OTHER; note = 2'-O-methyluridine-3'-phosphate
  modified_base 18: mod_base = OTHER; note = 2'-O-methyluridine-3'-phosphate
  modified_base 19: mod_base = OTHER; note = 2'-O-methyluridine-3'-phosphate
  modified_base 20: mod_base = OTHER; note = 2'-O-methylcytidine-3'-phosphate
  modified_base 21: mod_base = OTHER; note = 2'-O-methyluridine-3'-phosphorothioate
  modified_base 22: mod_base = OTHER; note = 2'-O-methyluridine-3'-phosphorothioate
  modified_base 23: mod_base = OTHER; note = 2'-O-methylcytidine
atattatcagccaaagtttcttc

SEQ ID NO: 2254 - RNA, 21 nt, synthetic construct
  source 1..21: mol_type = other RNA
  modified_base 1: mod_base = OTHER; note = 2'-O-methylguanosine-3'-phosphorothioate
  modified_base 2: mod_base = OTHER; note = 2'-O-methyladenosine-3'-phosphorothioate
  modified_base 3: mod_base = OTHER; note = 2'-O-methyluridine-3'-phosphate
  modified_base 4: mod_base = OTHER; note = 2'-O-methylguanosine-3'-phosphate
  modified_base 5: mod_base = OTHER; note = 2'-O-methyladenosine-3'-phosphate
  modified_base 6: mod_base = OTHER; note = 2'-O-methyladenosine-3'-phosphate
  modified_base 7: mod_base = OTHER; note = 2'-deoxy-2'-fluoroguanosine-3'-phosphate
  modified_base 8: mod_base = OTHER; note = 2'-O-methyladenosine-3'-phosphate
  modified_base 9: mod_base = OTHER; note = 2'-deoxy-2'-fluoroadenosine-3'-phosphate
  modified_base 10: mod_base = OTHER; note = 2'-deoxy-2'-fluoroadenosine-3'-phosphate
  modified_base 11: mod_base = OTHER; note = 2'-deoxy-2'-fluorocytidine-3'-phosphate
  modified_base 12: mod_base = OTHER; note = 2'-O-methyluridine-3'-phosphate
  modified_base 13: mod_base = OTHER; note = 2'-O-methyluridine-3'-phosphate
  modified_base 14: mod_base = OTHER; note = 2'-O-methyluridine-3'-phosphate
  modified_base 15: mod_base = OTHER; note = 2'-O-methylguanosine-3'-phosphate
  modified_base 16: mod_base = OTHER; note = 2'-O-methylguanosine-3'-phosphate
  modified_base 17: mod_base = OTHER; note = 2'-O-methylcytidine-3'-phosphate
  modified_base 18: mod_base = OTHER; note = 2'-O-methyluridine-3'-phosphate
  modified_base 19: mod_base = OTHER; note = 2'-O-methylguanosine-3'-phosphate
  modified_base 20: mod_base = OTHER; note = 2'-O-methyladenosine-3'-phosphate
  modified_base 21: mod_base = OTHER; note = 2'-O-methyluridine-3'-phosphate ((2S,4R)-1-[29-[[2-(acetylamino)-2-deoxy-beta-D-galactopyra nosyl]oxy]-14,14-bis[[3-[[3-[[5-[[2-(acetylamino)-2-deoxy-b eta-D-galactopyranosyl]oxy]-1-oxopentyl]amino]propyl]amino] -3-oxopropoxy]methyl]-1,12,19,25-tetraoxo-16-oxa-13,20,24-t riazanonacos-1-yl]-4-hydroxy-2-pyrrolidinyl)methyl ester
gatgaagaaactttggctgat

SEQ ID NO: 2255 - RNA, 23 nt, synthetic construct
  source 1..23: mol_type = other RNA
  modified_base 1: mod_base = OTHER; note = 2'-O-methyladenosine-3'-phosphorothioate
  modified_base 2: mod_base = OTHER; note = 2'-deoxy-2'-fluorouridine-3'-phosphorothioate
  modified_base 3: mod_base = OTHER; note = 2'-O-methylcytidine-3'-phosphate
  modified_base 4: mod_base = OTHER; note = 2'-O-methyladenosine-3'-phosphate
  modified_base 5: mod_base = OTHER; note = 2'-O-methylguanosine-3'-phosphate
  modified_base 6: mod_base = OTHER; note = 2'-deoxy-2'-fluorocytidine-3'-phosphate
  modified_base 7: mod_base = OTHER; note = 2'-O-methylcytidine-3'-phosphate
  modified_base 8: mod_base = OTHER; note = 2'-deoxy-2'-fluoroadenosine-3'-phosphate
  modified_base 9: mod_base = OTHER; note = 2'-deoxy-2'-fluoroadenosine-3'-phosphate
  modified_base 10: mod_base = OTHER; note = 2'-O-methyladenosine-3'-phosphate
  modified_base 11: mod_base = OTHER; note = 2'-O-methylguanosine-3'-phosphate
  modified_base 12: mod_base = OTHER; note = 2'-O-methyluridine-3'-phosphate
  modified_base 13: mod_base = OTHER; note = 2'-O-methyluridine-3'-phosphate
  modified_base 14: mod_base = OTHER; note = 2'-deoxy-2'-fluorouridine-3'-phosphate
  modified_base 15: mod_base = OTHER; note = 2'-O-methylcytidine-3'-phosphate
  modified_base 16: mod_base = OTHER; note = 2'-deoxy-2'-fluorouridine-3'-phosphate
  modified_base 17: mod_base = OTHER; note = 2'-O-methyluridine-3'-phosphate
  modified_base 18: mod_base = OTHER; note = 2'-O-methylcytidine-3'-phosphate
  modified_base 19: mod_base = OTHER; note = 2'-O-methyladenosine-3'-phosphate
  modified_base 20: mod_base = OTHER; note = 2'-O-methyluridine-3'-phosphate
  modified_base 21: mod_base = OTHER; note = 2'-O-methylcytidine-3'-phosphorothioate
  modified_base 22: mod_base = OTHER; note = 2'-O-methyladenosine-3'-phosphorothioate
  modified_base 23: mod_base = OTHER; note = 2'-O-methyluridine
atcagccaaagtttcttcatcat

SEQ ID NO: 2256 - RNA, 21 nt, synthetic construct
  source 1..21: mol_type = other RNA
  modified_base 1: mod_base = OTHER; note = 2'-O-methyluridine-3'-phosphorothioate
  modified_base 2: mod_base = OTHER; note = 2'-O-methylguanosine-3'-phosphorothioate
  modified_base 3: mod_base = OTHER; note = 2'-O-methyladenosine-3'-phosphate
  modified_base 4: mod_base = OTHER; note = 2'-O-methyluridine-3'-phosphate
  modified_base 5: mod_base = OTHER; note = 2'-O-methylguanosine-3'-phosphate
  modified_base 6: mod_base = OTHER; note = 2'-O-methyladenosine-3'-phosphate
  modified_base 7: mod_base = OTHER; note = 2'-deoxy-2'-fluoroadenosine-3'-phosphate
  modified_base 8: mod_base = OTHER; note = 2'-O-methylguanosine-3'-phosphate
  modified_base 9: mod_base = OTHER; note = 2'-deoxy-2'-fluoroadenosine-3'-phosphate
  modified_base 10: mod_base = OTHER; note = 2'-deoxy-2'-fluoroadenosine-3'-phosphate
  modified_base 11: mod_base = OTHER; note = 2'-deoxy-2'-fluoroadenosine-3'-phosphate
  modified_base 12: mod_base = OTHER; note = 2'-O-methylcytidine-3'-phosphate
  modified_base 13: mod_base = OTHER; note = 2'-O-methyluridine-3'-phosphate
  modified_base 14: mod_base = OTHER; note = 2'-O-methyluridine-3'-phosphate
  modified_base 15: mod_base = OTHER; note = 2'-O-methyluridine-3'-phosphate
  modified_base 16: mod_base = OTHER; note = 2'-O-methylguanosine-3'-phosphate
  modified_base 17: mod_base = OTHER; note = 2'-O-methylguanosine-3'-phosphate
  modified_base 18: mod_base = OTHER; note = 2'-O-methylcytidine-3'-phosphate
  modified_base 19: mod_base = OTHER; note = 2'-O-methyluridine-3'-phosphate
  modified_base 20: mod_base = OTHER; note = 2'-O-methylguanosine-3'-phosphate
  modified_base 21: mod_base = OTHER; note = 2'-O-methyladenosine-3'-phosphate ((2S,4R)-1-[29-[[2-(acetylamino)-2-deoxy-beta-D-galactopyra nosyl]oxy]-14,14-bis[[3-[[3-[[5-[[2-(acetylamino)-2-deoxy-b eta-D-galactopyranosyl]oxy]-1-oxopentyl]amino]propyl]amino] -3-oxopropoxy]methyl]-1,12,19,25-tetraoxo-16-oxa-13,20,24-t riazanonacos-1-yl]-4-hydroxy-2-pyrrolidinyl)methyl ester
tgatgaagaaactttggctga

SEQ ID NO: 2257 - RNA, 23 nt, synthetic construct
  source 1..23: mol_type = other RNA
  modified_base 1: mod_base = OTHER; note = 2'-O-methyluridine-3'-phosphorothioate
  modified_base 2: mod_base = OTHER; note = 2'-deoxy-2'-fluorocytidine-3'-phosphorothioate
  modified_base 3: mod_base = OTHER; note = 2'-O-methyladenosine-3'-phosphate
  modified_base 4: mod_base = OTHER; note = 2'-O-methylguanosine-3'-phosphate
  modified_base 5: mod_base = OTHER; note = 2'-O-methylcytidine-3'-phosphate
  modified_base 6: mod_base = OTHER; note = 2'-deoxy-2'-fluorocytidine-3'-phosphate
  modified_base 7: mod_base = OTHER; note = 2'-O-methyladenosine-3'-phosphate
  modified_base 8: mod_base = OTHER; note = 2'-deoxy-2'-fluoroadenosine-3'-phosphate
  modified_base 9: mod_base = OTHER; note = 2'-deoxy-2'-fluoroadenosine-3'-phosphate
  modified_base 10: mod_base = OTHER; note = 2'-O-methylguanosine-3'-phosphate
  modified_base 11: mod_base = OTHER; note = 2'-O-methyluridine-3'-phosphate
  modified_base 12: mod_base = OTHER; note = 2'-O-methyluridine-3'-phosphate
  modified_base 13: mod_base = OTHER; note = 2'-O-methyluridine-3'-phosphate
  modified_base 14: mod_base = OTHER; note = 2'-deoxy-2'-fluorocytidine-3'-phosphate
  modified_base 15: mod_base = OTHER; note = 2'-O-methyluridine-3'-phosphate
  modified_base 16: mod_base = OTHER; note = 2'-deoxy-2'-fluorouridine-3'-phosphate
  modified_base 17: mod_base = OTHER; note = 2'-O-methylcytidine-3'-phosphate
  modified_base 18: mod_base = OTHER; note = 2'-O-methyladenosine-3'-phosphate
  modified_base 19: mod_base = OTHER; note = 2'-O-methyluridine-3'-phosphate
  modified_base 20: mod_base = OTHER; note = 2'-O-methylcytidine-3'-phosphate
  modified_base 21: mod_base = OTHER; note = 2'-O-methyladenosine-3'-phosphorothioate
  modified_base 22: mod_base = OTHER; note = 2'-O-methyluridine-3'-phosphorothioate
  modified_base 23: mod_base = OTHER; note = 2'-O-methyluridine
tcagccaaagtttcttcatcatt

SEQ ID NO: 2258 - RNA, 21 nt, synthetic construct
  source 1..21: mol_type = other RNA
  modified_base 1: mod_base = OTHER; note = 2'-O-methylguanosine-3'-phosphorothioate
  modified_base 2: mod_base = OTHER; note = 2'-O-methyladenosine-3'-phosphorothioate
  modified_base 3: mod_base = OTHER; note = 2'-O-methyladenosine-3'-phosphate
  modified_base 4: mod_base = OTHER; note = 2'-O-methyladenosine-3'-phosphate
  modified_base 5: mod_base = OTHER; note = 2'-O-methylguanosine-3'-phosphate
  modified_base 6: mod_base = OTHER; note = 2'-O-methylguanosine-3'-phosphate
  modified_base 7: mod_base = OTHER; note = 2'-deoxy-2'-fluorouridine-3'-phosphate
  modified_base 8: mod_base = OTHER; note = 2'-O-methylguanosine-3'-phosphate
  modified_base 9: mod_base = OTHER; note = 2'-deoxy-2'-fluorouridine-3'-phosphate
  modified_base 10: mod_base = OTHER; note = 2'-deoxy-2'-fluorouridine-3'-phosphate
  modified_base 11: mod_base = OTHER; note = 2'-deoxy-2'-fluorocytidine-3'-phosphate
  modified_base 12: mod_base = OTHER; note = 2'-O-methyladenosine-3'-phosphate
  modified_base 13: mod_base = OTHER; note = 2'-O-methyladenosine-3'-phosphate
  modified_base 14: mod_base = OTHER; note = 2'-O-methylguanosine-3'-phosphate
  modified_base 15: mod_base = OTHER; note = 2'-O-methyladenosine-3'-phosphate
  modified_base 16: mod_base = OTHER; note = 2'-O-methyluridine-3'-phosphate
  modified_base 17: mod_base = OTHER; note = 2'-O-methylguanosine-3'-phosphate
  modified_base 18: mod_base = OTHER; note = 2'-O-methyluridine-3'-phosphate
  modified_base 19: mod_base = OTHER; note = 2'-O-methylcytidine-3'-phosphate
  modified_base 20: mod_base = OTHER; note = 2'-O-methylcytidine-3'-phosphate
  modified_base 21: mod_base = OTHER; note = 2'-O-methyluridine-3'-phosphate ((2S,4R)-1-[29-[[2-(acetylamino)-2-deoxy-beta-D-galactopyra nosyl]oxy]-14,14-bis[[3-[[3-[[5-[[2-(acetylamino)-2-deoxy-b eta-D-galactopyranosyl]oxy]-1-oxopentyl]amino]propyl]amino] -3-oxopropoxy]methyl]-1,12,19,25-tetraoxo-16-oxa-13,20,24-t riazanonacos-1-yl]-4-hydroxy-2-pyrrolidinyl)methyl ester
gaaaggtgttcaagatgtcct

SEQ ID NO: 2259 - RNA, 23 nt, synthetic construct
  source 1..23: mol_type = other RNA
  modified_base 1: mod_base = OTHER; note = 2'-O-methyladenosine-3'-phosphorothioate
  modified_base 2: mod_base = OTHER; note = 2'-deoxy-2'-fluoroguanosine-3'-phosphorothioate
  modified_base 3: mod_base = OTHER; note = 2'-O-methylguanosine-3'-phosphate
  modified_base 4: mod_base = OTHER; note = 2'-O-methyladenosine-3'-phosphate
  modified_base 5: mod_base = OTHER; note = 2'-O-methylcytidine-3'-phosphate
  modified_base 6: mod_base = OTHER; note = 2'-deoxy-2'-fluoroadenosine-3'-phosphate
  modified_base 7: mod_base = OTHER; note = 2'-O-methyluridine-3'-phosphate
  modified_base 8: mod_base = OTHER; note = 2'-deoxy-2'-fluorocytidine-3'-phosphate
  modified_base 9: mod_base = OTHER; note = 2'-deoxy-2'-fluorouridine-3'-phosphate
  modified_base 10: mod_base = OTHER; note = 2'-O-methyluridine-3'-phosphate
  modified_base 11: mod_base = OTHER; note = 2'-O-methylguanosine-3'-phosphate
  modified_base 12: mod_base = OTHER; note = 2'-O-methyladenosine-3'-phosphate
  modified_base 13: mod_base = OTHER; note = 2'-O-methyladenosine-3'-phosphate
  modified_base 14: mod_base = OTHER; note = 2'-deoxy-2'-fluorocytidine-3'-phosphate
  modified_base 15: mod_base = OTHER; note = 2'-O-methyladenosine-3'-phosphate
  modified_base 16: mod_base = OTHER; note = 2'-deoxy-2'-fluorocytidine-3'-phosphate
  modified_base 17: mod_base = OTHER; note = 2'-O-methylcytidine-3'-phosphate
  modified_base 18: mod_base = OTHER; note = 2'-O-methyluridine-3'-phosphate
  modified_base 19: mod_base = OTHER; note = 2'-O-methyluridine-3'-phosphate
  modified_base 20: mod_base = OTHER; note = 2'-O-methyluridine-3'-phosphate
  modified_base 21: mod_base = OTHER; note = 2'-O-methylcytidine-3'-phosphorothioate
  modified_base 22: mod_base = OTHER; note = 2'-O-methyluridine-3'-phosphorothioate
  modified_base 23: mod_base = OTHER; note = 2'-O-methylcytidine
aggacatcttgaacacctttctc

SEQ ID NO: 2260 - RNA, 21 nt, synthetic construct
  source 1..21: mol_type = other RNA
  modified_base 1: mod_base = OTHER; note = 2'-O-methyladenosine-3'-phosphorothioate
  modified_base 2: mod_base = OTHER; note = 2'-O-methyladenosine-3'-phosphorothioate
  modified_base 3: mod_base = OTHER; note = 2'-O-methyladenosine-3'-phosphate
  modified_base 4: mod_base = OTHER; note = 2'-O-methylguanosine-3'-phosphate
  modified_base 5: mod_base = OTHER; note = 2'-O-methylguanosine-3'-phosphate
  modified_base 6: mod_base = OTHER; note = 2'-O-methyluridine-3'-phosphate
  modified_base 7: mod_base = OTHER; note = 2'-deoxy-2'-fluoroguanosine-3'-phosphate
  modified_base 8: mod_base = OTHER; note = 2'-O-methyluridine-3'-phosphate
  modified_base 9: mod_base = OTHER; note = 2'-deoxy-2'-fluorouridine-3'-phosphate
  modified_base 10: mod_base = OTHER; note = 2'-deoxy-2'-fluorocytidine-3'-phosphate
  modified_base 11: mod_base = OTHER; note = 2'-deoxy-2'-fluoroadenosine-3'-phosphate
  modified_base 12: mod_base = OTHER; note = 2'-O-methyladenosine-3'-phosphate
  modified_base 13: mod_base = OTHER; note = 2'-O-methylguanosine-3'-phosphate
  modified_base 14: mod_base = OTHER; note = 2'-O-methyladenosine-3'-phosphate
  modified_base 15: mod_base = OTHER; note = 2'-O-methyluridine-3'-phosphate
  modified_base 16: mod_base = OTHER; note = 2'-O-methylguanosine-3'-phosphate
  modified_base 17: mod_base = OTHER; note = 2'-O-methyluridine-3'-phosphate
  modified_base 18: mod_base = OTHER; note = 2'-O-methylcytidine-3'-phosphate
  modified_base 19: mod_base = OTHER; note = 2'-O-methylcytidine-3'-phosphate
  modified_base 20: mod_base = OTHER; note = 2'-O-methyluridine-3'-phosphate
  modified_base 21: mod_base = OTHER; note = 2'-O-methylcytidine-3'-phosphate ((2S,4R)-1-[29-[[2-(acetylamino)-2-deoxy-beta-D-galactopyra nosyl]oxy]-14,14-bis[[3-[[3-[[5-[[2-(acetylamino)-2-deoxy-b eta-D-galactopyranosyl]oxy]-1-oxopentyl]amino]propyl]amino] -3-oxopropoxy]methyl]-1,12,19,25-tetraoxo-16-oxa-13,20,24-t riazanonacos-1-yl]-4-hydroxy-2-pyrrolidinyl)methyl ester
aaaggtgttcaagatgtcctc

SEQ ID NO: 2261 - RNA, 23 nt, synthetic construct
  source 1..23: mol_type = other RNA
  modified_base 1: mod_base = OTHER; note = 2'-O-methylguanosine-3'-phosphorothioate
  modified_base 2: mod_base = OTHER; note = 2'-deoxy-2'-fluoroadenosine-3'-phosphorothioate
  modified_base 3: mod_base = OTHER; note = 2'-O-methylguanosine-3'-phosphate
  modified_base 4: mod_base = OTHER; note = 2'-O-methylguanosine-3'-phosphate
  modified_base 5: mod_base = OTHER; note = 2'-O-methyladenosine-3'-phosphate
  modified_base 6: mod_base = OTHER; note = 2'-deoxy-2'-fluorocytidine-3'-phosphate
  modified_base 7: mod_base = OTHER; note = 2'-O-methyladenosine-3'-phosphate
  modified_base 8: mod_base = OTHER; note = 2'-deoxy-2'-fluorouridine-3'-phosphate
  modified_base 9: mod_base = OTHER; note = 2'-deoxy-2'-fluorocytidine-3'-phosphate
  modified_base 10: mod_base = OTHER; note = 2'-O-methyluridine-3'-phosphate
  modified_base 11: mod_base = OTHER; note = 2'-O-methyluridine-3'-phosphate
  modified_base 12: mod_base = OTHER; note = 2'-O-methylguanosine-3'-phosphate
  modified_base 13: mod_base = OTHER; note = 2'-O-methyladenosine-3'-phosphate
  modified_base 14: mod_base = OTHER; note = 2'-deoxy-2'-fluoroadenosine-3'-phosphate
  modified_base 15: mod_base = OTHER; note = 2'-O-methylcytidine-3'-phosphate
  modified_base 16: mod_base = OTHER; note = 2'-deoxy-2'-fluoroadenosine-3'-phosphate
  modified_base 17: mod_base = OTHER; note = 2'-O-methylcytidine-3'-phosphate
  modified_base 18: mod_base = OTHER; note = 2'-O-methylcytidine-3'-phosphate
  modified_base 19: mod_base = OTHER; note = 2'-O-methyluridine-3'-phosphate
  modified_base 20: mod_base = OTHER; note = 2'-O-methyluridine-3'-phosphate
  modified_base 21: mod_base = OTHER; note = 2'-O-methyluridine-3'-phosphorothioate
  modified_base 22: mod_base = OTHER; note = 2'-O-methylcytidine-3'-phosphorothioate
  modified_base 23: mod_base = OTHER; note = 2'-O-methyluridine
gaggacatcttgaacacctttct

SEQ ID NO: 2262 - RNA, 21 nt, synthetic construct
  source 1..21: mol_type = other RNA
  modified_base 1: mod_base = OTHER; note = 2'-O-methylguanosine-3'-phosphorothioate
  modified_base 2: mod_base = OTHER; note = 2'-O-methylguanosine-3'-phosphorothioate
  modified_base 3: mod_base = OTHER; note = 2'-O-methylguanosine-3'-phosphate
  modified_base 4: mod_base = OTHER; note = 2'-O-methyladenosine-3'-phosphate
  modified_base 5: mod_base = OTHER; note = 2'-O-methylguanosine-3'-phosphate
  modified_base 6: mod_base = OTHER; note = 2'-O-methyladenosine-3'-phosphate
  modified_base 7: mod_base = OTHER; note = 2'-deoxy-2'-fluoroadenosine-3'-phosphate
  modified_base 8: mod_base = OTHER; note = 2'-O-methyladenosine-3'-phosphate
  modified_base 9: mod_base = OTHER; note = 2'-deoxy-2'-fluoroguanosine-3'-phosphate
  modified_base 10: mod_base = OTHER; note = 2'-deoxy-2'-fluoroguanosine-3'-phosphate
  modified_base 11: mod_base = OTHER; note = 2'-deoxy-2'-fluorouridine-3'-phosphate
  modified_base 12: mod_base = OTHER; note = 2'-O-methylguanosine-3'-phosphate
  modified_base 13: mod_base = OTHER; note = 2'-O-methyluridine-3'-phosphate
  modified_base 14: mod_base = OTHER; note = 2'-O-methyluridine-3'-phosphate
  modified_base 15: mod_base = OTHER; note = 2'-O-methylcytidine-3'-phosphate
  modified_base 16: mod_base = OTHER; note = 2'-O-methyladenosine-3'-phosphate
  modified_base 17: mod_base = OTHER; note = 2'-O-methyladenosine-3'-phosphate
  modified_base 18: mod_base = OTHER; note = 2'-O-methylguanosine-3'-phosphate
  modified_base 19: mod_base = OTHER; note = 2'-O-methyladenosine-3'-phosphate
  modified_base 20: mod_base = OTHER; note = 2'-O-methyluridine-3'-phosphate
  modified_base 21: mod_base = OTHER; note = 2'-O-methylguanosine-3'-phosphate ((2S,4R)-1-[29-[[2-(acetylamino)-2-deoxy-beta-D-galactopyra nosyl]oxy]-14,14-bis[[3-[[3-[[5-[[2-(acetylamino)-2-deoxy-b eta-D-galactopyranosyl]oxy]-1-oxopentyl]amino]propyl]amino] -3-oxopropoxy]methyl]-1,12,19,25-tetraoxo-16-oxa-13,20,24-t riazanonacos-1-yl]-4-hydroxy-2-pyrrolidinyl)methyl ester
gggagaaaggtgttcaagatg

SEQ ID NO: 2263 - RNA, 23 nt, synthetic construct
  source 1..23: mol_type = other RNA
  modified_base 1: mod_base = OTHER; note = 2'-O-methylcytidine-3'-phosphorothioate
  modified_base 2: mod_base = OTHER; note = 2'-deoxy-2'-fluoroadenosine-3'-phosphorothioate
  modified_base 3: mod_base = OTHER; note = 2'-O-methyluridine-3'-phosphate
  modified_base 4: mod_base = OTHER; note = 2'-O-methylcytidine-3'-phosphate
  modified_base 5: mod_base = OTHER; note = 2'-O-methyluridine-3'-phosphate
  modified_base 6: mod_base = OTHER; note = 2'-deoxy-2'-fluorouridine-3'-phosphate
  modified_base 7: mod_base = OTHER; note = 2'-O-methylguanosine-3'-phosphate
  modified_base 8: mod_base = OTHER; note = 2'-deoxy-2'-fluoroadenosine-3'-phosphate
  modified_base 9: mod_base = OTHER; note = 2'-deoxy-2'-fluoroadenosine-3'-phosphate
  modified_base 10: mod_base = OTHER; note = 2'-O-methylcytidine-3'-phosphate
  modified_base 11: mod_base = OTHER; note = 2'-O-methyladenosine-3'-phosphate
  modified_base 12: mod_base = OTHER; note = 2'-O-methylcytidine-3'-phosphate
  modified_base 13: mod_base = OTHER; note = 2'-O-methylcytidine-3'-phosphate
  modified_base 14: mod_base = OTHER; note = 2'-deoxy-2'-fluorouridine-3'-phosphate
  modified_base 15: mod_base = OTHER; note = 2'-O-methyluridine-3'-phosphate
  modified_base 16: mod_base = OTHER; note = 2'-deoxy-2'-fluorouridine-3'-phosphate
  modified_base 17: mod_base = OTHER; note = 2'-O-methylcytidine-3'-phosphate
  modified_base 18: mod_base = OTHER; note = 2'-O-methyluridine-3'-phosphate
  modified_base 19: mod_base = OTHER; note = 2'-O-methylcytidine-3'-phosphate
  modified_base 20: mod_base = OTHER; note = 2'-O-methylcytidine-3'-phosphate
  modified_base 21: mod_base = OTHER; note = 2'-O-methylcytidine-3'-phosphorothioate
  modified_base 22: mod_base = OTHER; note = 2'-O-methylcytidine-3'-phosphorothioate
  modified_base 23: mod_base = OTHER; note = 2'-O-methylcytidine
catcttgaacacctttctccccc

SEQ ID NO: 2264 - RNA, 21 nt, synthetic construct
  source 1..21: mol_type = other RNA
  modified_base 1: mod_base = OTHER; note = 2'-O-methylguanosine-3'-phosphorothioate
  modified_base 2: mod_base = OTHER; note = 2'-O-methylguanosine-3'-phosphorothioate
  modified_base 3: mod_base = OTHER; note = 2'-O-methylguanosine-3'-phosphate
  modified_base 4: mod_base = OTHER; note = 2'-O-methylguanosine-3'-phosphate
  modified_base 5: mod_base = OTHER; note = 2'-O-methyladenosine-3'-phosphate
  modified_base 6: mod_base = OTHER; note = 2'-O-methylguanosine-3'-phosphate
  modified_base 7: mod_base = OTHER; note = 2'-deoxy-2'-fluoroadenosine-3'-phosphate
  modified_base 8: mod_base = OTHER; note = 2'-O-methyladenosine-3'-phosphate
  modified_base 9: mod_base = OTHER; note = 2'-deoxy-2'-fluoroadenosine-3'-phosphate
  modified_base 10: mod_base = OTHER; note = 2'-deoxy-2'-fluoroguanosine-3'-phosphate
  modified_base 11: mod_base = OTHER; note = 2'-deoxy-2'-fluoroguanosine-3'-phosphate
  modified_base 12: mod_base = OTHER; note = 2'-O-methyluridine-3'-phosphate
  modified_base 13: mod_base = OTHER; note = 2'-O-methylguanosine-3'-phosphate
  modified_base 14: mod_base = OTHER; note = 2'-O-methyluridine-3'-phosphate
  modified_base 15: mod_base = OTHER; note = 2'-O-methyluridine-3'-phosphate
  modified_base 16: mod_base = OTHER; note = 2'-O-methylcytidine-3'-phosphate
  modified_base 17: mod_base = OTHER; note = 2'-O-methyladenosine-3'-phosphate
  modified_base 18: mod_base = OTHER; note = 2'-O-methyladenosine-3'-phosphate
  modified_base 19: mod_base = OTHER; note = 2'-O-methylguanosine-3'-phosphate
  modified_base 20: mod_base = OTHER; note = 2'-O-methyladenosine-3'-phosphate
  modified_base 21: mod_base = OTHER; note = 2'-O-methyluridine-3'-phosphate ((2S,4R)-1-[29-[[2-(acetylamino)-2-deoxy-beta-D-galactopyra nosyl]oxy]-14,14-bis[[3-[[3-[[5-[[2-(acetylamino)-2-deoxy-b eta-D-galactopyranosyl]oxy]-1-oxopentyl]amino]propyl]amino] -3-oxopropoxy]methyl]-1,12,19,25-tetraoxo-16-oxa-13,20,24-t riazanonacos-1-yl]-4-hydroxy-2-pyrrolidinyl)methyl ester
ggggagaaaggtgttcaagat

SEQ ID NO: 2265 - RNA, 23 nt, synthetic construct
  source 1..23: mol_type = other RNA
  modified_base 1: mod_base = OTHER; note = 2'-O-methyladenosine-3'-phosphorothioate
  modified_base 2: mod_base = OTHER; note = 2'-deoxy-2'-fluorouridine-3'-phosphorothioate
  modified_base 3: mod_base = OTHER; note = 2'-O-methylcytidine-3'-phosphate
  modified_base 4: mod_base = OTHER; note = 2'-O-methyluridine-3'-phosphate
  modified_base 5: mod_base = OTHER; note = 2'-O-methyluridine-3'-phosphate
  modified_base 6: mod_base = OTHER; note = 2'-deoxy-2'-fluoroguanosine-3'-phosphate
  modified_base 7: mod_base = OTHER; note = 2'-O-methyladenosine-3'-phosphate
  modified_base 8: mod_base = OTHER; note = 2'-deoxy-2'-fluoroadenosine-3'-phosphate
  modified_base 9: mod_base = OTHER; note = 2'-deoxy-2'-fluorocytidine-3'-phosphate
  modified_base 10: mod_base = OTHER; note = 2'-O-methyladenosine-3'-phosphate
  modified_base 11: mod_base = OTHER; note = 2'-O-methylcytidine-3'-phosphate
  modified_base 12: mod_base = OTHER; note = 2'-O-methylcytidine-3'-phosphate
  modified_base 13: mod_base = OTHER; note = 2'-O-methyluridine-3'-phosphate
  modified_base 14: mod_base = OTHER; note = 2'-deoxy-2'-fluorouridine-3'-phosphate
  modified_base 15: mod_base = OTHER; note = 2'-O-methyluridine-3'-phosphate
  modified_base 16: mod_base = OTHER; note = 2'-deoxy-2'-fluorocytidine-3'-phosphate
  modified_base 17: mod_base = OTHER; note = 2'-O-methyluridine-3'-phosphate
  modified_base 18: mod_base = OTHER; note = 2'-O-methylcytidine-3'-phosphate
  modified_base 19: mod_base = OTHER; note = 2'-O-methylcytidine-3'-phosphate
  modified_base 20: mod_base = OTHER; note = 2'-O-methylcytidine-3'-phosphate
  modified_base 21: mod_base = OTHER; note = 2'-O-methylcytidine-3'-phosphorothioate
  modified_base 22: mod_base = OTHER; note = 2'-O-methylcytidine-3'-phosphorothioate
  modified_base 23: mod_base = OTHER; note = 2'-O-methyluridine
atcttgaacacctttctccccct

SEQ ID NO: 2266 - RNA, 21 nt, synthetic construct
  source 1..21: mol_type = other RNA
  modified_base 1: mod_base = OTHER; note = 2'-O-methyladenosine-3'-phosphorothioate
  modified_base 2: mod_base = OTHER; note = 2'-O-methyluridine-3'-phosphorothioate
  modified_base 3: mod_base = OTHER; note = 2'-O-methylcytidine-3'-phosphate
  modified_base 4: mod_base = OTHER; note = 2'-O-methyluridine-3'-phosphate
  modified_base 5: mod_base = OTHER; note = 2'-O-methyluridine-3'-phosphate
  modified_base 6: mod_base = OTHER; note = 2'-O-methylguanosine-3'-phosphate
  modified_base 7: mod_base = OTHER; note = 2'-deoxy-2'-fluoroguanosine-3'-phosphate
  modified_base 8: mod_base = OTHER; note = 2'-O-methyluridine-3'-phosphate
  modified_base 9: mod_base = OTHER; note = 2'-deoxy-2'-fluoroguanosine-3'-phosphate
  modified_base 10: mod_base = OTHER; note = 2'-deoxy-2'-fluorouridine-3'-phosphate
  modified_base 11: mod_base = OTHER; note = 2'-deoxy-2'-fluorocytidine-3'-phosphate
  modified_base 12: mod_base = OTHER; note = 2'-O-methylguanosine-3'-phosphate
  modified_base 13: mod_base = OTHER; note = 2'-O-methyladenosine-3'-phosphate
  modified_base 14: mod_base = OTHER; note = 2'-O-methyladenosine-3'-phosphate
  modified_base 15: mod_base = OTHER; note = 2'-O-methyluridine-3'-phosphate
  modified_base 16: mod_base = OTHER; note = 2'-O-methylcytidine-3'-phosphate
  modified_base 17: mod_base = OTHER; note = 2'-O-methyladenosine-3'-phosphate
  modified_base 18: mod_base = OTHER; note = 2'-O-methyluridine-3'-phosphate
  modified_base 19: mod_base = OTHER; note = 2'-O-methylguanosine-3'-phosphate
  modified_base 20: mod_base = OTHER; note = 2'-O-methylguanosine-3'-phosphate
  modified_base 21: mod_base = OTHER; note = 2'-O-methylguanosine-3'-phosphate ((2S,4R)-1-[29-[[2-(acetylamino)-2-deoxy-beta-D-galactopyra nosyl]oxy]-14,14-bis[[3-[[3-[[5-[[2-(acetylamino)-2-deoxy-b eta-D-galactopyranosyl]oxy]-1-oxopentyl]amino]propyl]amino] -3-oxopropoxy]methyl]-1,12,19,25-tetraoxo-16-oxa-13,20,24-t riazanonacos-1-yl]-4-hydroxy-2-pyrrolidinyl)methyl ester
atcttggtgtcgaatcatggg

SEQ ID NO: 2267 - RNA, 23 nt, synthetic construct
  source 1..23: mol_type = other RNA
  modified_base 1: mod_base = OTHER; note = 2'-O-methylcytidine-3'-phosphorothioate
  modified_base 2: mod_base = OTHER; note = 2'-deoxy-2'-fluorocytidine-3'-phosphorothioate
  modified_base 3: mod_base = OTHER; note = 2'-O-methylcytidine-3'-phosphate
  modified_base 4: mod_base = OTHER; note = 2'-O-methyladenosine-3'-phosphate
  modified_base 5: mod_base = OTHER; note = 2'-O-methyluridine-3'-phosphate
  modified_base 6: mod_base = OTHER; note = 2'-deoxy-2'-fluoroguanosine-3'-phosphate
  modified_base 7: mod_base = OTHER; note = 2'-O-methyladenosine-3'-phosphate
  modified_base 8: mod_base = OTHER; note = 2'-deoxy-2'-fluorouridine-3'-phosphate
  modified_base 9: mod_base = OTHER; note = 2'-deoxy-2'-fluorouridine-3'-phosphate
  modified_base 10: mod_base = OTHER; note = 2'-O-methylcytidine-3'-phosphate
  modified_base 11: mod_base = OTHER; note = 2'-O-methylguanosine-3'-phosphate
  modified_base 12: mod_base = OTHER; note = 2'-O-methyladenosine-3'-phosphate
  modified_base 13: mod_base = OTHER; note = 2'-O-methylcytidine-3'-phosphate
  modified_base 14: mod_base = OTHER; note = 2'-deoxy-2'-fluoroadenosine-3'-phosphate
  modified_base 15: mod_base = OTHER; note = 2'-O-methylcytidine-3'-phosphate
  modified_base 16: mod_base = OTHER; note = 2'-deoxy-2'-fluorocytidine-3'-phosphate
  modified_base 17: mod_base = OTHER; note = 2'-O-methyladenosine-3'-phosphate
  modified_base 18: mod_base = OTHER; note = 2'-O-methyladenosine-3'-phosphate
  modified_base 19: mod_base = OTHER; note = 2'-O-methylguanosine-3'-phosphate
  modified_base 20: mod_base = OTHER; note = 2'-O-methyladenosine-3'-phosphate
  modified_base 21: mod_base = OTHER; note = 2'-O-methyluridine-3'-phosphorothioate
  modified_base 22: mod_base = OTHER; note = 2'-O-methylcytidine-3'-phosphorothioate
  modified_base 23: mod_base = OTHER; note = 2'-O-methylcytidine
cccatgattcgacaccaagatcc

SEQ ID NO: 2268 - RNA, 21 nt, synthetic construct
  source 1..21: mol_type = other RNA
  modified_base 1: mod_base = OTHER; note = 2'-O-methyluridine-3'-phosphorothioate
  modified_base 2: mod_base = OTHER; note = 2'-O-methylcytidine-3'-phosphorothioate
  modified_base 3: mod_base = OTHER; note = 2'-O-methyluridine-3'-phosphate
  modified_base 4: mod_base = OTHER; note = 2'-O-methyluridine-3'-phosphate
  modified_base 5: mod_base = OTHER; note = 2'-O-methylguanosine-3'-phosphate
  modified_base 6: mod_base = OTHER; note = 2'-O-methylguanosine-3'-phosphate
  modified_base 7: mod_base = OTHER; note = 2'-deoxy-2'-fluorouridine-3'-phosphate
  modified_base 8: mod_base = OTHER; note = 2'-O-methylguanosine-3'-phosphate
  modified_base 9: mod_base = OTHER; note = 2'-deoxy-2'-fluorouridine-3'-phosphate
  modified_base 10: mod_base = OTHER; note = 2'-deoxy-2'-fluorocytidine-3'-phosphate
  modified_base 11: mod_base = OTHER; note = 2'-deoxy-2'-fluoroguanosine-3'-phosphate
  modified_base 12: mod_base = OTHER; note = 2'-O-methyladenosine-3'-phosphate
  modified_base 13: mod_base = OTHER; note = 2'-O-methyladenosine-3'-phosphate
  modified_base 14: mod_base = OTHER; note = 2'-O-methyluridine-3'-phosphate
  modified_base 15: mod_base = OTHER; note = 2'-O-methylcytidine-3'-phosphate
  modified_base 16: mod_base = OTHER; note = 2'-O-methyladenosine-3'-phosphate
  modified_base 17: mod_base = OTHER; note = 2'-O-methyluridine-3'-phosphate
  modified_base 18: mod_base = OTHER; note = 2'-O-methylguanosine-3'-phosphate
  modified_base 19: mod_base = OTHER; note = 2'-O-methylguanosine-3'-phosphate
  modified_base 20: mod_base = OTHER; note = 2'-O-methylguanosine-3'-phosphate
  modified_base 21: mod_base = OTHER; note = 2'-O-methylguanosine-3'-phosphate ((2S,4R)-1-[29-[[2-(acetylamino)-2-deoxy-beta-D-galactopyra nosyl]oxy]-14,14-bis[[3-[[3-[[5-[[2-(acetylamino)-2-deoxy-b eta-D-galactopyranosyl]oxy]-1-oxopentyl]amino]propyl]amino] -3-oxopropoxy]methyl]-1,12,19,25-tetraoxo-16-oxa-13,20,24-t riazanonacos-1-yl]-4-hydroxy-2-pyrrolidinyl)methyl ester
tcttggtgtcgaatcatgggg

SEQ ID NO: 2269 - RNA, 23 nt, synthetic construct
  source 1..23: mol_type = other RNA
  modified_base 1: mod_base = OTHER; note = 2'-O-methylcytidine-3'-phosphorothioate
  modified_base 2: mod_base = OTHER; note = 2'-deoxy-2'-fluorocytidine-3'-phosphorothioate
  modified_base 3: mod_base = OTHER; note = 2'-O-methylcytidine-3'-phosphate
  modified_base 4: mod_base = OTHER; note = 2'-O-methylcytidine-3'-phosphate
  modified_base 5: mod_base = OTHER; note = 2'-O-methyladenosine-3'-phosphate
  modified_base 6: mod_base = OTHER; note = 2'-deoxy-2'-fluorouridine-3'-phosphate
  modified_base 7: mod_base = OTHER; note = 2'-O-methylguanosine-3'-phosphate
  modified_base 8: mod_base = OTHER; note = 2'-deoxy-2'-fluoroadenosine-3'-phosphate
  modified_base 9: mod_base = OTHER; note = 2'-deoxy-2'-fluorouridine-3'-phosphate
  modified_base 10: mod_base = OTHER; note = 2'-O-methyluridine-3'-phosphate
  modified_base 11: mod_base = OTHER; note = 2'-O-methylcytidine-3'-phosphate
  modified_base 12: mod_base = OTHER; note = 2'-O-methylguanosine-3'-phosphate
  modified_base 13: mod_base = OTHER; note = 2'-O-methyladenosine-3'-phosphate
  modified_base 14: mod_base = OTHER; note = 2'-deoxy-2'-fluorocytidine-3'-phosphate
  modified_base 15: mod_base = OTHER; note = 2'-O-methyladenosine-3'-phosphate
  modified_base 16: mod_base = OTHER; note = 2'-deoxy-2'-fluorocytidine-3'-phosphate
  modified_base 17: mod_base = OTHER; note = 2'-O-methylcytidine-3'-phosphate
  modified_base 18: mod_base = OTHER; note = 2'-O-methyladenosine-3'-phosphate
  modified_base 19: mod_base = OTHER; note = 2'-O-methyladenosine-3'-phosphate
  modified_base 20: mod_base = OTHER; note = 2'-O-methylguanosine-3'-phosphate
  modified_base 21: mod_base = OTHER; note = 2'-O-methyladenosine-3'-phosphorothioate
  modified_base 22: mod_base = OTHER; note = 2'-O-methyluridine-3'-phosphorothioate
  modified_base 23: mod_base = OTHER; note = 2'-O-methylcytidine
ccccatgattcgacaccaagatc

SEQ ID NO: 2270 - RNA, 21 nt, synthetic construct
  source 1..21: mol_type = other RNA
  modified_base 1: mod_base = OTHER; note = 2'-O-methyluridine-3'-phosphorothioate
  modified_base 2: mod_base = OTHER; note = 2'-O-methylguanosine-3'-phosphorothioate
  modified_base 3: mod_base = OTHER; note = 2'-O-methylguanosine-3'-phosphate
  modified_base 4: mod_base = OTHER; note = 2'-O-methylguanosine-3'-phosphate
  modified_base 5: mod_base = OTHER; note = 2'-O-methyladenosine-3'-phosphate
  modified_base 6: mod_base = OTHER; note = 2'-O-methyluridine-3'-phosphate
  modified_base 7: mod_base = OTHER; note = 2'-deoxy-2'-fluorocytidine-3'-phosphate
  modified_base 8: mod_base = OTHER; note = 2'-O-methyluridine-3'-phosphate
  modified_base 9: mod_base = OTHER; note = 2'-deoxy-2'-fluorouridine-3'-phosphate
  modified_base 10: mod_base = OTHER; note = 2'-deoxy-2'-fluoroguanosine-3'-phosphate
  modified_base 11: mod_base = OTHER; note = 2'-deoxy-2'-fluoroguanosine-3'-phosphate
  modified_base 12: mod_base = OTHER; note = 2'-O-methyluridine-3'-phosphate
  modified_base 13: mod_base = OTHER; note = 2'-O-methylguanosine-3'-phosphate
  modified_base 14: mod_base = OTHER; note = 2'-O-methyluridine-3'-phosphate
  modified_base 15: mod_base = OTHER; note = 2'-O-methylcytidine-3'-phosphate
  modified_base 16: mod_base = OTHER; note = 2'-O-methylguanosine-3'-phosphate
  modified_base 17: mod_base = OTHER; note = 2'-O-methyladenosine-3'-phosphate
  modified_base 18: mod_base = OTHER; note = 2'-O-methyladenosine-3'-phosphate
  modified_base 19: mod_base = OTHER; note = 2'-O-methyluridine-3'-phosphate
  modified_base 20: mod_base = OTHER; note = 2'-O-methylcytidine-3'-phosphate
  modified_base 21: mod_base = OTHER; note = 2'-O-methyladenosine-3'-phosphate ((2S,4R)-1-[29-[[2-(acetylamino)-2-deoxy-beta-D-galactopyra nosyl]oxy]-14,14-bis[[3-[[3-[[5-[[2-(acetylamino)-2-deoxy-b eta-D-galactopyranosyl]oxy]-1-oxopentyl]amino]propyl]amino] -3-oxopropoxy]methyl]-1,12,19,25-tetraoxo-16-oxa-13,20,24-t riazanonacos-1-yl]-4-hydroxy-2-pyrrolidinyl)methyl ester
tgggatcttggtgtcgaatca

SEQ ID NO: 2271 - RNA, 23 nt, synthetic construct
  source 1..23: mol_type = other RNA
  modified_base 1: mod_base = OTHER; note = 2'-O-methyluridine-3'-phosphorothioate
  modified_base 2: mod_base = OTHER; note = 2'-deoxy-2'-fluoroguanosine-3'-phosphorothioate
  modified_base 3: mod_base = OTHER; note = 2'-O-methyladenosine-3'-phosphate
  modified_base 4: mod_base = OTHER; note = 2'-O-methyluridine-3'-phosphate
  modified_base 5: mod_base = OTHER; note = 2'-O-methyluridine-3'-phosphate
  modified_base 6: mod_base = OTHER; note = 2'-deoxy-2'-fluorocytidine-3'-phosphate
  modified_base 7: mod_base = OTHER; note = 2'-O-methylguanosine-3'-phosphate
  modified_base 8: mod_base = OTHER; note = 2'-deoxy-2'-fluoroadenosine-3'-phosphate
  modified_base 9: mod_base = OTHER; note = 2'-deoxy-2'-fluorocytidine-3'-phosphate
  modified_base 10: mod_base = OTHER; note = 2'-O-methyladenosine-3'-phosphate
  modified_base 11: mod_base = OTHER; note = 2'-O-methylcytidine-3'-phosphate
  modified_base 12: mod_base = OTHER; note = 2'-O-methylcytidine-3'-phosphate
  modified_base 13: mod_base = OTHER; note = 2'-O-methyladenosine-3'-phosphate
  modified_base 14: mod_base = OTHER; note = 2'-deoxy-2'-fluoroadenosine-3'-phosphate
  modified_base 15: mod_base = OTHER; note = 2'-O-methylguanosine-3'-phosphate
  modified_base 16: mod_base = OTHER; note = 2'-deoxy-2'-fluoroadenosine-3'-phosphate
  modified_base 17: mod_base = OTHER; note = 2'-O-methyluridine-3'-phosphate
  modified_base 18: mod_base = OTHER; note = 2'-O-methylcytidine-3'-phosphate
  modified_base 19: mod_base = OTHER; note = 2'-O-methylcytidine-3'-phosphate
  modified_base 20: mod_base = OTHER; note = 2'-O-methylcytidine-3'-phosphate
  modified_base 21: mod_base = OTHER; note = 2'-O-methyladenosine-3'-phosphorothioate
  modified_base 22: mod_base = OTHER; note = 2'-O-methyluridine-3'-phosphorothioate
  modified_base 23: mod_base = OTHER; note = 2'-O-methyluridine
tgattcgacaccaagatcccatt

SEQ ID NO: 2272 - RNA, 21 nt, synthetic construct
  source 1..21: mol_type = other RNA
  modified_base 1: mod_base = OTHER; note = 2'-O-methyladenosine-3'-phosphorothioate
  modified_base 2: mod_base = OTHER; note = 2'-O-methyluridine-3'-phosphorothioate
  modified_base 3: mod_base = OTHER; note = 2'-O-methylguanosine-3'-phosphate
  modified_base 4: mod_base = OTHER; note = 2'-O-methylguanosine-3'-phosphate
  modified_base 5: mod_base = OTHER; note = 2'-O-methylguanosine-3'-phosphate
  modified_base 6: mod_base = OTHER; note = 2'-O-methyladenosine-3'-phosphate
  modified_base 7: mod_base = OTHER; note = 2'-deoxy-2'-fluorouridine-3'-phosphate
  modified_base 8: mod_base = OTHER; note = 2'-O-methylcytidine-3'-phosphate
  modified_base 9: mod_base = OTHER; note = 2'-deoxy-2'-fluorouridine-3'-phosphate
  modified_base 10: mod_base = OTHER; note = 2'-deoxy-2'-fluorouridine-3'-phosphate
  modified_base 11: mod_base = OTHER; note = 2'-deoxy-2'-fluoroguanosine-3'-phosphate
  modified_base 12: mod_base = OTHER; note = 2'-O-methylguanosine-3'-phosphate
  modified_base 13: mod_base = OTHER; note = 2'-O-methyluridine-3'-phosphate
  modified_base 14: mod_base = OTHER; note = 2'-O-methylguanosine-3'-phosphate
  modified_base 15: mod_base = OTHER; note = 2'-O-methyluridine-3'-phosphate
  modified_base 16: mod_base = OTHER; note = 2'-O-methylcytidine-3'-phosphate
  modified_base 17: mod_base = OTHER; note = 2'-O-methylguanosine-3'-phosphate
  modified_base 18: mod_base = OTHER; note = 2'-O-methyladenosine-3'-phosphate
  modified_base 19: mod_base = OTHER; note = 2'-O-methyladenosine-3'-phosphate
  modified_base 20: mod_base = OTHER; note = 2'-O-methyluridine-3'-phosphate
  modified_base 21: mod_base = OTHER; note = 2'-O-methylcytidine-3'-phosphate ((2S,4R)-1-[29-[[2-(acetylamino)-2-deoxy-beta-D-galactopyra nosyl]oxy]-14,14-bis[[3-[[3-[[5-[[2-(acetylamino)-2-deoxy-b eta-D-galactopyranosyl]oxy]-1-oxopentyl]amino]propyl]amino] -3-oxopropoxy]methyl]-1,12,19,25-tetraoxo-16-oxa-13,20,24-t riazanonacos-1-yl]-4-hydroxy-2-pyrrolidinyl)methyl ester
atgggatcttggtgtcgaatc

SEQ ID NO: 2273 - RNA, 23 nt, synthetic construct
  source 1..23: mol_type = other RNA
  modified_base 1: mod_base = OTHER; note = 2'-O-methylguanosine-3'-phosphorothioate
  modified_base 2: mod_base = OTHER; note = 2'-deoxy-2'-fluoroadenosine-3'-phosphorothioate
  modified_base 3: mod_base = OTHER; note = 2'-O-methyluridine-3'-phosphate
  modified_base 4: mod_base = OTHER; note = 2'-O-methyluridine-3'-phosphate
  modified_base 5: mod_base = OTHER; note = 2'-O-methylcytidine-3'-phosphate
  modified_base 6: mod_base = OTHER; note = 2'-deoxy-2'-fluoroguanosine-3'-phosphate
  modified_base 7: mod_base = OTHER; note = 2'-O-methyladenosine-3'-phosphate
  modified_base 8: mod_base = OTHER; note = 2'-deoxy-2'-fluorocytidine-3'-phosphate
  modified_base 9: mod_base = OTHER; note = 2'-deoxy-2'-fluoroadenosine-3'-phosphate
  modified_base 10: mod_base = OTHER; note = 2'-O-methylcytidine-3'-phosphate
  modified_base 11: mod_base = OTHER; note = 2'-O-methylcytidine-3'-phosphate
  modified_base 12: mod_base = OTHER; note = 2'-O-methyladenosine-3'-phosphate
  modified_base 13: mod_base = OTHER; note = 2'-O-methyladenosine-3'-phosphate
  modified_base 14: mod_base = OTHER; note = 2'-deoxy-2'-fluoroguanosine-3'-phosphate
  modified_base 15: mod_base = OTHER; note = 2'-O-methyladenosine-3'-phosphate
  modified_base 16: mod_base = OTHER; note = 2'-deoxy-2'-fluorouridine-3'-phosphate
  modified_base 17: mod_base = OTHER; note = 2'-O-methylcytidine-3'-phosphate
  modified_base 18: mod_base = OTHER; note = 2'-O-methylcytidine-3'-phosphate
  modified_base 19: mod_base = OTHER; note = 2'-O-methylcytidine-3'-phosphate
  modified_base 20: mod_base = OTHER; note = 2'-O-methyladenosine-3'-phosphate
  modified_base 21: mod_base = OTHER; note = 2'-O-methyluridine-3'-phosphorothioate
  modified_base 22: mod_base = OTHER; note = 2'-O-methyluridine-3'-phosphorothioate
  modified_base 23: mod_base = OTHER; note = 2'-O-methylcytidine
gattcgacaccaagatcccattc

SEQ ID NO: 2274 - RNA, 21 nt, synthetic construct
  source 1..21: mol_type = other RNA
  modified_base 1: mod_base = OTHER; note = 2'-O-methylguanosine-3'-phosphorothioate
  modified_base 2: mod_base = OTHER; note = 2'-O-methylcytidine-3'-phosphorothioate
  modified_base 3: mod_base = OTHER; note = 2'-O-methyluridine-3'-phosphate
  modified_base 4: mod_base = OTHER; note = 2'-O-methyladenosine-3'-phosphate
  modified_base 5: mod_base = OTHER; note = 2'-O-methylcytidine-3'-phosphate
  modified_base 6: mod_base = OTHER; note = 2'-O-methyladenosine-3'-phosphate
  modified_base 7: mod_base = OTHER; note = 2'-deoxy-2'-fluoroadenosine-3'-phosphate
  modified_base 8: mod_base = OTHER; note = 2'-O-methylguanosine-3'-phosphate
  modified_base 9: mod_base = OTHER; note = 2'-deoxy-2'-fluoroguanosine-3'-phosphate
  modified_base 10: mod_base = OTHER; note = 2'-deoxy-2'-fluorocytidine-3'-phosphate
  modified_base 11: mod_base = OTHER; note = 2'-deoxy-2'-fluorocytidine-3'-phosphate
  modified_base 12: mod_base = OTHER; note = 2'-O-methyladenosine-3'-phosphate
  modified_base 13: mod_base = OTHER; note = 2'-O-methyluridine-3'-phosphate
  modified_base 14: mod_base = OTHER; note = 2'-O-methyladenosine-3'-phosphate
  modified_base 15: mod_base = OTHER; note = 2'-O-methyluridine-3'-phosphate
  modified_base 16: mod_base = OTHER; note = 2'-O-methyluridine-3'-phosphate
  modified_base 17: mod_base = OTHER; note = 2'-O-methyluridine-3'-phosphate
  modified_base 18: mod_base = OTHER; note = 2'-O-methylguanosine-3'-phosphate
  modified_base 19: mod_base = OTHER; note = 2'-O-methyluridine-3'-phosphate
  modified_base 20: mod_base = OTHER; note = 2'-O-methylguanosine-3'-phosphate
  modified_base 21: mod_base = OTHER; note = 2'-O-methyladenosine-3'-phosphate ((2S,4R)-1-[29-[[2-(acetylamino)-2-deoxy-beta-D-galactopyra nosyl]oxy]-14,14-bis[[3-[[3-[[5-[[2-(acetylamino)-2-deoxy-b eta-D-galactopyranosyl]oxy]-1-oxopentyl]amino]propyl]amino] -3-oxopropoxy]methyl]-1,12,19,25-tetraoxo-16-oxa-13,20,24-t riazanonacos-1-yl]-4-hydroxy-2-pyrrolidinyl)methyl ester
gctacaaggccatatttgtga

SEQ ID NO: 2275 - RNA, 23 nt, synthetic construct
  source 1..23: mol_type = other RNA
  modified_base 1: mod_base = OTHER; note = 2'-O-methyluridine-3'-phosphorothioate
  modified_base 2: mod_base = OTHER; note = 2'-deoxy-2'-fluorocytidine-3'-phosphorothioate
  modified_base 3: mod_base = OTHER; note = 2'-O-methyladenosine-3'-phosphate
  modified_base 4: mod_base = OTHER; note = 2'-O-methylcytidine-3'-phosphate
  modified_base 5: mod_base = OTHER; note = 2'-O-methyladenosine-3'-phosphate
  modified_base 6: mod_base = OTHER; note = 2'-deoxy-2'-fluoroadenosine-3'-phosphate
  modified_base 7: mod_base = OTHER; note = 2'-O-methyladenosine-3'-phosphate
  modified_base 8: mod_base = OTHER; note = 2'-deoxy-2'-fluorouridine-3'-phosphate
  modified_base 9: mod_base = OTHER; note = 2'-deoxy-2'-fluoroadenosine-3'-phosphate
  modified_base 10: mod_base = OTHER; note = 2'-O-methyluridine-3'-phosphate
  modified_base 11: mod_base = OTHER; note = 2'-O-methylguanosine-3'-phosphate
  modified_base 12: mod_base = OTHER; note = 2'-O-methylguanosine-3'-phosphate
  modified_base 13: mod_base = OTHER; note = 2'-O-methylcytidine-3'-phosphate
  modified_base 14: mod_base = OTHER; note = 2'-deoxy-2'-fluorocytidine-3'-phosphate
  modified_base 15: mod_base = OTHER; note = 2'-O-methyluridine-3'-phosphate
  modified_base 16: mod_base = OTHER; note = 2'-deoxy-2'-fluorouridine-3'-phosphate
  modified_base 17: mod_base = OTHER; note = 2'-O-methylguanosine-3'-phosphate
  modified_base 18: mod_base = OTHER; note = 2'-O-methyluridine-3'-phosphate
  modified_base 19: mod_base = OTHER; note = 2'-O-methyladenosine-3'-phosphate
  modified_base 20: mod_base = OTHER; note = 2'-O-methylguanosine-3'-phosphate
  modified_base 21: mod_base = OTHER; note = 2'-O-methylcytidine-3'-phosphorothioate
  modified_base 22: mod_base = OTHER; note = 2'-O-methylcytidine-3'-phosphorothioate
  modified_base 23: mod_base = OTHER; note = 2'-O-methylcytidine
tcacaaatatggccttgtagccc

SEQ ID NO: 2276 - RNA, 21 nt, synthetic construct
  source 1..21: mol_type = other RNA
  modified_base 1: mod_base = OTHER; note = 2'-O-methylcytidine-3'-phosphorothioate
  modified_base 2: mod_base = OTHER; note = 2'-O-methyluridine-3'-phosphorothioate
  modified_base 3: mod_base = OTHER; note = 2'-O-methyladenosine-3'-phosphate
  modified_base 4: mod_base = OTHER; note = 2'-O-methylcytidine-3'-phosphate
  modified_base 5: mod_base = OTHER; note = 2'-O-methyladenosine-3'-phosphate
  modified_base 6: mod_base = OTHER; note = 2'-O-methyladenosine-3'-phosphate
  modified_base 7: mod_base = OTHER; note = 2'-deoxy-2'-fluoroguanosine-3'-phosphate
  modified_base 8: mod_base = OTHER; note = 2'-O-methylguanosine-3'-phosphate
  modified_base 9: mod_base = OTHER; note = 2'-deoxy-2'-fluorocytidine-3'-phosphate
  modified_base 10: mod_base = OTHER; note = 2'-deoxy-2'-fluorocytidine-3'-phosphate
  modified_base 11: mod_base = OTHER; note = 2'-deoxy-2'-fluoroadenosine-3'-phosphate
  modified_base 12: mod_base = OTHER; note = 2'-O-methyluridine-3'-phosphate
  modified_base 13: mod_base = OTHER; note = 2'-O-methyladenosine-3'-phosphate
  modified_base 14: mod_base = OTHER; note = 2'-O-methyluridine-3'-phosphate
  modified_base 15: mod_base = OTHER; note = 2'-O-methyluridine-3'-phosphate
  modified_base 16: mod_base = OTHER; note = 2'-O-methyluridine-3'-phosphate
  modified_base 17: mod_base = OTHER; note = 2'-O-methylguanosine-3'-phosphate
  modified_base 18: mod_base = OTHER; note = 2'-O-methyluridine-3'-phosphate
  modified_base 19: mod_base = OTHER; note = 2'-O-methylguanosine-3'-phosphate
  modified_base 20: mod_base = OTHER; note = 2'-O-methyladenosine-3'-phosphate
  modified_base 21: mod_base = OTHER; note = 2'-O-methylcytidine-3'-phosphate ((2S,4R)-1-[29-[[2-(acetylamino)-2-deoxy-beta-D-galactopyra nosyl]oxy]-14,14-bis[[3-[[3-[[5-[[2-(acetylamino)-2-deoxy-b eta-D-galactopyranosyl]oxy]-1-oxopentyl]amino]propyl]amino] -3-oxopropoxy]methyl]-1,12,19,25-tetraoxo-16-oxa-13,20,24-t riazanonacos-1-yl]-4-hydroxy-2-pyrrolidinyl)methyl ester
ctacaaggccatatttgtgac

SEQ ID NO: 2277 - RNA, 23 nt, synthetic construct
  source 1..23: mol_type = other RNA
  modified_base 1: mod_base = OTHER; note = 2'-O-methylguanosine-3'-phosphorothioate
  modified_base 2: mod_base = OTHER; note = 2'-deoxy-2'-fluorouridine-3'-phosphorothioate
  modified_base 3: mod_base = OTHER; note = 2'-O-methylcytidine-3'-phosphate
  modified_base 4: mod_base = OTHER; note = 2'-O-methyladenosine-3'-phosphate
  modified_base 5: mod_base = OTHER; note = 2'-O-methylcytidine-3'-phosphate
  modified_base 6: mod_base = OTHER; note = 2'-deoxy-2'-fluoroadenosine-3'-phosphate
  modified_base 7: mod_base = OTHER; note = 2'-O-methyladenosine-3'-phosphate
  modified_base 8: mod_base = OTHER; note = 2'-deoxy-2'-fluoroadenosine-3'-phosphate
  modified_base 9: mod_base = OTHER; note = 2'-deoxy-2'-fluorouridine-3'-phosphate
  modified_base 10: mod_base = OTHER; note = 2'-O-methyladenosine-3'-phosphate
  modified_base 11: mod_base = OTHER; note = 2'-O-methyluridine-3'-phosphate
  modified_base 12: mod_base = OTHER; note = 2'-O-methylguanosine-3'-phosphate
  modified_base 13: mod_base = OTHER; note = 2'-O-methylguanosine-3'-phosphate
  modified_base 14: mod_base = OTHER; note = 2'-deoxy-2'-fluorocytidine-3'-phosphate
  modified_base 15: mod_base = OTHER; note = 2'-O-methylcytidine-3'-phosphate
  modified_base 16: mod_base = OTHER; note = 2'-deoxy-2'-fluorouridine-3'-phosphate
  modified_base 17: mod_base = OTHER; note = 2'-O-methyluridine-3'-phosphate
  modified_base 18: mod_base = OTHER; note = 2'-O-methylguanosine-3'-phosphate
  modified_base 19: mod_base = OTHER; note = 2'-O-methyluridine-3'-phosphate
  modified_base 20: mod_base = OTHER; note = 2'-O-methyladenosine-3'-phosphate
  modified_base 21: mod_base = OTHER; note = 2'-O-methylguanosine-3'-phosphorothioate
  modified_base 22: mod_base = OTHER; note = 2'-O-methylcytidine-3'-phosphorothioate
  modified_base 23: mod_base = OTHER; note = 2'-O-methylcytidine
gtcacaaatatggccttgtagcc

SEQ ID NO: 2278 - RNA, 21 nt, synthetic construct
  source 1..21: mol_type = other RNA
  modified_base 1: mod_base = OTHER; note = 2'-O-methyladenosine-3'-phosphorothioate
  modified_base 2: mod_base = OTHER; note = 2'-O-methyluridine-3'-phosphorothioate
  modified_base 3: mod_base = OTHER; note = 2'-O-methylguanosine-3'-phosphate
  modified_base 4: mod_base = OTHER; note = 2'-O-methylguanosine-3'-phosphate
  modified_base 5: mod_base = OTHER; note = 2'-O-methylguanosine-3'-phosphate
  modified_base 6: mod_base = OTHER; note = 2'-O-methylcytidine-3'-phosphate
  modified_base 7: mod_base = OTHER; note = 2'-deoxy-2'-fluorouridine-3'-phosphate
  modified_base 8: mod_base = OTHER; note = 2'-O-methyladenosine-3'-phosphate
  modified_base 9: mod_base = OTHER; note = 2'-deoxy-2'-fluorocytidine-3'-phosphate
  modified_base 10: mod_base = OTHER; note = 2'-deoxy-2'-fluoroadenosine-3'-phosphate
  modified_base 11: mod_base = OTHER; note = 2'-deoxy-2'-fluoroadenosine-3'-phosphate
  modified_base 12: mod_base = OTHER; note = 2'-O-methylguanosine-3'-phosphate
  modified_base 13: mod_base = OTHER; note = 2'-O-methylguanosine-3'-phosphate
  modified_base 14: mod_base = OTHER; note = 2'-O-methylcytidine-3'-phosphate
  modified_base 15: mod_base = OTHER; note = 2'-O-methylcytidine-3'-phosphate
  modified_base 16: mod_base = OTHER; note = 2'-O-methyladenosine-3'-phosphate
  modified_base 17: mod_base = OTHER; note = 2'-O-methyluridine-3'-phosphate
  modified_base 18: mod_base = OTHER; note = 2'-O-methyladenosine-3'-phosphate
  modified_base 19: mod_base = OTHER; note = 2'-O-methyluridine-3'-phosphate
  modified_base 20: mod_base = OTHER; note = 2'-O-methyluridine-3'-phosphate
  modified_base 21: mod_base = OTHER; note = 2'-O-methyluridine-3'-phosphate ((2S,4R)-1-[29-[[2-(acetylamino)-2-deoxy-beta-D-galactopyra nosyl]oxy]-14,14-bis[[3-[[3-[[5-[[2-(acetylamino)-2-deoxy-b eta-D-galactopyranosyl]oxy]-1-oxopentyl]amino]propyl]amino] -3-oxopropoxy]methyl]-1,12,19,25-tetraoxo-16-oxa-13,20,24-t riazanonacos-1-yl]-4-hydroxy-2-pyrrolidinyl)methyl ester
atgggctacaaggccatattt

SEQ ID NO: 2279 - RNA, 23 nt, synthetic construct
  source 1..23: mol_type = other RNA
  modified_base 1: mod_base = OTHER; note = 2'-O-methyladenosine-3'-phosphorothioate
  modified_base 2: mod_base = OTHER; note = 2'-deoxy-2'-fluoroadenosine-3'-phosphorothioate
  modified_base 3: mod_base = OTHER; note = 2'-O-methyladenosine-3'-phosphate
  modified_base 4: mod_base = OTHER; note = 2'-O-methyluridine-3'-phosphate
  modified_base 5: mod_base = OTHER; note = 2'-O-methyladenosine-3'-phosphate
  modified_base 6: mod_base = OTHER; note = 2'-deoxy-2'-fluorouridine-3'-phosphate
  modified_base 7: mod_base = OTHER; note = 2'-O-methylguanosine-3'-phosphate
  modified_base 8: mod_base = OTHER; note = 2'-deoxy-2'-fluoroguanosine-3'-phosphate
  modified_base 9: mod_base = OTHER; note = 2'-deoxy-2'-fluorocytidine-3'-phosphate
  modified_base 10: mod_base = OTHER; note = 2'-O-methylcytidine-3'-phosphate
  modified_base 11: mod_base = OTHER; note = 2'-O-methyluridine-3'-phosphate
  modified_base 12: mod_base = OTHER; note = 2'-O-methyluridine-3'-phosphate
  modified_base 13: mod_base = OTHER; note = 2'-O-methylguanosine-3'-phosphate
  modified_base 14: mod_base = OTHER; note = 2'-deoxy-2'-fluorouridine-3'-phosphate
  modified_base 15: mod_base = OTHER; note = 2'-O-methyladenosine-3'-phosphate
  modified_base 16: mod_base = OTHER; note = 2'-deoxy-2'-fluoroguanosine-3'-phosphate
  modified_base 17: mod_base = OTHER; note = 2'-O-methylcytidine-3'-phosphate
  modified_base 18: mod_base = OTHER; note = 2'-O-methylcytidine-3'-phosphate
  modified_base 19: mod_base = OTHER; note = 2'-O-methylcytidine-3'-phosphate
  modified_base 20: mod_base = OTHER; note = 2'-O-methyladenosine-3'-phosphate
  modified_base 21: mod_base = OTHER; note = 2'-O-methyluridine-3'-phosphorothioate
  modified_base 22: mod_base = OTHER; note = 2'-O-methylcytidine-3'-phosphorothioate
  modified_base 23: mod_base = OTHER; note = 2'-O-methyluridine
aaatatggccttgtagcccatct

SEQ ID NO: 2280 - RNA, 21 nt, synthetic construct
  source 1..21: mol_type = other RNA
  modified_base 1: mod_base = OTHER; note = 2'-O-methylguanosine-3'-phosphorothioate
  modified_base 2: mod_base = OTHER; note = 2'-O-methyladenosine-3'-phosphorothioate
  modified_base 3: mod_base = OTHER; note = 2'-O-methyluridine-3'-phosphate
  modified_base 4: mod_base = OTHER; note = 2'-O-methylguanosine-3'-phosphate
  modified_base 5: mod_base = OTHER; note = 2'-O-methylguanosine-3'-phosphate
  modified_base 6: mod_base = OTHER; note = 2'-O-methylguanosine-3'-phosphate
  modified_base 7: mod_base = OTHER; note = 2'-deoxy-2'-fluorocytidine-3'-phosphate
  modified_base 8: mod_base = OTHER; note = 2'-O-methyluridine-3'-phosphate
  modified_base 9: mod_base = OTHER; note = 2'-deoxy-2'-fluoroadenosine-3'-phosphate
  modified_base 10: mod_base = OTHER; note = 2'-deoxy-2'-fluorocytidine-3'-phosphate
  modified_base 11: mod_base = OTHER; note = 2'-deoxy-2'-fluoroadenosine-3'-phosphate
  modified_base 12: mod_base = OTHER; note = 2'-O-methyladenosine-3'-phosphate
  modified_base 13: mod_base = OTHER; note = 2'-O-methylguanosine-3'-phosphate
  modified_base 14: mod_base = OTHER; note = 2'-O-methylguanosine-3'-phosphate
  modified_base 15: mod_base = OTHER; note = 2'-O-methylcytidine-3'-phosphate
  modified_base 16: mod_base = OTHER; note = 2'-O-methylcytidine-3'-phosphate
  modified_base 17: mod_base = OTHER; note = 2'-O-methyladenosine-3'-phosphate
  modified_base 18: mod_base = OTHER; note = 2'-O-methyluridine-3'-phosphate
  modified_base 19: mod_base = OTHER; note = 2'-O-methyladenosine-3'-phosphate
  modified_base 20: mod_base = OTHER; note = 2'-O-methyluridine-3'-phosphate
  modified_base 21: mod_base = OTHER; note = 2'-O-methyluridine-3'-phosphate ((2S,4R)-1-[29-[[2-(acetylamino)-2-deoxy-beta-D-galactopyra nosyl]oxy]-14,14-bis[[3-[[3-[[5-[[2-(acetylamino)-2-deoxy-b eta-D-galactopyranosyl]oxy]-1-oxopentyl]amino]propyl]amino] -3-oxopropoxy]methyl]-1,12,19,25-tetraoxo-16-oxa-13,20,24-t riazanonacos-1-yl]-4-hydroxy-2-pyrrolidinyl)methyl ester
gatgggctacaaggccatatt

SEQ ID NO: 2281 - RNA, 23 nt, synthetic construct
  source 1..23: mol_type = other RNA
  modified_base 1: mod_base = OTHER; note = 2'-O-methyladenosine-3'-phosphorothioate
  modified_base 2: mod_base = OTHER; note = 2'-deoxy-2'-fluoroadenosine-3'-phosphorothioate
  modified_base 3: mod_base = OTHER; note = 2'-O-methyluridine-3'-phosphate
  modified_base 4: mod_base = OTHER; note = 2'-O-methyladenosine-3'-phosphate
  modified_base 5: mod_base = OTHER; note = 2'-O-methyluridine-3'-phosphate
  modified_base 6: mod_base = OTHER; note = 2'-deoxy-2'-fluoroguanosine-3'-phosphate
  modified_base 7: mod_base = OTHER; note = 2'-O-methylguanosine-3'-phosphate
  modified_base 8: mod_base = OTHER; note = 2'-deoxy-2'-fluorocytidine-3'-phosphate
  modified_base 9: mod_base = OTHER; note = 2'-deoxy-2'-fluorocytidine-3'-phosphate
  modified_base 10: mod_base = OTHER; note = 2'-O-methyluridine-3'-phosphate
  modified_base 11: mod_base = OTHER; note = 2'-O-methyluridine-3'-phosphate
  modified_base 12: mod_base = OTHER; note = 2'-O-methylguanosine-3'-phosphate
  modified_base 13: mod_base = OTHER; note = 2'-O-methyluridine-3'-phosphate
  modified_base 14: mod_base = OTHER; note = 2'-deoxy-2'-fluoroadenosine-3'-phosphate
  modified_base 15: mod_base = OTHER; note = 2'-O-methylguanosine-3'-phosphate
  modified_base 16: mod_base = OTHER; note = 2'-deoxy-2'-fluorocytidine-3'-phosphate
  modified_base 17: mod_base = OTHER; note = 2'-O-methylcytidine-3'-phosphate
  modified_base 18: mod_base = OTHER; note = 2'-O-methylcytidine-3'-phosphate
  modified_base 19: mod_base = OTHER; note = 2'-O-methyladenosine-3'-phosphate
  modified_base 20: mod_base = OTHER; note = 2'-O-methyluridine-3'-phosphate
  modified_base 21: mod_base = OTHER; note = 2'-O-methylcytidine-3'-phosphorothioate
  modified_base 22: mod_base = OTHER; note = 2'-O-methyluridine-3'-phosphorothioate
  modified_base 23: mod_base = OTHER; note = 2'-O-methyluridine
aatatggccttgtagcccatctt

SEQ ID NO: 2282 - RNA, 21 nt, synthetic construct
  source 1..21: mol_type = other RNA
  modified_base 1: mod_base = OTHER; note = 2'-O-methyladenosine-3'-phosphorothioate
  modified_base 2: mod_base = OTHER; note = 2'-O-methylcytidine-3'-phosphorothioate
  modified_base 3: mod_base = OTHER; note = 2'-O-methyluridine-3'-phosphate
  modified_base 4: mod_base = OTHER; note = 2'-O-methylguanosine-3'-phosphate
  modified_base 5: mod_base = OTHER; note = 2'-O-methylguanosine-3'-phosphate
  modified_base 6: mod_base = OTHER; note = 2'-O-methyladenosine-3'-phosphate
  modified_base 7: mod_base = OTHER; note = 2'-deoxy-2'-fluoroguanosine-3'-phosphate
  modified_base 8: mod_base = OTHER; note = 2'-O-methyladenosine-3'-phosphate
  modified_base 9: mod_base = OTHER; note = 2'-deoxy-2'-fluoroguanosine-3'-phosphate
  modified_base 10: mod_base = OTHER; note = 2'-deoxy-2'-fluoroadenosine-3'-phosphate
  modified_base 11: mod_base = OTHER; note = 2'-deoxy-2'-fluoroadenosine-3'-phosphate
  modified_base 12: mod_base = OTHER; note = 2'-O-methyluridine-3'-phosphate
  modified_base 13: mod_base = OTHER; note = 2'-O-methyluridine-3'-phosphate
  modified_base 14: mod_base = OTHER; note = 2'-O-methylguanosine-3'-phosphate
  modified_base 15: mod_base = OTHER; note = 2'-O-methylguanosine-3'-phosphate
  modified_base 16: mod_base = OTHER; note = 2'-O-methyladenosine-3'-phosphate
  modified_base 17: mod_base = OTHER; note = 2'-O-methyladenosine-3'-phosphate
  modified_base 18: mod_base = OTHER; note = 2'-O-methyluridine-3'-phosphate
  modified_base 19: mod_base = OTHER; note = 2'-O-methylguanosine-3'-phosphate
  modified_base 20: mod_base = OTHER; note = 2'-O-methylguanosine-3'-phosphate
  modified_base 21: mod_base = OTHER; note = 2'-O-methylguanosine-3'-phosphate ((2S,4R)-1-[29-[[2-(acetylamino)-2-deoxy-beta-D-galactopyra nosyl]oxy]-14,14-bis[[3-[[3-[[5-[[2-(acetylamino)-2-deoxy-b eta-D-galactopyranosyl]oxy]-1-oxopentyl]amino]propyl]amino] -3-oxopropoxy]methyl]-1,12,19,25-tetraoxo-16-oxa-13,20,24-t riazanonacos-1-yl]-4-hydroxy-2-pyrrolidinyl)methyl ester
actggagagaattggaatggg

SEQ ID NO: 2283 - RNA, 23 nt, synthetic construct
  source 1..23: mol_type = other RNA
  modified_base 1: mod_base = OTHER; note = 2'-O-methylcytidine-3'-phosphorothioate
  modified_base 2: mod_base = OTHER; note = 2'-deoxy-2'-fluorocytidine-3'-phosphorothioate
  modified_base 3: mod_base = OTHER; note = 2'-O-methylcytidine-3'-phosphate
  modified_base 4: mod_base = OTHER; note = 2'-O-methyladenosine-3'-phosphate
  modified_base 5: mod_base = OTHER; note = 2'-O-methyluridine-3'-phosphate
  modified_base 6: mod_base = OTHER; note = 2'-deoxy-2'-fluorouridine-3'-phosphate
  modified_base 7: mod_base = OTHER; note = 2'-O-methylcytidine-3'-phosphate
  modified_base 8: mod_base = OTHER; note = 2'-deoxy-2'-fluorocytidine-3'-phosphate
  modified_base 9: mod_base = OTHER; note = 2'-deoxy-2'-fluoroadenosine-3'-phosphate
  modified_base 10: mod_base = OTHER; note = 2'-O-methyladenosine-3'-phosphate
  modified_base 11: mod_base = OTHER; note = 2'-O-methyluridine-3'-phosphate
  modified_base 12: mod_base = OTHER; note = 2'-O-methyluridine-3'-phosphate
  modified_base 13: mod_base = OTHER; note = 2'-O-methylcytidine-3'-phosphate
  modified_base 14: mod_base = OTHER; note = 2'-deoxy-2'-fluorouridine-3'-phosphate
  modified_base 15: mod_base = OTHER; note = 2'-O-methylcytidine-3'-phosphate
  modified_base 16: mod_base = OTHER; note = 2'-deoxy-2'-fluorouridine-3'-phosphate
  modified_base 17: mod_base = OTHER; note = 2'-O-methylcytidine-3'-phosphate
  modified_base 18: mod_base = OTHER; note = 2'-O-methylcytidine-3'-phosphate
  modified_base 19: mod_base = OTHER; note = 2'-O-methyladenosine-3'-phosphate
  modified_base 20: mod_base = OTHER; note = 2'-O-methylguanosine-3'-phosphate
  modified_base 21: mod_base = OTHER; note = 2'-O-methyluridine-3'-phosphorothioate
  modified_base 22: mod_base = OTHER; note = 2'-O-methylguanosine-3'-phosphorothioate
  modified_base 23: mod_base = OTHER; note = 2'-O-methylcytidine
cccattccaattctctccagtgc

SEQ ID NO: 2284 - RNA, 21 nt, synthetic construct
  source 1..21: mol_type = other RNA
  modified_base 1: mod_base = OTHER; note = 2'-O-methylcytidine-3'-phosphorothioate
  modified_base 2: mod_base = OTHER; note = 2'-O-methyluridine-3'-phosphorothioate
  modified_base 3: mod_base = OTHER; note = 2'-O-methylguanosine-3'-phosphate
  modified_base 4: mod_base = OTHER; note = 2'-O-methylguanosine-3'-phosphate
  modified_base 5: mod_base = OTHER; note = 2'-O-methyladenosine-3'-phosphate
  modified_base 6: mod_base = OTHER; note = 2'-O-methylguanosine-3'-phosphate
  modified_base 7: mod_base = OTHER; note = 2'-deoxy-2'-fluoroadenosine-3'-phosphate
  modified_base 8: mod_base = OTHER; note = 2'-O-methylguanosine-3'-phosphate
  modified_base 9: mod_base = OTHER; note = 2'-deoxy-2'-fluoroadenosine-3'-phosphate
  modified_base 10: mod_base = OTHER; note = 2'-deoxy-2'-fluoroadenosine-3'-phosphate
  modified_base 11: mod_base = OTHER; note = 2'-deoxy-2'-fluorouridine-3'-phosphate
  modified_base 12: mod_base = OTHER; note = 2'-O-methyluridine-3'-phosphate
  modified_base 13: mod_base = OTHER; note = 2'-O-methylguanosine-3'-phosphate
  modified_base 14: mod_base = OTHER; note = 2'-O-methylguanosine-3'-phosphate
  modified_base 15: mod_base = OTHER; note = 2'-O-methyladenosine-3'-phosphate
  modified_base 16: mod_base = OTHER; note = 2'-O-methyladenosine-3'-phosphate
  modified_base 17: mod_base = OTHER; note = 2'-O-methyluridine-3'-phosphate
  modified_base 18: mod_base = OTHER; note = 2'-O-methylguanosine-3'-phosphate
  modified_base 19: mod_base = OTHER; note = 2'-O-methylguanosine-3'-phosphate
  modified_base 20: mod_base = OTHER; note = 2'-O-methylguanosine-3'-phosphate
  modified_base 21: mod_base = OTHER; note = 2'-O-methyluridine-3'-phosphate ((2S,4R)-1-[29-[[2-(acetylamino)-2-deoxy-beta-D-galactopyra nosyl]oxy]-14,14-bis[[3-[[3-[[5-[[2-(acetylamino)-2-deoxy-b eta-D-galactopyranosyl]oxy]-1-oxopentyl]amino]propyl]amino] -3-oxopropoxy]methyl]-1,12,19,25-tetraoxo-16-oxa-13,20,24-t riazanonacos-1-yl]-4-hydroxy-2-pyrrolidinyl)methyl ester
ctggagagaattggaatgggt

SEQ ID NO: 2285 - RNA, 23 nt, synthetic construct
  source 1..23: mol_type = other RNA
  modified_base 1: mod_base = OTHER; note = 2'-O-methyladenosine-3'-phosphorothioate
  modified_base 2: mod_base = OTHER; note = 2'-deoxy-2'-fluorocytidine-3'-phosphorothioate
  modified_base 3: mod_base = OTHER; note = 2'-O-methylcytidine-3'-phosphate
  modified_base 4: mod_base = OTHER; note = 2'-O-methylcytidine-3'-phosphate
  modified_base 5: mod_base = OTHER; note = 2'-O-methyladenosine-3'-phosphate
  modified_base 6: mod_base = OTHER; note = 2'-deoxy-2'-fluorouridine-3'-phosphate
  modified_base 7: mod_base = OTHER; note = 2'-O-methyluridine-3'-phosphate
  modified_base 8: mod_base = OTHER; note = 2'-deoxy-2'-fluorocytidine-3'-phosphate
  modified_base 9: mod_base = OTHER; note = 2'-deoxy-2'-fluorocytidine-3'-phosphate
  modified_base 10: mod_base = OTHER; note = 2'-O-methyladenosine-3'-phosphate
  modified_base 11: mod_base = OTHER; note = 2'-O-methyladenosine-3'-phosphate
  modified_base 12: mod_base = OTHER; note = 2'-O-methyluridine-3'-phosphate
  modified_base 13: mod_base = OTHER; note = 2'-O-methyluridine-3'-phosphate
  modified_base 14: mod_base = OTHER; note = 2'-deoxy-2'-fluorocytidine-3'-phosphate
  modified_base 15: mod_base = OTHER; note = 2'-O-methyluridine-3'-phosphate
  modified_base 16: mod_base = OTHER; note = 2'-deoxy-2'-fluorocytidine-3'-phosphate
  modified_base 17: mod_base = OTHER; note = 2'-O-methyluridine-3'-phosphate
  modified_base 18: mod_base = OTHER; note = 2'-O-methylcytidine-3'-phosphate
  modified_base 19: mod_base = OTHER; note = 2'-O-methylcytidine-3'-phosphate
  modified_base 20: mod_base = OTHER; note = 2'-O-methyladenosine-3'-phosphate
  modified_base 21: mod_base = OTHER; note = 2'-O-methylguanosine-3'-phosphorothioate
  modified_base 22: mod_base = OTHER; note = 2'-O-methyluridine-3'-phosphorothioate
  modified_base 23: mod_base = OTHER; note = 2'-O-methylguanosine
acccattccaattctctccagtg

SEQ ID NO: 2286 - RNA, 21 nt, synthetic construct
  source 1..21: mol_type = other RNA
  modified_base 1: mod_base = OTHER; note = 2'-O-methyluridine-3'-phosphorothioate
  modified_base 2: mod_base = OTHER; note = 2'-O-methyladenosine-3'-phosphorothioate
  modified_base 3: mod_base = OTHER; note = 2'-O-methylguanosine-3'-phosphate
  modified_base 4: mod_base = OTHER; note = 2'-O-methylcytidine-3'-phosphate
  modified_base 5: mod_base = OTHER; note = 2'-O-methyladenosine-3'-phosphate
  modified_base 6: mod_base = OTHER; note = 2'-O-methylcytidine-3'-phosphate
  modified_base 7: mod_base = OTHER; note = 2'-deoxy-2'-fluorouridine-3'-phosphate
  modified_base 8: mod_base = OTHER; note = 2'-O-methylguanosine-3'-phosphate
  modified_base 9: mod_base = OTHER; note = 2'-deoxy-2'-fluoroguanosine-3'-phosphate
  modified_base 10: mod_base = OTHER; note = 2'-deoxy-2'-fluoroadenosine-3'-phosphate
  modified_base 11: mod_base = OTHER; note = 2'-deoxy-2'-fluoroguanosine-3'-phosphate
  modified_base 12: mod_base = OTHER; note = 2'-O-methyladenosine-3'-phosphate
  modified_base 13: mod_base = OTHER; note = 2'-O-methylguanosine-3'-phosphate
  modified_base 14: mod_base = OTHER; note = 2'-O-methyladenosine-3'-phosphate
  modified_base 15: mod_base = OTHER; note = 2'-O-methyladenosine-3'-phosphate
  modified_base 16: mod_base = OTHER; note = 2'-O-methyluridine-3'-phosphate
  modified_base 17: mod_base = OTHER; note = 2'-O-methyluridine-3'-phosphate
  modified_base 18: mod_base = OTHER; note = 2'-O-methylguanosine-3'-phosphate
  modified_base 19: mod_base = OTHER; note = 2'-O-methylguanosine-3'-phosphate
  modified_base 20: mod_base = OTHER; note = 2'-O-methyladenosine-3'-phosphate
  modified_base 21: mod_base = OTHER; note = 2'-O-methyladenosine-3'-phosphate ((2S,4R)-1-[29-[[2-(acetylamino)-2-deoxy-beta-D-galactopyra nosyl]oxy]-14,14-bis[[3-[[3-[[5-[[2-(acetylamino)-2-deoxy-b eta-D-galactopyranosyl]oxy]-1-oxopentyl]amino]propyl]amino] -3-oxopropoxy]methyl]-1,12,19,25-tetraoxo-16-oxa-13,20,24-t riazanonacos-1-yl]-4-hydroxy-2-pyrrolidinyl)methyl ester
tagcactggagagaattggaa

SEQ ID NO: 2287 - RNA, 23 nt, synthetic construct
  source 1..23: mol_type = other RNA
  modified_base 1: mod_base = OTHER; note = 2'-O-methyluridine-3'-phosphorothioate
  modified_base 2: mod_base = OTHER; note = 2'-deoxy-2'-fluorouridine-3'-phosphorothioate
  modified_base 3: mod_base = OTHER; note = 2'-O-methylcytidine-3'-phosphate
  modified_base 4: mod_base = OTHER; note = 2'-O-methylcytidine-3'-phosphate
  modified_base 5: mod_base = OTHER; note = 2'-O-methyladenosine-3'-phosphate
  modified_base 6: mod_base = OTHER; note = 2'-deoxy-2'-fluoroadenosine-3'-phosphate
  modified_base 7: mod_base = OTHER; note = 2'-O-methyluridine-3'-phosphate
  modified_base 8: mod_base = OTHER; note = 2'-deoxy-2'-fluorouridine-3'-phosphate
  modified_base 9: mod_base = OTHER; note = 2'-deoxy-2'-fluorocytidine-3'-phosphate
  modified_base 10: mod_base = OTHER; note = 2'-O-methyluridine-3'-phosphate
  modified_base 11: mod_base = OTHER; note = 2'-O-methylcytidine-3'-phosphate
  modified_base 12: mod_base = OTHER; note = 2'-O-methyluridine-3'-phosphate
  modified_base 13: mod_base = OTHER; note = 2'-O-methylcytidine-3'-phosphate
  modified_base 14: mod_base = OTHER; note = 2'-deoxy-2'-fluorocytidine-3'-phosphate
  modified_base 15: mod_base = OTHER; note = 2'-O-methyladenosine-3'-phosphate
  modified_base 16: mod_base = OTHER; note = 2'-deoxy-2'-fluoroguanosine-3'-phosphate
  modified_base 17: mod_base = OTHER; note = 2'-O-methyluridine-3'-phosphate
  modified_base 18: mod_base = OTHER; note = 2'-O-methylguanosine-3'-phosphate
  modified_base 19: mod_base = OTHER; note = 2'-O-methylcytidine-3'-phosphate
  modified_base 20: mod_base = OTHER; note = 2'-O-methyluridine-3'-phosphate
  modified_base 21: mod_base = OTHER; note = 2'-O-methyladenosine-3'-phosphorothioate
  modified_base 22: mod_base = OTHER; note = 2'-O-methylcytidine-3'-phosphorothioate
  modified_base 23: mod_base = OTHER; note = 2'-O-methylcytidine
ttccaattctctccagtgctacc

SEQ ID NO: 2288 - RNA, 21 nt, synthetic construct
  source 1..21: mol_type = other RNA
  modified_base 1: mod_base = OTHER; note = 2'-O-methylguanosine-3'-phosphorothioate
  modified_base 2: mod_base = OTHER; note = 2'-O-methyluridine-3'-phosphorothioate
  modified_base 3: mod_base = OTHER; note = 2'-O-methyladenosine-3'-phosphate
  modified_base 4: mod_base = OTHER; note = 2'-O-methylguanosine-3'-phosphate
  modified_base 5: mod_base = OTHER; note = 2'-O-methylcytidine-3'-phosphate
  modified_base 6: mod_base = OTHER; note = 2'-O-methyladenosine-3'-phosphate
  modified_base 7: mod_base = OTHER; note = 2'-deoxy-2'-fluorocytidine-3'-phosphate
  modified_base 8: mod_base = OTHER; note = 2'-O-methyluridine-3'-phosphate
  modified_base 9: mod_base = OTHER; note = 2'-deoxy-2'-fluoroguanosine-3'-phosphate
  modified_base 10: mod_base = OTHER; note = 2'-deoxy-2'-fluoroguanosine-3'-phosphate
  modified_base 11: mod_base = OTHER; note = 2'-deoxy-2'-fluoroadenosine-3'-phosphate
  modified_base 12: mod_base = OTHER; note = 2'-O-methylguanosine-3'-phosphate
  modified_base 13: mod_base = OTHER; note = 2'-O-methyladenosine-3'-phosphate
  modified_base 14: mod_base = OTHER; note = 2'-O-methylguanosine-3'-phosphate
  modified_base 15: mod_base = OTHER; note = 2'-O-methyladenosine-3'-phosphate
  modified_base 16: mod_base = OTHER; note = 2'-O-methyladenosine-3'-phosphate
  modified_base 17: mod_base = OTHER; note = 2'-O-methyluridine-3'-phosphate
  modified_base 18: mod_base = OTHER; note = 2'-O-methyluridine-3'-phosphate
  modified_base 19: mod_base = OTHER; note = 2'-O-methylguanosine-3'-phosphate
  modified_base 20: mod_base = OTHER; note = 2'-O-methylguanosine-3'-phosphate
  modified_base 21: mod_base = OTHER; note = 2'-O-methyladenosine-3'-phosphate ((2S,4R)-1-[29-[[2-(acetylamino)-2-deoxy-beta-D-galactopyra nosyl]oxy]-14,14-bis[[3-[[3-[[5-[[2-(acetylamino)-2-deoxy-b eta-D-galactopyranosyl]oxy]-1-oxopentyl]amino]propyl]amino] -3-oxopropoxy]methyl]-1,12,19,25-tetraoxo-16-oxa-13,20,24-t riazanonacos-1-yl]-4-hydroxy-2-pyrrolidinyl)methyl ester
gtagcactggagagaattgga

SEQ ID NO: 2289 - RNA, 23 nt, synthetic construct
  source 1..23: mol_type = other RNA
  modified_base 1: mod_base = OTHER; note = 2'-O-methyluridine-3'-phosphorothioate
  modified_base 2: mod_base = OTHER; note = 2'-deoxy-2'-fluorocytidine-3'-phosphorothioate
  modified_base 3: mod_base = OTHER; note = 2'-O-methylcytidine-3'-phosphate
  modified_base 4: mod_base = OTHER; note = 2'-O-methyladenosine-3'-phosphate
  modified_base 5: mod_base = OTHER; note = 2'-O-methyladenosine-3'-phosphate
  modified_base 6: mod_base = OTHER; note = 2'-deoxy-2'-fluorouridine-3'-phosphate
  modified_base 7: mod_base = OTHER; note = 2'-O-methyluridine-3'-phosphate
  modified_base 8: mod_base = OTHER; note = 2'-deoxy-2'-fluorocytidine-3'-phosphate
  modified_base 9: mod_base = OTHER; note = 2'-deoxy-2'-fluorouridine-3'-phosphate
  modified_base 10: mod_base = OTHER; note = 2'-O-methylcytidine-3'-phosphate
  modified_base 11: mod_base = OTHER; note = 2'-O-methyluridine-3'-phosphate
  modified_base 12: mod_base = OTHER; note = 2'-O-methylcytidine-3'-phosphate
  modified_base 13: mod_base = OTHER; note = 2'-O-methylcytidine-3'-phosphate
  modified_base 14: mod_base = OTHER; note = 2'-deoxy-2'-fluoroadenosine-3'-phosphate
  modified_base 15: mod_base = OTHER; note = 2'-O-methylguanosine-3'-phosphate
  modified_base 16: mod_base = OTHER; note = 2'-deoxy-2'-fluorouridine-3'-phosphate
  modified_base 17: mod_base = OTHER; note = 2'-O-methylguanosine-3'-phosphate
  modified_base 18: mod_base = OTHER; note = 2'-O-methylcytidine-3'-phosphate
  modified_base 19: mod_base = OTHER; note = 2'-O-methyluridine-3'-phosphate
  modified_base 20: mod_base = OTHER; note = 2'-O-methyladenosine-3'-phosphate
  modified_base 21: mod_base = OTHER; note = 2'-O-methylcytidine-3'-phosphorothioate
  modified_base 22: mod_base = OTHER; note = 2'-O-methylcytidine-3'-phosphorothioate
  modified_base 23: mod_base = OTHER; note = 2'-O-methyluridine
tccaattctctccagtgctacct

SEQ ID NO: 2290 - RNA, 21 nt, synthetic construct
  source 1..21: mol_type = other RNA
  modified_base 1: mod_base = OTHER; note = 2'-O-methyladenosine-3'-phosphorothioate
  modified_base 2: mod_base = OTHER; note = 2'-O-methylcytidine-3'-phosphorothioate
  modified_base 3: mod_base = OTHER; note = 2'-O-methyladenosine-3'-phosphate
  modified_base 4: mod_base = OTHER; note = 2'-O-methylguanosine-3'-phosphate
  modified_base 5: mod_base = OTHER; note = 2'-O-methyluridine-3'-phosphate
  modified_base 6: mod_base = OTHER; note = 2'-O-methylguanosine-3'-phosphate
  modified_base 7: mod_base = OTHER; note = 2'-deoxy-2'-fluoroguanosine-3'-phosphate
  modified_base 8: mod_base = OTHER; note = 2'-O-methyladenosine-3'-phosphate
  modified_base 9: mod_base = OTHER; note = 2'-deoxy-2'-fluorocytidine-3'-phosphate
  modified_base 10: mod_base = OTHER; note = 2'-deoxy-2'-fluoroadenosine-3'-phosphate
  modified_base 11: mod_base = OTHER; note = 2'-deoxy-2'-fluorocytidine-3'-phosphate
  modified_base 12: mod_base = OTHER; note = 2'-O-methyladenosine-3'-phosphate
  modified_base 13: mod_base = OTHER; note = 2'-O-methylcytidine-3'-phosphate
  modified_base 14: mod_base = OTHER; note = 2'-O-methylcytidine-3'-phosphate
  modified_base 15: mod_base = OTHER; note = 2'-O-methyluridine-3'-phosphate
  modified_base 16: mod_base = OTHER; note = 2'-O-methyluridine-3'-phosphate
  modified_base 17: mod_base = OTHER; note = 2'-O-methyladenosine-3'-phosphate
  modified_base 18: mod_base = OTHER; note = 2'-O-methylcytidine-3'-phosphate
  modified_base 19: mod_base = OTHER; note = 2'-O-methylcytidine-3'-phosphate
  modified_base 20: mod_base = OTHER; note = 2'-O-methyluridine-3'-phosphate
  modified_base 21: mod_base = OTHER; note = 2'-O-methylguanosine-3'-phosphate ((2S,4R)-1-[29-[[2-(acetylamino)-2-deoxy-beta-D-galactopyra nosyl]oxy]-14,14-bis[[3-[[3-[[5-[[2-(acetylamino)-2-deoxy-b eta-D-galactopyranosyl]oxy]-1-oxopentyl]amino]propyl]amino] -3-oxopropoxy]methyl]-1,12,19,25-tetraoxo-16-oxa-13,20,24-t riazanonacos-1-yl]-4-hydroxy-2-pyrrolidinyl)methyl ester
acagtggacacaccttacctg

SEQ ID NO: 2291 - RNA, 23 nt, synthetic construct
  source 1..23: mol_type = other RNA
  modified_base 1: mod_base = OTHER; note = 2'-O-methylcytidine-3'-phosphorothioate
  modified_base 2: mod_base = OTHER; note = 2'-deoxy-2'-fluoroadenosine-3'-phosphorothioate
  modified_base 3: mod_base = OTHER; note = 2'-O-methylguanosine-3'-phosphate
  modified_base 4: mod_base = OTHER; note = 2'-O-methylguanosine-3'-phosphate
  modified_base 5: mod_base = OTHER; note = 2'-O-methyluridine-3'-phosphate
  modified_base 6: mod_base = OTHER; note = 2'-deoxy-2'-fluoroadenosine-3'-phosphate
  modified_base 7: mod_base = OTHER; note = 2'-O-methyladenosine-3'-phosphate
  modified_base 8: mod_base = OTHER; note = 2'-deoxy-2'-fluoroguanosine-3'-phosphate
  modified_base 9: mod_base = OTHER; note = 2'-deoxy-2'-fluoroguanosine-3'-phosphate
  modified_base 10: mod_base = OTHER; note = 2'-O-methyluridine-3'-phosphate
  modified_base 11: mod_base = OTHER; note = 2'-O-methylguanosine-3'-phosphate
  modified_base 12: mod_base = OTHER; note = 2'-O-methyluridine-3'-phosphate
  modified_base 13: mod_base = OTHER; note = 2'-O-methylguanosine-3'-phosphate
  modified_base 14: mod_base = OTHER; note = 2'-deoxy-2'-fluorouridine-3'-phosphate
  modified_base 15: mod_base = OTHER; note = 2'-O-methylcytidine-3'-phosphate
  modified_base 16: mod_base = OTHER; note = 2'-deoxy-2'-fluorocytidine-3'-phosphate
  modified_base 17: mod_base = OTHER; note = 2'-O-methyladenosine-3'-phosphate
  modified_base 18: mod_base = OTHER; note = 2'-O-methylcytidine-3'-phosphate
  modified_base 19: mod_base = OTHER; note = 2'-O-methyluridine-3'-phosphate
  modified_base 20: mod_base = OTHER; note = 2'-O-methylguanosine-3'-phosphate
  modified_base 21: mod_base = OTHER; note = 2'-O-methyluridine-3'-phosphorothioate
  modified_base 22: mod_base = OTHER; note = 2'-O-methylcytidine-3'-phosphorothioate
  modified_base 23: mod_base = OTHER; note = 2'-O-methyladenosine
caggtaaggtgtgtccactgtca

SEQ ID NO: 2292 - RNA, 21 nt, synthetic construct
  source 1..21: mol_type = other RNA
  modified_base 1: mod_base = OTHER; note = 2'-O-methylcytidine-3'-phosphorothioate
  modified_base 2: mod_base = OTHER; note = 2'-O-methyladenosine-3'-phosphorothioate
  modified_base 3: mod_base = OTHER; note = 2'-O-methylguanosine-3'-phosphate
  modified_base 4: mod_base = OTHER; note = 2'-O-methyluridine-3'-phosphate
  modified_base 5: mod_base = OTHER; note = 2'-O-methylguanosine-3'-phosphate
  modified_base 6: mod_base = OTHER; note = 2'-O-methylguanosine-3'-phosphate
  modified_base 7: mod_base = OTHER; note = 2'-deoxy-2'-fluoroadenosine-3'-phosphate
  modified_base 8: mod_base = OTHER; note = 2'-O-methylcytidine-3'-phosphate
  modified_base 9: mod_base = OTHER; note = 2'-deoxy-2'-fluoroadenosine-3'-phosphate
  modified_base 10: mod_base = OTHER; note = 2'-deoxy-2'-fluorocytidine-3'-phosphate
  modified_base 11: mod_base = OTHER; note = 2'-deoxy-2'-fluoroadenosine-3'-phosphate
  modified_base 12: mod_base = OTHER; note = 2'-O-methylcytidine-3'-phosphate
  modified_base 13: mod_base = OTHER; note = 2'-O-methylcytidine-3'-phosphate
  modified_base 14: mod_base = OTHER; note = 2'-O-methyluridine-3'-phosphate
  modified_base 15: mod_base = OTHER; note = 2'-O-methyluridine-3'-phosphate
  modified_base 16: mod_base = OTHER; note = 2'-O-methyladenosine-3'-phosphate
  modified_base 17: mod_base = OTHER; note = 2'-O-methylcytidine-3'-phosphate
  modified_base 18: mod_base = OTHER; note = 2'-O-methylcytidine-3'-phosphate
  modified_base 19: mod_base = OTHER; note = 2'-O-methyluridine-3'-phosphate
  modified_base 20: mod_base = OTHER; note = 2'-O-methylguanosine-3'-phosphate
  modified_base 21: mod_base = OTHER; note = 2'-O-methylguanosine-3'-phosphate ((2S,4R)-1-[29-[[2-(acetylamino)-2-deoxy-beta-D-galactopyra nosyl]oxy]-14,14-bis[[3-[[3-[[5-[[2-(acetylamino)-2-deoxy-b eta-D-galactopyranosyl]oxy]-1-oxopentyl]amino]propyl]amino] -3-oxopropoxy]methyl]-1,12,19,25-tetraoxo-16-oxa-13,20,24-t riazanonacos-1-yl]-4-hydroxy-2-pyrrolidinyl)methyl ester
cagtggacacaccttacctgg

SEQ ID NO: 2293 - RNA, 23 nt, synthetic construct
  source 1..23: mol_type = other RNA
  modified_base 1: mod_base = OTHER; note = 2'-O-methylcytidine-3'-phosphorothioate
  modified_base 2: mod_base = OTHER; note = 2'-deoxy-2'-fluorocytidine-3'-phosphorothioate
  modified_base 3: mod_base = OTHER; note = 2'-O-methyladenosine-3'-phosphate
  modified_base 4: mod_base = OTHER; note = 2'-O-methylguanosine-3'-phosphate
  modified_base 5: mod_base = OTHER; note = 2'-O-methylguanosine-3'-phosphate
  modified_base 6: mod_base = OTHER; note = 2'-deoxy-2'-fluorouridine-3'-phosphate
  modified_base 7: mod_base = OTHER; note = 2'-O-methyladenosine-3'-phosphate
  modified_base 8: mod_base = OTHER; note = 2'-deoxy-2'-fluoroadenosine-3'-phosphate
  modified_base 9: mod_base = OTHER; note = 2'-deoxy-2'-fluoroguanosine-3'-phosphate
  modified_base 10: mod_base = OTHER; note = 2'-O-methylguanosine-3'-phosphate
  modified_base 11: mod_base = OTHER; note = 2'-O-methyluridine-3'-phosphate
  modified_base 12: mod_base = OTHER; note = 2'-O-methylguanosine-3'-phosphate
  modified_base 13: mod_base = OTHER; note = 2'-O-methyluridine-3'-phosphate
  modified_base 14: mod_base = OTHER; note = 2'-deoxy-2'-fluoroguanosine-3'-phosphate
  modified_base 15: mod_base = OTHER; note = 2'-O-methyluridine-3'-phosphate
  modified_base 16: mod_base = OTHER; note = 2'-deoxy-2'-fluorocytidine-3'-phosphate
  modified_base 17: mod_base = OTHER; note = 2'-O-methylcytidine-3'-phosphate
  modified_base 18: mod_base = OTHER; note = 2'-O-methyladenosine-3'-phosphate
  modified_base 19: mod_base = OTHER; note = 2'-O-methylcytidine-3'-phosphate
  modified_base 20: mod_base = OTHER; note = 2'-O-methyluridine-3'-phosphate
  modified_base 21: mod_base = OTHER; note = 2'-O-methylguanosine-3'-phosphorothioate
  modified_base 22: mod_base = OTHER; note = 2'-O-methyluridine-3'-phosphorothioate
  modified_base 23: mod_base = OTHER; note = 2'-O-methylcytidine
ccaggtaaggtgtgtccactgtc

SEQ ID NO: 2294 - RNA, 21 nt, synthetic construct
  source 1..21: mol_type = other RNA
  modified_base 1: mod_base = OTHER; note = 2'-O-methyluridine-3'-phosphorothioate
  modified_base 2: mod_base = OTHER; note = 2'-O-methylguanosine-3'-phosphorothioate
  modified_base 3: mod_base = OTHER; note = 2'-O-methyluridine-3'-phosphate
  modified_base 4: mod_base = OTHER; note = 2'-O-methylguanosine-3'-phosphate
  modified_base 5: mod_base = OTHER; note = 2'-O-methyladenosine-3'-phosphate
  modified_base 6: mod_base = OTHER; note = 2'-O-methylcytidine-3'-phosphate
  modified_base 7: mod_base = OTHER; note = 2'-deoxy-2'-fluoroadenosine-3'-phosphate
  modified_base 8: mod_base = OTHER; note = 2'-O-methylguanosine-3'-phosphate
  modified_base 9: mod_base = OTHER; note = 2'-deoxy-2'-fluorouridine-3'-phosphate
  modified_base 10: mod_base = OTHER; note = 2'-deoxy-2'-fluoroguanosine-3'-phosphate
  modified_base 11: mod_base = OTHER; note = 2'-deoxy-2'-fluoroguanosine-3'-phosphate
  modified_base 12: mod_base = OTHER; note = 2'-O-methyladenosine-3'-phosphate
  modified_base 13: mod_base = OTHER; note = 2'-O-methylcytidine-3'-phosphate
  modified_base 14: mod_base = OTHER; note = 2'-O-methyladenosine-3'-phosphate
  modified_base 15: mod_base = OTHER; note = 2'-O-methylcytidine-3'-phosphate
  modified_base 16: mod_base = OTHER; note = 2'-O-methyladenosine-3'-phosphate
  modified_base 17: mod_base = OTHER; note = 2'-O-methylcytidine-3'-phosphate
  modified_base 18: mod_base = OTHER; note = 2'-O-methylcytidine-3'-phosphate
  modified_base 19: mod_base = OTHER; note = 2'-O-methyluridine-3'-phosphate
  modified_base 20: mod_base = OTHER; note = 2'-O-methyluridine-3'-phosphate
  modified_base 21: mod_base = OTHER; note = 2'-O-methyladenosine-3'-phosphate ((2S,4R)-1-[29-[[2-(acetylamino)-2-deoxy-beta-D-galactopyra nosyl]oxy]-14,14-bis[[3-[[3-[[5-[[2-(acetylamino)-2-deoxy-b eta-D-galactopyranosyl]oxy]-1-oxopentyl]amino]propyl]amino] -3-oxopropoxy]methyl]-1,12,19,25-tetraoxo-16-oxa-13,20,24-t riazanonacos-1-yl]-4-hydroxy-2-pyrrolidinyl)methyl ester
tgtgacagtggacacacctta

SEQ ID NO: 2295 - RNA, 23 nt, synthetic construct
  source 1..23: mol_type = other RNA
  modified_base 1: mod_base = OTHER; note = 2'-O-methyluridine-3'-phosphorothioate
  modified_base 2: mod_base = OTHER; note = 2'-deoxy-2'-fluoroadenosine-3'-phosphorothioate
  modified_base 3: mod_base = OTHER; note = 2'-O-methyladenosine-3'-phosphate
  modified_base 4: mod_base = OTHER; note = 2'-O-methylguanosine-3'-phosphate
  modified_base 5: mod_base = OTHER; note = 2'-O-methylguanosine-3'-phosphate
  modified_base 6: mod_base = OTHER; note = 2'-deoxy-2'-fluorouridine-3'-phosphate
  modified_base 7: mod_base = OTHER; note = 2'-O-methylguanosine-3'-phosphate
  modified_base 8: mod_base = OTHER; note = 2'-deoxy-2'-fluorouridine-3'-phosphate
  modified_base 9: mod_base = OTHER; note = 2'-deoxy-2'-fluoroguanosine-3'-phosphate
  modified_base 10: mod_base = OTHER; note = 2'-O-methyluridine-3'-phosphate
  modified_base 11: mod_base = OTHER; note = 2'-O-methylcytidine-3'-phosphate
  modified_base 12: mod_base = OTHER; note = 2'-O-methylcytidine-3'-phosphate
  modified_base 13: mod_base = OTHER; note = 2'-O-methyladenosine-3'-phosphate
  modified_base 14: mod_base = OTHER; note = 2'-deoxy-2'-fluorocytidine-3'-phosphate
  modified_base 15: mod_base = OTHER; note = 2'-O-methyluridine-3'-phosphate
  modified_base 16: mod_base = OTHER; note = 2'-deoxy-2'-fluoroguanosine-3'-phosphate
  modified_base 17: mod_base = OTHER; note = 2'-O-methyluridine-3'-phosphate
  modified_base 18: mod_base = OTHER; note = 2'-O-methylcytidine-3'-phosphate
  modified_base 19: mod_base = OTHER; note = 2'-O-methyladenosine-3'-phosphate
  modified_base 20: mod_base = OTHER; note = 2'-O-methylcytidine-3'-phosphate
  modified_base 21: mod_base = OTHER; note = 2'-O-methyladenosine-3'-phosphorothioate
  modified_base 22: mod_base = OTHER; note = 2'-O-methyladenosine-3'-phosphorothioate
  modified_base 23: mod_base = OTHER; note = 2'-O-methyladenosine
taaggtgtgtccactgtcacaaa

SEQ ID NO: 2296 - RNA, 21 nt, synthetic construct
  source 1..21: mol_type = other RNA
  modified_base 1: mod_base = OTHER; note = 2'-O-methyluridine-3'-phosphorothioate
  modified_base 2: mod_base = OTHER; note = 2'-O-methyluridine-3'-phosphorothioate
  modified_base 3: mod_base = OTHER; note = 2'-O-methylguanosine-3'-phosphate
  modified_base 4: mod_base = OTHER; note = 2'-O-methyluridine-3'-phosphate
  modified_base 5: mod_base = OTHER; note = 2'-O-methylguanosine-3'-phosphate
  modified_base 6: mod_base = OTHER; note = 2'-O-methyladenosine-3'-phosphate
  modified_base 7: mod_base = OTHER; note = 2'-deoxy-2'-fluorocytidine-3'-phosphate
  modified_base 8: mod_base = OTHER; note = 2'-O-methyladenosine-3'-phosphate
  modified_base 9: mod_base = OTHER; note = 2'-deoxy-2'-fluoroguanosine-3'-phosphate
  modified_base 10: mod_base = OTHER; note = 2'-deoxy-2'-fluorouridine-3'-phosphate
  modified_base 11: mod_base = OTHER; note = 2'-deoxy-2'-fluoroguanosine-3'-phosphate
  modified_base 12: mod_base = OTHER; note = 2'-O-methylguanosine-3'-phosphate
  modified_base 13: mod_base = OTHER; note = 2'-O-methyladenosine-3'-phosphate
  modified_base 14: mod_base = OTHER; note = 2'-O-methylcytidine-3'-phosphate
  modified_base 15: mod_base = OTHER; note = 2'-O-methyladenosine-3'-phosphate
  modified_base 16: mod_base = OTHER; note = 2'-O-methylcytidine-3'-phosphate
  modified_base 17: mod_base = OTHER; note = 2'-O-methyladenosine-3'-phosphate
  modified_base 18: mod_base = OTHER; note = 2'-O-methylcytidine-3'-phosphate
  modified_base 19: mod_base = OTHER; note = 2'-O-methylcytidine-3'-phosphate
  modified_base 20: mod_base = OTHER; note = 2'-O-methyluridine-3'-phosphate
  modified_base 21: mod_base = OTHER; note = 2'-O-methyluridine-3'-phosphate ((2S,4R)-1-[29-[[2-(acetylamino)-2-deoxy-beta-D-galactopyra nosyl]oxy]-14,14-bis[[3-[[3-[[5-[[2-(acetylamino)-2-deoxy-b eta-D-galactopyranosyl]oxy]-1-oxopentyl]amino]propyl]amino] -3-oxopropoxy]methyl]-1,12,19,25-tetraoxo-16-oxa-13,20,24-t riazanonacos-1-yl]-4-hydroxy-2-pyrrolidinyl)methyl ester
ttgtgacagtggacacacctt

SEQ ID NO: 2297 - RNA, 23 nt, synthetic construct
  source 1..23: mol_type = other RNA
  modified_base 1: mod_base = OTHER; note = 2'-O-methyladenosine-3'-phosphorothioate
  modified_base 2: mod_base = OTHER; note = 2'-deoxy-2'-fluoroadenosine-3'-phosphorothioate
  modified_base 3: mod_base = OTHER; note = 2'-O-methylguanosine-3'-phosphate
  modified_base 4: mod_base = OTHER; note = 2'-O-methylguanosine-3'-phosphate
  modified_base 5: mod_base = OTHER; note = 2'-O-methyluridine-3'-phosphate
  modified_base 6: mod_base = OTHER; note = 2'-deoxy-2'-fluoroguanosine-3'-phosphate
  modified_base 7: mod_base = OTHER; note = 2'-O-methyluridine-3'-phosphate
  modified_base 8: mod_base = OTHER; note = 2'-deoxy-2'-fluoroguanosine-3'-phosphate
  modified_base 9: mod_base = OTHER; note = 2'-deoxy-2'-fluorouridine-3'-phosphate
  modified_base 10: mod_base = OTHER; note = 2'-O-methylcytidine-3'-phosphate
  modified_base 11: mod_base = OTHER; note = 2'-O-methylcytidine-3'-phosphate
  modified_base 12: mod_base = OTHER; note = 2'-O-methyladenosine-3'-phosphate
  modified_base 13: mod_base = OTHER; note = 2'-O-methylcytidine-3'-phosphate
  modified_base 14: mod_base = OTHER; note = 2'-deoxy-2'-fluorouridine-3'-phosphate
  modified_base 15: mod_base = OTHER; note = 2'-O-methylguanosine-3'-phosphate
  modified_base 16: mod_base = OTHER; note = 2'-deoxy-2'-fluorouridine-3'-phosphate
  modified_base 17: mod_base = OTHER; note = 2'-O-methylcytidine-3'-phosphate
  modified_base 18: mod_base = OTHER; note = 2'-O-methyladenosine-3'-phosphate
  modified_base 19: mod_base = OTHER; note = 2'-O-methylcytidine-3'-phosphate
  modified_base 20: mod_base = OTHER; note = 2'-O-methyladenosine-3'-phosphate
  modified_base 21: mod_base = OTHER; note = 2'-O-methyladenosine-3'-phosphorothioate
  modified_base 22: mod_base = OTHER; note = 2'-O-methyladenosine-3'-phosphorothioate
  modified_base 23: mod_base = OTHER; note = 2'-O-methyluridine
aaggtgtgtccactgtcacaaat

SEQ ID NO: 2298 - RNA, 21 nt, synthetic construct
  source 1..21: mol_type = other RNA
  modified_base 1: mod_base = OTHER; note = 2'-O-methylguanosine-3'-phosphorothioate
  modified_base 2: mod_base = OTHER; note = 2'-O-methyladenosine-3'-phosphorothioate
  modified_base 3: mod_base = OTHER; note = 2'-O-methyladenosine-3'-phosphate
  modified_base 4: mod_base = OTHER; note = 2'-O-methylguanosine-3'-phosphate
  modified_base 5: mod_base = OTHER; note = 2'-O-methyladenosine-3'-phosphate
  modified_base 6: mod_base = OTHER; note = 2'-O-methylcytidine-3'-phosphate
  modified_base 7: mod_base = OTHER; note = 2'-deoxy-2'-fluorouridine-3'-phosphate
  modified_base 8: mod_base = OTHER; note = 2'-O-methylguanosine-3'-phosphate
  modified_base 9: mod_base = OTHER; note = 2'-deoxy-2'-fluoroadenosine-3'-phosphate
  modified_base 10: mod_base = OTHER; note = 2'-deoxy-2'-fluorocytidine-3'-phosphate
  modified_base 11: mod_base = OTHER; note = 2'-deoxy-2'-fluoroadenosine-3'-phosphate
  modified_base 12: mod_base = OTHER; note = 2'-O-methyluridine-3'-phosphate
  modified_base 13: mod_base = OTHER; note = 2'-O-methylcytidine-3'-phosphate
  modified_base 14: mod_base = OTHER; note = 2'-O-methyladenosine-3'-phosphate
  modified_base 15: mod_base = OTHER; note = 2'-O-methyluridine-3'-phosphate
  modified_base 16: mod_base = OTHER; note = 2'-O-methyluridine-3'-phosphate
  modified_base 17: mod_base = OTHER; note = 2'-O-methylguanosine-3'-phosphate
  modified_base 18: mod_base = OTHER; note = 2'-O-methylcytidine-3'-phosphate
  modified_base 19: mod_base = OTHER; note = 2'-O-methylcytidine-3'-phosphate
  modified_base 20: mod_base = OTHER; note = 2'-O-methyladenosine-3'-phosphate
  modified_base 21: mod_base = OTHER; note = 2'-O-methyladenosine-3'-phosphate ((2S,4R)-1-[29-[[2-(acetylamino)-2-deoxy-beta-D-galactopyra nosyl]oxy]-14,14-bis[[3-[[3-[[5-[[2-(acetylamino)-2-deoxy-b eta-D-galactopyranosyl]oxy]-1-oxopentyl]amino]propyl]amino] -3-oxopropoxy]methyl]-1,12,19,25-tetraoxo-16-oxa-13,20,24-t riazanonacos-1-yl]-4-hydroxy-2-pyrrolidinyl)methyl ester
gaagactgacatcattgccaa

SEQ ID NO: 2299 - RNA, 23 nt, synthetic construct
  source 1..23: mol_type = other RNA
  modified_base 1: mod_base = OTHER; note = 2'-O-methyluridine-3'-phosphorothioate
  modified_base 2: mod_base = OTHER; note = 2'-deoxy-2'-fluorouridine-3'-phosphorothioate
  modified_base 3: mod_base = OTHER; note = 2'-O-methylguanosine-3'-phosphate
  modified_base 4: mod_base = OTHER; note = 2'-O-methylguanosine-3'-phosphate
  modified_base 5: mod_base = OTHER; note = 2'-O-methylcytidine-3'-phosphate
  modified_base 6: mod_base = OTHER; note = 2'-deoxy-2'-fluoroadenosine-3'-phosphate
  modified_base 7: mod_base = OTHER; note = 2'-O-methyladenosine-3'-phosphate
  modified_base 8: mod_base = OTHER; note = 2'-deoxy-2'-fluorouridine-3'-phosphate
  modified_base 9: mod_base = OTHER; note = 2'-deoxy-2'-fluoroguanosine-3'-phosphate
  modified_base 10: mod_base = OTHER; note = 2'-O-methyladenosine-3'-phosphate
  modified_base 11: mod_base = OTHER; note = 2'-O-methyluridine-3'-phosphate
  modified_base 12: mod_base = OTHER; note = 2'-O-methylguanosine-3'-phosphate
  modified_base 13: mod_base = OTHER; note = 2'-O-methyluridine-3'-phosphate
  modified_base 14: mod_base = OTHER; note = 2'-deoxy-2'-fluorocytidine-3'-phosphate
  modified_base 15: mod_base = OTHER; note = 2'-O-methyladenosine-3'-phosphate
  modified_base 16: mod_base = OTHER; note = 2'-deoxy-2'-fluoroguanosine-3'-phosphate
  modified_base 17: mod_base = OTHER; note = 2'-O-methyluridine-3'-phosphate
  modified_base 18: mod_base = OTHER; note = 2'-O-methylcytidine-3'-phosphate
  modified_base 19: mod_base = OTHER; note = 2'-O-methyluridine-3'-phosphate
  modified_base 20: mod_base = OTHER; note = 2'-O-methyluridine-3'-phosphate
  modified_base 21: mod_base = OTHER; note = 2'-O-methylcytidine-3'-phosphorothioate
  modified_base 22: mod_base = OTHER; note = 2'-O-methyluridine-3'-phosphorothioate
  modified_base 23: mod_base = OTHER; note = 2'-O-methylcytidine
ttggcaatgatgtcagtcttctc

SEQ ID NO: 2300 - RNA, 21 nt, synthetic construct
  source 1..21: mol_type = other RNA
  modified_base 1: mod_base = OTHER; note = 2'-O-methyladenosine-3'-phosphorothioate
  modified_base 2: mod_base = OTHER; note = 2'-O-methyladenosine-3'-phosphorothioate
  modified_base 3: mod_base = OTHER; note = 2'-O-methylguanosine-3'-phosphate
  modified_base 4: mod_base = OTHER; note = 2'-O-methyladenosine-3'-phosphate
  modified_base 5: mod_base = OTHER; note = 2'-O-methylcytidine-3'-phosphate
  modified_base 6: mod_base = OTHER; note = 2'-O-methyluridine-3'-phosphate
  modified_base 7: mod_base = OTHER; note = 2'-deoxy-2'-fluoroguanosine-3'-phosphate
  modified_base 8: mod_base = OTHER; note = 2'-O-methyladenosine-3'-phosphate
  modified_base 9: mod_base = OTHER; note = 2'-deoxy-2'-fluorocytidine-3'-phosphate
  modified_base 10: mod_base = OTHER; note = 2'-deoxy-2'-fluoroadenosine-3'-phosphate
  modified_base 11: mod_base = OTHER; note = 2'-deoxy-2'-fluorouridine-3'-phosphate
  modified_base 12: mod_base = OTHER; note = 2'-O-methylcytidine-3'-phosphate
  modified_base 13: mod_base = OTHER; note = 2'-O-methyladenosine-3'-phosphate
  modified_base 14: mod_base = OTHER; note = 2'-O-methyluridine-3'-phosphate
  modified_base 15: mod_base = OTHER; note = 2'-O-methyluridine-3'-phosphate
  modified_base 16: mod_base = OTHER; note = 2'-O-methylguanosine-3'-phosphate
  modified_base 17: mod_base = OTHER; note = 2'-O-methylcytidine-3'-phosphate
  modified_base 18: mod_base = OTHER; note = 2'-O-methylcytidine-3'-phosphate
  modified_base 19: mod_base = OTHER; note = 2'-O-methyladenosine-3'-phosphate
  modified_base 20: mod_base = OTHER; note = 2'-O-methyladenosine-3'-phosphate
  modified_base 21: mod_base = OTHER; note = 2'-O-methyluridine-3'-phosphate ((2S,4R)-1-[29-[[2-(acetylamino)-2-deoxy-beta-D-galactopyra nosyl]oxy]-14,14-bis[[3-[[3-[[5-[[2-(acetylamino)-2-deoxy-b eta-D-galactopyranosyl]oxy]-1-oxopentyl]amino]propyl]amino] -3-oxopropoxy]methyl]-1,12,19,25-tetraoxo-16-oxa-13,20,24-t riazanonacos-1-yl]-4-hydroxy-2-pyrrolidinyl)methyl ester
aagactgacatcattgccaat

SEQ ID NO: 2301 - RNA, 23 nt, synthetic construct
  source 1..23: mol_type = other RNA
  modified_base 1: mod_base = OTHER; note = 2'-O-methyladenosine-3'-phosphorothioate
  modified_base 2: mod_base = OTHER; note = 2'-deoxy-2'-fluorouridine-3'-phosphorothioate
  modified_base 3: mod_base = OTHER; note = 2'-O-methyluridine-3'-phosphate
  modified_base 4: mod_base = OTHER; note = 2'-O-methylguanosine-3'-phosphate
  modified_base 5: mod_base = OTHER; note = 2'-O-methylguanosine-3'-phosphate
  modified_base 6: mod_base = OTHER; note = 2'-deoxy-2'-fluorocytidine-3'-phosphate
  modified_base 7: mod_base = OTHER; note = 2'-O-methyladenosine-3'-phosphate
  modified_base 8: mod_base = OTHER; note = 2'-deoxy-2'-fluoroadenosine-3'-phosphate
  modified_base 9: mod_base = OTHER; note = 2'-deoxy-2'-fluorouridine-3'-phosphate
  modified_base 10: mod_base = OTHER; note = 2'-O-methylguanosine-3'-phosphate
  modified_base 11: mod_base = OTHER; note = 2'-O-methyladenosine-3'-phosphate
  modified_base 12: mod_base = OTHER; note = 2'-O-methyluridine-3'-phosphate
  modified_base 13: mod_base = OTHER; note = 2'-O-methylguanosine-3'-phosphate
  modified_base 14: mod_base = OTHER; note = 2'-deoxy-2'-fluorouridine-3'-phosphate
  modified_base 15: mod_base = OTHER; note = 2'-O-methylcytidine-3'-phosphate
  modified_base 16: mod_base = OTHER; note = 2'-deoxy-2'-fluoroadenosine-3'-phosphate
  modified_base 17: mod_base = OTHER; note = 2'-O-methylguanosine-3'-phosphate
  modified_base 18: mod_base = OTHER; note = 2'-O-methyluridine-3'-phosphate
  modified_base 19: mod_base = OTHER; note = 2'-O-methylcytidine-3'-phosphate
  modified_base 20: mod_base = OTHER; note = 2'-O-methyluridine-3'-phosphate
  modified_base 21: mod_base = OTHER; note = 2'-O-methyluridine-3'-phosphorothioate
  modified_base 22: mod_base = OTHER; note = 2'-O-methylcytidine-3'-phosphorothioate
  modified_base 23: mod_base = OTHER; note = 2'-O-methyluridine
attggcaatgatgtcagtcttct

SEQ ID NO: 2302 - RNA, 21 nt, synthetic construct
  source 1..21: mol_type = other RNA
  modified_base 1: mod_base = OTHER; note = 2'-O-methylcytidine-3'-phosphorothioate
  modified_base 2: mod_base = OTHER; note = 2'-O-methyluridine-3'-phosphorothioate
  modified_base 3: mod_base = OTHER; note = 2'-O-methylguanosine-3'-phosphate
  modified_base 4: mod_base = OTHER; note = 2'-O-methyladenosine-3'-phosphate
  modified_base 5: mod_base = OTHER; note = 2'-O-methylguanosine-3'-phosphate
  modified_base 6: mod_base = OTHER; note = 2'-O-methyladenosine-3'-phosphate
  modified_base 7: mod_base = OTHER; note = 2'-deoxy-2'-fluoroadenosine-3'-phosphate
  modified_base 8: mod_base = OTHER; note = 2'-O-methylguanosine-3'-phosphate
  modified_base 9: mod_base = OTHER; note = 2'-deoxy-2'-fluoroadenosine-3'-phosphate
  modified_base 10: mod_base = OTHER; note = 2'-deoxy-2'-fluorocytidine-3'-phosphate
  modified_base 11: mod_base = OTHER; note = 2'-deoxy-2'-fluorouridine-3'-phosphate
  modified_base 12: mod_base = OTHER; note = 2'-O-methylguanosine-3'-phosphate
  modified_base 13: mod_base = OTHER; note = 2'-O-methyladenosine-3'-phosphate
  modified_base 14: mod_base = OTHER; note = 2'-O-methylcytidine-3'-phosphate
  modified_base 15: mod_base = OTHER; note = 2'-O-methyladenosine-3'-phosphate
  modified_base 16: mod_base = OTHER; note = 2'-O-methyluridine-3'-phosphate
  modified_base 17: mod_base = OTHER; note = 2'-O-methylcytidine-3'-phosphate
  modified_base 18: mod_base = OTHER; note = 2'-O-methyladenosine-3'-phosphate
  modified_base 19: mod_base = OTHER; note = 2'-O-methyluridine-3'-phosphate
  modified_base 20: mod_base = OTHER; note = 2'-O-methyluridine-3'-phosphate
  modified_base 21: mod_base = OTHER; note = 2'-O-methylguanosine-3'-phosphate ((2S,4R)-1-[29-[[2-(acetylamino)-2-deoxy-beta-D-galactopyra nosyl]oxy]-14,14-bis[[3-[[3-[[5-[[2-(acetylamino)-2-deoxy-b eta-D-galactopyranosyl]oxy]-1-oxopentyl]amino]propyl]amino] -3-oxopropoxy]methyl]-1,12,19,25-tetraoxo-16-oxa-13,20,24-t riazanonacos-1-yl]-4-hydroxy-2-pyrrolidinyl)methyl ester
ctgagaagactgacatcattg

SEQ ID NO: 2303 - RNA, 23 nt, synthetic construct
  source 1..23: mol_type = other RNA
  modified_base 1: mod_base = OTHER; note = 2'-O-methylcytidine-3'-phosphorothioate
  modified_base 2: mod_base = OTHER; note = 2'-deoxy-2'-fluoroadenosine-3'-phosphorothioate
  modified_base 3: mod_base = OTHER; note = 2'-O-methyladenosine-3'-phosphate
  modified_base 4: mod_base = OTHER; note = 2'-O-methyluridine-3'-phosphate
  modified_base 5: mod_base = OTHER; note = 2'-O-methylguanosine-3'-phosphate
  modified_base 6: mod_base = OTHER; note = 2'-deoxy-2'-fluoroadenosine-3'-phosphate
  modified_base 7: mod_base = OTHER; note = 2'-O-methyluridine-3'-phosphate
  modified_base 8: mod_base = OTHER; note = 2'-deoxy-2'-fluoroguanosine-3'-phosphate
  modified_base 9: mod_base = OTHER; note = 2'-deoxy-2'-fluorouridine-3'-phosphate
  modified_base 10: mod_base = OTHER; note = 2'-O-methylcytidine-3'-phosphate
  modified_base 11: mod_base = OTHER; note = 2'-O-methyladenosine-3'-phosphate
  modified_base 12: mod_base = OTHER; note = 2'-O-methylguanosine-3'-phosphate
  modified_base 13: mod_base = OTHER; note = 2'-O-methyluridine-3'-phosphate
  modified_base 14: mod_base = OTHER; note = 2'-deoxy-2'-fluorocytidine-3'-phosphate
  modified_base 15: mod_base = OTHER; note = 2'-O-methyluridine-3'-phosphate
  modified_base 16: mod_base = OTHER; note = 2'-deoxy-2'-fluorouridine-3'-phosphate
  modified_base 17: mod_base = OTHER; note = 2'-O-methylcytidine-3'-phosphate
  modified_base 18: mod_base = OTHER; note = 2'-O-methyluridine-3'-phosphate
  modified_base 19: mod_base = OTHER; note = 2'-O-methylcytidine-3'-phosphate
  modified_base 20: mod_base = OTHER; note = 2'-O-methyladenosine-3'-phosphate
  modified_base 21: mod_base = OTHER; note = 2'-O-methylguanosine-3'-phosphorothioate
  modified_base 22: mod_base = OTHER; note = 2'-O-methylcytidine-3'-phosphorothioate
  modified_base 23: mod_base = OTHER; note = 2'-O-methylcytidine
caatgatgtcagtcttctcagcc

SEQ ID NO: 2304 - RNA, 21 nt, synthetic construct
  source 1..21: mol_type = other RNA
  modified_base 1: mod_base = OTHER; note = 2'-O-methylguanosine-3'-phosphorothioate
  modified_base 2: mod_base = OTHER; note = 2'-O-methylcytidine-3'-phosphorothioate
  modified_base 3: mod_base = OTHER; note = 2'-O-methyluridine-3'-phosphate
  modified_base 4: mod_base = OTHER; note = 2'-O-methylguanosine-3'-phosphate
  modified_base 5: mod_base = OTHER; note = 2'-O-methyladenosine-3'-phosphate
  modified_base 6: mod_base = OTHER; note = 2'-O-methylguanosine-3'-phosphate
  modified_base 7: mod_base = OTHER; note = 2'-deoxy-2'-fluoroadenosine-3'-phosphate
  modified_base 8: mod_base = OTHER; note = 2'-O-methyladenosine-3'-phosphate
  modified_base 9: mod_base = OTHER; note = 2'-deoxy-2'-fluoroguanosine-3'-phosphate
  modified_base 10: mod_base = OTHER; note = 2'-deoxy-2'-fluoroadenosine-3'-phosphate
  modified_base 11: mod_base = OTHER; note = 2'-deoxy-2'-fluorocytidine-3'-phosphate
  modified_base 12: mod_base = OTHER; note = 2'-O-methyluridine-3'-phosphate
  modified_base 13: mod_base = OTHER; note = 2'-O-methylguanosine-3'-phosphate
  modified_base 14: mod_base = OTHER; note = 2'-O-methyladenosine-3'-phosphate
  modified_base 15: mod_base = OTHER; note = 2'-O-methylcytidine-3'-phosphate
  modified_base 16: mod_base = OTHER; note = 2'-O-methyladenosine-3'-phosphate
  modified_base 17: mod_base = OTHER; note = 2'-O-methyluridine-3'-phosphate
  modified_base 18: mod_base = OTHER; note = 2'-O-methylcytidine-3'-phosphate
  modified_base 19: mod_base = OTHER; note = 2'-O-methyladenosine-3'-phosphate
  modified_base 20: mod_base = OTHER; note = 2'-O-methyluridine-3'-phosphate
  modified_base 21: mod_base = OTHER; note = 2'-O-methyluridine-3'-phosphate ((2S,4R)-1-[29-[[2-(acetylamino)-2-deoxy-beta-D-galactopyra nosyl]oxy]-14,14-bis[[3-[[3-[[5-[[2-(acetylamino)-2-deoxy-b eta-D-galactopyranosyl]oxy]-1-oxopentyl]amino]propyl]amino] -3-oxopropoxy]methyl]-1,12,19,25-tetraoxo-16-oxa-13,20,24-t riazanonacos-1-yl]-4-hydroxy-2-pyrrolidinyl)methyl ester
gctgagaagactgacatcatt

SEQ ID NO: 2305 - RNA, 23 nt, synthetic construct
  source 1..23: mol_type = other RNA
  modified_base 1: mod_base = OTHER; note = 2'-O-methyladenosine-3'-phosphorothioate
  modified_base 2: mod_base = OTHER; note = 2'-deoxy-2'-fluoroadenosine-3'-phosphorothioate
  modified_base 3: mod_base = OTHER; note = 2'-O-methyluridine-3'-phosphate
  modified_base 4: mod_base = OTHER; note = 2'-O-methylguanosine-3'-phosphate
  modified_base 5: mod_base = OTHER; note = 2'-O-methyladenosine-3'-phosphate
  modified_base 6: mod_base = OTHER; note = 2'-deoxy-2'-fluorouridine-3'-phosphate
  modified_base 7: mod_base = OTHER; note = 2'-O-methylguanosine-3'-phosphate
  modified_base 8: mod_base = OTHER; note = 2'-deoxy-2'-fluorouridine-3'-phosphate
  modified_base 9: mod_base = OTHER; note = 2'-deoxy-2'-fluorocytidine-3'-phosphate
  modified_base 10: mod_base = OTHER; note = 2'-O-methyladenosine-3'-phosphate
  modified_base 11: mod_base = OTHER; note = 2'-O-methylguanosine-3'-phosphate
  modified_base 12: mod_base = OTHER; note = 2'-O-methyluridine-3'-phosphate
  modified_base 13: mod_base = OTHER; note = 2'-O-methylcytidine-3'-phosphate
  modified_base 14: mod_base = OTHER; note = 2'-deoxy-2'-fluorouridine-3'-phosphate
  modified_base 15: mod_base = OTHER; note = 2'-O-methyluridine-3'-phosphate
  modified_base 16: mod_base = OTHER; note = 2'-deoxy-2'-fluorocytidine-3'-phosphate
  modified_base 17: mod_base = OTHER; note = 2'-O-methyluridine-3'-phosphate
  modified_base 18: mod_base = OTHER; note = 2'-O-methylcytidine-3'-phosphate
  modified_base 19: mod_base = OTHER; note = 2'-O-methyladenosine-3'-phosphate
  modified_base 20: mod_base = OTHER; note = 2'-O-methylguanosine-3'-phosphate
  modified_base 21: mod_base = OTHER; note = 2'-O-methylcytidine-3'-phosphorothioate
  modified_base 22: mod_base = OTHER; note = 2'-O-methylcytidine-3'-phosphorothioate
  modified_base 23: mod_base = OTHER; note = 2'-O-methyladenosine
aatgatgtcagtcttctcagcca

SEQ ID NO: 2306 - RNA, 21 nt, synthetic construct
  source 1..21: mol_type = other RNA
  modified_base 1: mod_base = OTHER; note = 2'-O-methylguanosine-3'-phosphorothioate
  modified_base 2: mod_base = OTHER; note = 2'-O-methylcytidine-3'-phosphorothioate
  modified_base 3: mod_base = OTHER; note = 2'-O-methyluridine-3'-phosphate
  modified_base 4: mod_base = OTHER; note = 2'-O-methylcytidine-3'-phosphate
  modified_base 5: mod_base = OTHER; note = 2'-O-methyladenosine-3'-phosphate
  modified_base 6: mod_base = OTHER; note = 2'-O-methylguanosine-3'-phosphate
  modified_base 7: mod_base = OTHER; note = 2'-deoxy-2'-fluoroguanosine-3'-phosphate
  modified_base 8: mod_base = OTHER; note = 2'-O-methyluridine-3'-phosphate
  modified_base 9: mod_base = OTHER; note = 2'-deoxy-2'-fluorouridine-3'-phosphate
  modified_base 10: mod_base = OTHER; note = 2'-deoxy-2'-fluorocytidine-3'-phosphate
  modified_base 11: mod_base = OTHER; note = 2'-deoxy-2'-fluoroadenosine-3'-phosphate
  modified_base 12: mod_base = OTHER; note = 2'-O-methyladenosine-3'-phosphate
  modified_base 13: mod_base = OTHER; note = 2'-O-methyladenosine-3'-phosphate
  modified_base 14: mod_base = OTHER; note = 2'-O-methylguanosine-3'-phosphate
  modified_base 15: mod_base = OTHER; note = 2'-O-methyluridine-3'-phosphate
  modified_base 16: mod_base = OTHER; note = 2'-O-methylguanosine-3'-phosphate
  modified_base 17: mod_base = OTHER; note = 2'-O-methyluridine-3'-phosphate
  modified_base 18: mod_base = OTHER; note = 2'-O-methyluridine-3'-phosphate
  modified_base 19: mod_base = OTHER; note = 2'-O-methylguanosine-3'-phosphate
  modified_base 20: mod_base = OTHER; note = 2'-O-methylguanosine-3'-phosphate
  modified_base 21: mod_base = OTHER; note = 2'-O-methyluridine-3'-phosphate ((2S,4R)-1-[29-[[2-(acetylamino)-2-deoxy-beta-D-galactopyra nosyl]oxy]-14,14-bis[[3-[[3-[[5-[[2-(acetylamino)-2-deoxy-b eta-D-galactopyranosyl]oxy]-1-oxopentyl]amino]propyl]amino] -3-oxopropoxy]methyl]-1,12,19,25-tetraoxo-16-oxa-13,20,24-t riazanonacos-1-yl]-4-hydroxy-2-pyrrolidinyl)methyl ester
gctcaggttcaaagtgttggt

SEQ ID NO: 2307 - RNA, 23 nt, synthetic construct
  source 1..23: mol_type = other RNA
  modified_base 1: mod_base = OTHER; note = 2'-O-methyladenosine-3'-phosphorothioate
  modified_base 2: mod_base = OTHER; note = 2'-deoxy-2'-fluorocytidine-3'-phosphorothioate
  modified_base 3: mod_base = OTHER; note = 2'-O-methylcytidine-3'-phosphate
  modified_base 4: mod_base = OTHER; note = 2'-O-methyladenosine-3'-phosphate
  modified_base 5: mod_base = OTHER; note = 2'-O-methyladenosine-3'-phosphate
  modified_base 6: mod_base = OTHER; note = 2'-deoxy-2'-fluorocytidine-3'-phosphate
  modified_base 7: mod_base = OTHER; note = 2'-O-methyladenosine-3'-phosphate
  modified_base 8: mod_base = OTHER; note = 2'-deoxy-2'-fluorocytidine-3'-phosphate
  modified_base 9: mod_base = OTHER; note = 2'-deoxy-2'-fluorouridine-3'-phosphate
  modified_base 10: mod_base = OTHER; note = 2'-O-methyluridine-3'-phosphate
  modified_base 11: mod_base = OTHER; note = 2'-O-methyluridine-3'-phosphate
  modified_base 12: mod_base = OTHER; note = 2'-O-methylguanosine-3'-phosphate
  modified_base 13: mod_base = OTHER; note = 2'-O-methyladenosine-3'-phosphate
  modified_base 14: mod_base = OTHER; note = 2'-deoxy-2'-fluoroadenosine-3'-phosphate
  modified_base 15: mod_base = OTHER; note = 2'-O-methylcytidine-3'-phosphate
  modified_base 16: mod_base = OTHER; note = 2'-deoxy-2'-fluorocytidine-3'-phosphate
  modified_base 17: mod_base = OTHER; note = 2'-O-methyluridine-3'-phosphate
  modified_base 18: mod_base = OTHER; note = 2'-O-methylguanosine-3'-phosphate
  modified_base 19: mod_base = OTHER; note = 2'-O-methyladenosine-3'-phosphate
  modified_base 20: mod_base = OTHER; note = 2'-O-methylguanosine-3'-phosphate
  modified_base 21: mod_base = OTHER; note = 2'-O-methylcytidine-3'-phosphorothioate
  modified_base 22: mod_base = OTHER; note = 2'-O-methyluridine-3'-phosphorothioate
  modified_base 23: mod_base = OTHER; note = 2'-O-methyluridine
accaacactttgaacctgagctt

SEQ ID NO: 2308 - RNA, 21 nt, synthetic construct
  source 1..21: mol_type = other RNA
  modified_base 1: mod_base = OTHER; note = 2'-O-methylcytidine-3'-phosphorothioate
  modified_base 2: mod_base = OTHER; note = 2'-O-methyluridine-3'-phosphorothioate
  modified_base 3: mod_base = OTHER; note = 2'-O-methylcytidine-3'-phosphate
  modified_base 4: mod_base = OTHER; note = 2'-O-methyladenosine-3'-phosphate
  modified_base 5: mod_base = OTHER; note = 2'-O-methylguanosine-3'-phosphate
  modified_base 6: mod_base = OTHER; note = 2'-O-methylguanosine-3'-phosphate
  modified_base 7: mod_base = OTHER; note = 2'-deoxy-2'-fluorouridine-3'-phosphate
  modified_base 8: mod_base = OTHER; note = 2'-O-methyluridine-3'-phosphate
  modified_base 9: mod_base = OTHER; note = 2'-deoxy-2'-fluorocytidine-3'-phosphate
  modified_base 10: mod_base = OTHER; note = 2'-deoxy-2'-fluoroadenosine-3'-phosphate
  modified_base 11: mod_base = OTHER; note = 2'-deoxy-2'-fluoroadenosine-3'-phosphate
  modified_base 12: mod_base = OTHER; note = 2'-O-methyladenosine-3'-phosphate
  modified_base 13: mod_base = OTHER; note = 2'-O-methylguanosine-3'-phosphate
  modified_base 14: mod_base = OTHER; note = 2'-O-methyluridine-3'-phosphate
  modified_base 15: mod_base = OTHER; note = 2'-O-methylguanosine-3'-phosphate
  modified_base 16: mod_base = OTHER; note = 2'-O-methyluridine-3'-phosphate
  modified_base 17: mod_base = OTHER; note = 2'-O-methyluridine-3'-phosphate
  modified_base 18: mod_base = OTHER; note = 2'-O-methylguanosine-3'-phosphate
  modified_base 19: mod_base = OTHER; note = 2'-O-methylguanosine-3'-phosphate
  modified_base 20: mod_base = OTHER; note = 2'-O-methyluridine-3'-phosphate
  modified_base 21: mod_base = OTHER; note = 2'-O-methyladenosine-3'-phosphate ((2S,4R)-1-[29-[[2-(acetylamino)-2-deoxy-beta-D-galactopyra nosyl]oxy]-14,14-bis[[3-[[3-[[5-[[2-(acetylamino)-2-deoxy-b eta-D-galactopyranosyl]oxy]-1-oxopentyl]amino]propyl]amino] -3-oxopropoxy]methyl]-1,12,19,25-tetraoxo-16-oxa-13,20,24-t riazanonacos-1-yl]-4-hydroxy-2-pyrrolidinyl)methyl ester
ctcaggttcaaagtgttggta

SEQ ID NO: 2309 - RNA, 23 nt, synthetic construct
  source 1..23: mol_type = other RNA
  modified_base 1: mod_base = OTHER; note = 2'-O-methyluridine-3'-phosphorothioate
  modified_base 2: mod_base = OTHER; note = 2'-deoxy-2'-fluoroadenosine-3'-phosphorothioate
  modified_base 3: mod_base = OTHER; note = 2'-O-methylcytidine-3'-phosphate
  modified_base 4: mod_base = OTHER; note = 2'-O-methylcytidine-3'-phosphate
  modified_base 5: mod_base = OTHER; note = 2'-O-methyladenosine-3'-phosphate
  modified_base 6: mod_base = OTHER; note = 2'-deoxy-2'-fluoroadenosine-3'-phosphate
  modified_base 7: mod_base = OTHER; note = 2'-O-methylcytidine-3'-phosphate
  modified_base 8: mod_base = OTHER; note = 2'-deoxy-2'-fluoroadenosine-3'-phosphate
  modified_base 9: mod_base = OTHER; note = 2'-deoxy-2'-fluorocytidine-3'-phosphate
  modified_base 10: mod_base = OTHER; note = 2'-O-methyluridine-3'-phosphate
  modified_base 11: mod_base = OTHER; note = 2'-O-methyluridine-3'-phosphate
  modified_base 12: mod_base = OTHER; note = 2'-O-methyluridine-3'-phosphate
  modified_base 13: mod_base = OTHER; note = 2'-O-methylguanosine-3'-phosphate
  modified_base 14: mod_base = OTHER; note = 2'-deoxy-2'-fluoroadenosine-3'-phosphate
  modified_base 15: mod_base = OTHER; note = 2'-O-methyladenosine-3'-phosphate
  modified_base 16: mod_base = OTHER; note = 2'-deoxy-2'-fluorocytidine-3'-phosphate
  modified_base 17: mod_base = OTHER; note = 2'-O-methylcytidine-3'-phosphate
  modified_base 18: mod_base = OTHER; note = 2'-O-methyluridine-3'-phosphate
  modified_base 19: mod_base = OTHER; note = 2'-O-methylguanosine-3'-phosphate
  modified_base 20: mod_base = OTHER; note = 2'-O-methyladenosine-3'-phosphate
  modified_base 21: mod_base = OTHER; note = 2'-O-methylguanosine-3'-phosphorothioate
  modified_base 22: mod_base = OTHER; note = 2'-O-methylcytidine-3'-phosphorothioate
  modified_base 23: mod_base = OTHER; note = 2'-O-methyluridine
taccaacactttgaacctgagct

SEQ ID NO: 2310 - RNA, 21 nt, synthetic construct
  source 1..21: mol_type = other RNA
  modified_base 1: mod_base = OTHER; note = 2'-O-methylguanosine-3'-phosphorothioate
  modified_base 2: mod_base = OTHER; note = 2'-O-methyluridine-3'-phosphorothioate
  modified_base 3: mod_base = OTHER; note = 2'-O-methyladenosine-3'-phosphate
  modified_base 4: mod_base = OTHER; note = 2'-O-methyladenosine-3'-phosphate
  modified_base 5: mod_base = OTHER; note = 2'-O-methylguanosine-3'-phosphate
  modified_base 6: mod_base = OTHER; note = 2'-O-methylcytidine-3'-phosphate
  modified_base 7: mod_base = OTHER; note = 2'-deoxy-2'-fluorouridine-3'-phosphate
  modified_base 8: mod_base = OTHER; note = 2'-O-methylcytidine-3'-phosphate
  modified_base 9: mod_base = OTHER; note = 2'-deoxy-2'-fluoroadenosine-3'-phosphate
  modified_base 10: mod_base = OTHER; note = 2'-deoxy-2'-fluoroguanosine-3'-phosphate
  modified_base 11: mod_base = OTHER; note = 2'-deoxy-2'-fluoroguanosine-3'-phosphate
  modified_base 12: mod_base = OTHER; note = 2'-O-methyluridine-3'-phosphate
  modified_base 13: mod_base = OTHER; note = 2'-O-methyluridine-3'-phosphate
  modified_base 14: mod_base = OTHER; note = 2'-O-methylcytidine-3'-phosphate
  modified_base 15: mod_base = OTHER; note = 2'-O-methyladenosine-3'-phosphate
  modified_base 16: mod_base = OTHER; note = 2'-O-methyladenosine-3'-phosphate
  modified_base 17: mod_base = OTHER; note = 2'-O-methyladenosine-3'-phosphate
  modified_base 18: mod_base = OTHER; note = 2'-O-methylguanosine-3'-phosphate
  modified_base 19: mod_base = OTHER; note = 2'-O-methyluridine-3'-phosphate
  modified_base 20: mod_base = OTHER; note = 2'-O-methylguanosine-3'-phosphate
  modified_base 21: mod_base = OTHER; note = 2'-O-methyluridine-3'-phosphate ((2S,4R)-1-[29-[[2-(acetylamino)-2-deoxy-beta-D-galactopyra nosyl]oxy]-14,14-bis[[3-[[3-[[5-[[2-(acetylamino)-2-deoxy-b eta-D-galactopyranosyl]oxy]-1-oxopentyl]amino]propyl]amino] -3-oxopropoxy]methyl]-1,12,19,25-tetraoxo-16-oxa-13,20,24-t riazanonacos-1-yl]-4-hydroxy-2-pyrrolidinyl)methyl ester
gtaagctcaggttcaaagtgt

SEQ ID NO: 2311 - RNA, 23 nt, synthetic construct
  source 1..23: mol_type = other RNA
  modified_base 1: mod_base = OTHER; note = 2'-O-methyladenosine-3'-phosphorothioate
  modified_base 2: mod_base = OTHER; note = 2'-deoxy-2'-fluorocytidine-3'-phosphorothioate
  modified_base 3: mod_base = OTHER; note = 2'-O-methyladenosine-3'-phosphate
  modified_base 4: mod_base = OTHER; note = 2'-O-methylcytidine-3'-phosphate
  modified_base 5: mod_base = OTHER; note = 2'-O-methyluridine-3'-phosphate
  modified_base 6: mod_base = OTHER; note = 2'-deoxy-2'-fluorouridine-3'-phosphate
  modified_base 7: mod_base = OTHER; note = 2'-O-methyluridine-3'-phosphate
  modified_base 8: mod_base = OTHER; note = 2'-deoxy-2'-fluoroguanosine-3'-phosphate
  modified_base 9: mod_base = OTHER; note = 2'-deoxy-2'-fluoroadenosine-3'-phosphate
  modified_base 10: mod_base = OTHER; note = 2'-O-methyladenosine-3'-phosphate
  modified_base 11: mod_base = OTHER; note = 2'-O-methylcytidine-3'-phosphate
  modified_base 12: mod_base = OTHER; note = 2'-O-methylcytidine-3'-phosphate
  modified_base 13: mod_base = OTHER; note = 2'-O-methyluridine-3'-phosphate
  modified_base 14: mod_base = OTHER; note = 2'-deoxy-2'-fluoroguanosine-3'-phosphate
  modified_base 15: mod_base = OTHER; note = 2'-O-methyladenosine-3'-phosphate
  modified_base 16: mod_base = OTHER; note = 2'-deoxy-2'-fluoroguanosine-3'-phosphate
  modified_base 17: mod_base = OTHER; note = 2'-O-methylcytidine-3'-phosphate
  modified_base 18: mod_base = OTHER; note = 2'-O-methyluridine-3'-phosphate
  modified_base 19: mod_base = OTHER; note = 2'-O-methyluridine-3'-phosphate
  modified_base 20: mod_base = OTHER; note = 2'-O-methyladenosine-3'-phosphate
  modified_base 21: mod_base = OTHER; note = 2'-O-methylcytidine-3'-phosphorothioate
  modified_base 22: mod_base = OTHER; note = 2'-O-methyladenosine-3'-phosphorothioate
  modified_base 23: mod_base = OTHER; note = 2'-O-methyladenosine
acactttgaacctgagcttacaa

SEQ ID NO: 2312 - RNA, 21 nt, synthetic construct
  source 1..21: mol_type = other RNA
  modified_base 1: mod_base = OTHER; note = 2'-O-methyluridine-3'-phosphorothioate
  modified_base 2: mod_base = OTHER; note = 2'-O-methylguanosine-3'-phosphorothioate
  modified_base 3: mod_base = OTHER; note = 2'-O-methyluridine-3'-phosphate
  modified_base 4: mod_base = OTHER; note = 2'-O-methyladenosine-3'-phosphate
  modified_base 5: mod_base = OTHER; note = 2'-O-methyladenosine-3'-phosphate
  modified_base 6: mod_base = OTHER; note = 2'-O-methylguanosine-3'-phosphate
  modified_base 7: mod_base = OTHER; note = 2'-deoxy-2'-fluorocytidine-3'-phosphate
  modified_base 8: mod_base = OTHER; note = 2'-O-methyluridine-3'-phosphate
  modified_base 9: mod_base = OTHER; note = 2'-deoxy-2'-fluorocytidine-3'-phosphate
  modified_base 10: mod_base = OTHER; note = 2'-deoxy-2'-fluoroadenosine-3'-phosphate
  modified_base 11: mod_base = OTHER; note = 2'-deoxy-2'-fluoroguanosine-3'-phosphate
  modified_base 12: mod_base = OTHER; note = 2'-O-methylguanosine-3'-phosphate
  modified_base 13: mod_base = OTHER; note = 2'-O-methyluridine-3'-phosphate
  modified_base 14: mod_base = OTHER; note = 2'-O-methyluridine-3'-phosphate
  modified_base 15: mod_base = OTHER; note = 2'-O-methylcytidine-3'-phosphate
  modified_base 16: mod_base = OTHER; note = 2'-O-methyladenosine-3'-phosphate
  modified_base 17: mod_base = OTHER; note = 2'-O-methyladenosine-3'-phosphate
  modified_base 18: mod_base = OTHER; note = 2'-O-methyladenosine-3'-phosphate
  modified_base 19: mod_base = OTHER; note = 2'-O-methylguanosine-3'-phosphate
  modified_base 20: mod_base = OTHER; note = 2'-O-methyluridine-3'-phosphate
  modified_base 21: mod_base = OTHER; note = 2'-O-methylguanosine-3'-phosphate ((2S,4R)-1-[29-[[2-(acetylamino)-2-deoxy-beta-D-galactopyra nosyl]oxy]-14,14-bis[[3-[[3-[[5-[[2-(acetylamino)-2-deoxy-b eta-D-galactopyranosyl]oxy]-1-oxopentyl]amino]propyl]amino] -3-oxopropoxy]methyl]-1,12,19,25-tetraoxo-16-oxa-13,20,24-t riazanonacos-1-yl]-4-hydroxy-2-pyrrolidinyl)methyl ester
tgtaagctcaggttcaaagtg

SEQ ID NO: 2313 - RNA, 23 nt, synthetic construct
  source 1..23: mol_type = other RNA
  modified_base 1: mod_base = OTHER; note = 2'-O-methylcytidine-3'-phosphorothioate
  modified_base 2: mod_base = OTHER; note = 2'-deoxy-2'-fluoroadenosine-3'-phosphorothioate
  modified_base 3: mod_base = OTHER; note = 2'-O-methylcytidine-3'-phosphate
  modified_base 4: mod_base = OTHER; note = 2'-O-methyluridine-3'-phosphate
  modified_base 5: mod_base = OTHER; note = 2'-O-methyluridine-3'-phosphate
  modified_base 6: mod_base = OTHER; note = 2'-deoxy-2'-fluorouridine-3'-phosphate
  modified_base 7: mod_base = OTHER; note = 2'-O-methylguanosine-3'-phosphate
  modified_base 8: mod_base = OTHER; note = 2'-deoxy-2'-fluoroadenosine-3'-phosphate
  modified_base 9: mod_base = OTHER; note = 2'-deoxy-2'-fluoroadenosine-3'-phosphate
  modified_base 10: mod_base = OTHER; note = 2'-O-methylcytidine-3'-phosphate
  modified_base 11: mod_base = OTHER; note = 2'-O-methylcytidine-3'-phosphate
  modified_base 12: mod_base = OTHER; note = 2'-O-methyluridine-3'-phosphate
  modified_base 13: mod_base = OTHER; note = 2'-O-methylguanosine-3'-phosphate
  modified_base 14: mod_base = OTHER; note = 2'-deoxy-2'-fluoroadenosine-3'-phosphate
  modified_base 15: mod_base = OTHER; note = 2'-O-methylguanosine-3'-phosphate
  modified_base 16: mod_base = OTHER; note = 2'-deoxy-2'-fluorocytidine-3'-phosphate
  modified_base 17: mod_base = OTHER; note = 2'-O-methyluridine-3'-phosphate
  modified_base 18: mod_base = OTHER; note = 2'-O-methyluridine-3'-phosphate
  modified_base 19: mod_base = OTHER; note = 2'-O-methyladenosine-3'-phosphate
  modified_base 20: mod_base = OTHER; note = 2'-O-methylcytidine-3'-phosphate
  modified_base 21: mod_base = OTHER; note = 2'-O-methyladenosine-3'-phosphorothioate
  modified_base 22: mod_base = OTHER; note = 2'-O-methyladenosine-3'-phosphorothioate
  modified_base 23: mod_base = OTHER; note = 2'-O-methyluridine
cactttgaacctgagcttacaat

SEQ ID NO: 2314 - RNA, 21 nt, synthetic construct
  source 1..21: mol_type = other RNA
  modified_base 1: mod_base = OTHER; note = 2'-O-methyladenosine-3'-phosphorothioate
  modified_base 2: mod_base = OTHER; note = 2'-O-methyluridine-3'-phosphorothioate
  modified_base 3: mod_base = OTHER; note = 2'-O-methylguanosine-3'-phosphate
  modified_base 4: mod_base = OTHER; note = 2'-O-methyluridine-3'-phosphate
  modified_base 5: mod_base = OTHER; note = 2'-O-methyladenosine-3'-phosphate
  modified_base 6: mod_base = OTHER; note = 2'-O-methyluridine-3'-phosphate
  modified_base 7: mod_base = OTHER; note = 2'-deoxy-2'-fluorouridine-3'-phosphate
  modified_base 8: mod_base = OTHER; note = 2'-O-methyladenosine-3'-phosphate
  modified_base 9: mod_base = OTHER; note = 2'-deoxy-2'-fluorocytidine-3'-phosphate
  modified_base 10: mod_base = OTHER; note = 2'-deoxy-2'-fluorouridine-3'-phosphate
  modified_base 11: mod_base = OTHER; note = 2'-deoxy-2'-fluorouridine-3'-phosphate
  modified_base 12: mod_base = OTHER; note = 2'-O-methylguanosine-3'-phosphate
  modified_base 13: mod_base = OTHER; note = 2'-O-methyladenosine-3'-phosphate
  modified_base 14: mod_base = OTHER; note = 2'-O-methylcytidine-3'-phosphate
  modified_base 15: mod_base = OTHER; note = 2'-O-methyladenosine-3'-phosphate
  modified_base 16: mod_base = OTHER; note = 2'-O-methyladenosine-3'-phosphate
  modified_base 17: mod_base = OTHER; note = 2'-O-methyladenosine-3'-phosphate
  modified_base 18: mod_base = OTHER; note = 2'-O-methylguanosine-3'-phosphate
  modified_base 19: mod_base = OTHER; note = 2'-O-methyladenosine-3'-phosphate
  modified_base 20: mod_base = OTHER; note = 2'-O-methylguanosine-3'-phosphate
  modified_base 21: mod_base = OTHER; note = 2'-O-methyladenosine-3'-phosphate ((2S,4R)-1-[29-[[2-(acetylamino)-2-deoxy-beta-D-galactopyra nosyl]oxy]-14,14-bis[[3-[[3-[[5-[[2-(acetylamino)-2-deoxy-b eta-D-galactopyranosyl]oxy]-1-oxopentyl]amino]propyl]amino] -3-oxopropoxy]methyl]-1,12,19,25-tetraoxo-16-oxa-13,20,24-t riazanonacos-1-yl]-4-hydroxy-2-pyrrolidinyl)methyl ester
atgtattacttgacaaagaga

SEQ ID NO: 2315 - RNA, 23 nt, synthetic construct
  source 1..23: mol_type = other RNA
  modified_base 1: mod_base = OTHER; note = 2'-O-methyluridine-3'-phosphorothioate
  modified_base 2: mod_base = OTHER; note = 2'-deoxy-2'-fluorocytidine-3'-phosphorothioate
  modified_base 3: mod_base = OTHER; note = 2'-O-methyluridine-3'-phosphate
  modified_base 4: mod_base = OTHER; note = 2'-O-methylcytidine-3'-phosphate
  modified_base 5: mod_base = OTHER; note = 2'-O-methyluridine-3'-phosphate
  modified_base 6: mod_base = OTHER; note = 2'-deoxy-2'-fluorouridine-3'-phosphate
  modified_base 7: mod_base = OTHER; note = 2'-O-methyluridine-3'-phosphate
  modified_base 8: mod_base = OTHER; note = 2'-deoxy-2'-fluoroguanosine-3'-phosphate
  modified_base 9: mod_base = OTHER; note = 2'-deoxy-2'-fluorouridine-3'-phosphate
  modified_base 10: mod_base = OTHER; note = 2'-O-methylcytidine-3'-phosphate
  modified_base 11: mod_base = OTHER; note = 2'-O-methyladenosine-3'-phosphate
  modified_base 12: mod_base = OTHER; note = 2'-O-methyladenosine-3'-phosphate
  modified_base 13: mod_base = OTHER; note = 2'-O-methylguanosine-3'-phosphate
  modified_base 14: mod_base = OTHER; note = 2'-deoxy-2'-fluorouridine-3'-phosphate
  modified_base 15: mod_base = OTHER; note = 2'-O-methyladenosine-3'-phosphate
  modified_base 16: mod_base = OTHER; note = 2'-deoxy-2'-fluoroadenosine-3'-phosphate
  modified_base 17: mod_base = OTHER; note = 2'-O-methyluridine-3'-phosphate
  modified_base 18: mod_base = OTHER; note = 2'-O-methyladenosine-3'-phosphate
  modified_base 19: mod_base = OTHER; note = 2'-O-methylcytidine-3'-phosphate
  modified_base 20: mod_base = OTHER; note = 2'-O-methyladenosine-3'-phosphate
  modified_base 21: mod_base = OTHER; note = 2'-O-methyluridine-3'-phosphorothioate
  modified_base 22: mod_base = OTHER; note = 2'-O-methylguanosine-3'-phosphorothioate
  modified_base 23: mod_base = OTHER; note = 2'-O-methylcytidine
tctctttgtcaagtaatacatgc

SEQ ID NO: 2316 - RNA, 21 nt, synthetic construct
  source 1..21: mol_type = other RNA
  modified_base 1: mod_base = OTHER; note = 2'-O-methyluridine-3'-phosphorothioate
  modified_base 2: mod_base = OTHER; note = 2'-O-methylguanosine-3'-phosphorothioate
  modified_base 3: mod_base = OTHER; note = 2'-O-methyluridine-3'-phosphate
  modified_base 4: mod_base = OTHER; note = 2'-O-methyladenosine-3'-phosphate
  modified_base 5: mod_base = OTHER; note = 2'-O-methyluridine-3'-phosphate
  modified_base 6: mod_base = OTHER; note = 2'-O-methyluridine-3'-phosphate
  modified_base 7: mod_base = OTHER; note = 2'-deoxy-2'-fluoroadenosine-3'-phosphate
  modified_base 8: mod_base = OTHER; note = 2'-O-methylcytidine-3'-phosphate
  modified_base 9: mod_base = OTHER; note = 2'-deoxy-2'-fluorouridine-3'-phosphate
  modified_base 10: mod_base = OTHER; note = 2'-deoxy-2'-fluorouridine-3'-phosphate
  modified_base 11: mod_base = OTHER; note = 2'-deoxy-2'-fluoroguanosine-3'-phosphate
  modified_base 12: mod_base = OTHER; note = 2'-O-methyladenosine-3'-phosphate
  modified_base 13: mod_base = OTHER; note = 2'-O-methylcytidine-3'-phosphate
  modified_base 14: mod_base = OTHER; note = 2'-O-methyladenosine-3'-phosphate
  modified_base 15: mod_base = OTHER; note = 2'-O-methyladenosine-3'-phosphate
  modified_base 16: mod_base = OTHER; note = 2'-O-methyladenosine-3'-phosphate
  modified_base 17: mod_base = OTHER; note = 2'-O-methylguanosine-3'-phosphate
  modified_base 18: mod_base = OTHER; note = 2'-O-methyladenosine-3'-phosphate
  modified_base 19: mod_base = OTHER; note = 2'-O-methylguanosine-3'-phosphate
  modified_base 20: mod_base = OTHER; note = 2'-O-methyladenosine-3'-phosphate
  modified_base 21: mod_base = OTHER; note = 2'-O-methylcytidine-3'-phosphate ((2S,4R)-1-[29-[[2-(acetylamino)-2-deoxy-beta-D-galactopyra nosyl]oxy]-14,14-bis[[3-[[3-[[5-[[2-(acetylamino)-2-deoxy-b eta-D-galactopyranosyl]oxy]-1-oxopentyl]amino]propyl]amino] -3-oxopropoxy]methyl]-1,12,19,25-tetraoxo-16-oxa-13,20,24-t riazanonacos-1-yl]-4-hydroxy-2-pyrrolidinyl)methyl ester
tgtattacttgacaaagagac

SEQ ID NO: 2317 - RNA, 23 nt, synthetic construct
  source 1..23: mol_type = other RNA
  modified_base 1: mod_base = OTHER; note = 2'-O-methylguanosine-3'-phosphorothioate
  modified_base 2: mod_base = OTHER; note = 2'-deoxy-2'-fluorouridine-3'-phosphorothioate
  modified_base 3: mod_base = OTHER; note = 2'-O-methylcytidine-3'-phosphate
  modified_base 4: mod_base = OTHER; note = 2'-O-methyluridine-3'-phosphate
  modified_base 5: mod_base = OTHER; note = 2'-O-methylcytidine-3'-phosphate
  modified_base 6: mod_base = OTHER; note = 2'-deoxy-2'-fluorouridine-3'-phosphate
  modified_base 7: mod_base = OTHER; note = 2'-O-methyluridine-3'-phosphate
  modified_base 8: mod_base = OTHER; note = 2'-deoxy-2'-fluorouridine-3'-phosphate
  modified_base 9: mod_base = OTHER; note = 2'-deoxy-2'-fluoroguanosine-3'-phosphate
  modified_base 10: mod_base = OTHER; note = 2'-O-methyluridine-3'-phosphate
  modified_base 11: mod_base = OTHER; note = 2'-O-methylcytidine-3'-phosphate
  modified_base 12: mod_base = OTHER; note = 2'-O-methyladenosine-3'-phosphate
  modified_base 13: mod_base = OTHER; note = 2'-O-methyladenosine-3'-phosphate
  modified_base 14: mod_base = OTHER; note = 2'-deoxy-2'-fluoroguanosine-3'-phosphate
  modified_base 15: mod_base = OTHER; note = 2'-O-methyluridine-3'-phosphate
  modified_base 16: mod_base = OTHER; note = 2'-deoxy-2'-fluoroadenosine-3'-phosphate
  modified_base 17: mod_base = OTHER; note = 2'-O-methyladenosine-3'-phosphate
  modified_base 18: mod_base = OTHER; note = 2'-O-methyluridine-3'-phosphate
  modified_base 19: mod_base = OTHER; note = 2'-O-methyladenosine-3'-phosphate
  modified_base 20: mod_base = OTHER; note = 2'-O-methylcytidine-3'-phosphate
  modified_base 21: mod_base = OTHER; note = 2'-O-methyladenosine-3'-phosphorothioate
  modified_base 22: mod_base = OTHER; note = 2'-O-methyluridine-3'-phosphorothioate
  modified_base 23: mod_base = OTHER; note = 2'-O-methylguanosine
gtctctttgtcaagtaatacatg

SEQ ID NO: 2318 - RNA, 21 nt, synthetic construct
  source 1..21: mol_type = other RNA
  modified_base 1: mod_base = OTHER; note = 2'-O-methylcytidine-3'-phosphorothioate
  modified_base 2: mod_base = OTHER; note = 2'-O-methyladenosine-3'-phosphorothioate
  modified_base 3: mod_base = OTHER; note = 2'-O-methylguanosine-3'-phosphate
  modified_base 4: mod_base = OTHER; note = 2'-O-methylcytidine-3'-phosphate
  modified_base 5: mod_base = OTHER; note = 2'-O-methyladenosine-3'-phosphate
  modified_base 6: mod_base = OTHER; note = 2'-O-methyluridine-3'-phosphate
  modified_base 7: mod_base = OTHER; note = 2'-deoxy-2'-fluoroguanosine-3'-phosphate
  modified_base 8: mod_base = OTHER; note = 2'-O-methyluridine-3'-phosphate
  modified_base 9: mod_base = OTHER; note = 2'-deoxy-2'-fluoroadenosine-3'-phosphate
  modified_base 10: mod_base = OTHER; note = 2'-deoxy-2'-fluorouridine-3'-phosphate
  modified_base 11: mod_base = OTHER; note = 2'-deoxy-2'-fluorouridine-3'-phosphate
  modified_base 12: mod_base = OTHER; note = 2'-O-methyladenosine-3'-phosphate
  modified_base 13: mod_base = OTHER; note = 2'-O-methylcytidine-3'-phosphate
  modified_base 14: mod_base = OTHER; note = 2'-O-methyluridine-3'-phosphate
  modified_base 15: mod_base = OTHER; note = 2'-O-methyluridine-3'-phosphate
  modified_base 16: mod_base = OTHER; note = 2'-O-methylguanosine-3'-phosphate
  modified_base 17: mod_base = OTHER; note = 2'-O-methyladenosine-3'-phosphate
  modified_base 18: mod_base = OTHER; note = 2'-O-methylcytidine-3'-phosphate
  modified_base 19: mod_base = OTHER; note = 2'-O-methyladenosine-3'-phosphate
  modified_base 20: mod_base = OTHER; note = 2'-O-methyladenosine-3'-phosphate
  modified_base 21: mod_base = OTHER; note = 2'-O-methyladenosine-3'-phosphate ((2S,4R)-1-[29-[[2-(acetylamino)-2-deoxy-beta-D-galactopyra nosyl]oxy]-14,14-bis[[3-[[3-[[5-[[2-(acetylamino)-2-deoxy-b eta-D-galactopyranosyl]oxy]-1-oxopentyl]amino]propyl]amino] -3-oxopropoxy]methyl]-1,12,19,25-tetraoxo-16-oxa-13,20,24-t riazanonacos-1-yl]-4-hydroxy-2-pyrrolidinyl)methyl ester
cagcatgtattacttgacaaa

SEQ ID NO: 2319 - RNA, 23 nt, synthetic construct
  source 1..23: mol_type = other RNA
  modified_base 1: mod_base = OTHER; note = 2'-O-methyluridine-3'-phosphorothioate
  modified_base 2: mod_base = OTHER; note = 2'-deoxy-2'-fluorouridine-3'-phosphorothioate
  modified_base 3: mod_base = OTHER; note = 2'-O-methyluridine-3'-phosphate
  modified_base 4: mod_base = OTHER; note = 2'-O-methylguanosine-3'-phosphate
  modified_base 5: mod_base = OTHER; note = 2'-O-methyluridine-3'-phosphate
  modified_base 6: mod_base = OTHER; note = 2'-deoxy-2'-fluorocytidine-3'-phosphate
  modified_base 7: mod_base = OTHER; note = 2'-O-methyladenosine-3'-phosphate
  modified_base 8: mod_base = OTHER; note = 2'-deoxy-2'-fluoroadenosine-3'-phosphate
  modified_base 9: mod_base = OTHER; note = 2'-deoxy-2'-fluoroguanosine-3'-phosphate
  modified_base 10: mod_base = OTHER; note = 2'-O-methyluridine-3'-phosphate
  modified_base 11: mod_base = OTHER; note = 2'-O-methyladenosine-3'-phosphate
  modified_base 12: mod_base = OTHER; note = 2'-O-methyladenosine-3'-phosphate
  modified_base 13: mod_base = OTHER; note = 2'-O-methyluridine-3'-phosphate
  modified_base 14: mod_base = OTHER; note = 2'-deoxy-2'-fluoroadenosine-3'-phosphate
  modified_base 15: mod_base = OTHER; note = 2'-O-methylcytidine-3'-phosphate
  modified_base 16: mod_base = OTHER; note = 2'-deoxy-2'-fluoroadenosine-3'-phosphate
  modified_base 17: mod_base = OTHER; note = 2'-O-methyluridine-3'-phosphate
  modified_base 18: mod_base = OTHER; note = 2'-O-methylguanosine-3'-phosphate
  modified_base 19: mod_base = OTHER; note = 2'-O-methylcytidine-3'-phosphate
  modified_base 20: mod_base = OTHER; note = 2'-O-methyluridine-3'-phosphate
  modified_base 21: mod_base = OTHER; note = 2'-O-methylguanosine-3'-phosphorothioate
  modified_base 22: mod_base = OTHER; note = 2'-O-methyladenosine-3'-phosphorothioate
  modified_base 23: mod_base = OTHER; note = 2'-O-methyladenosine
tttgtcaagtaatacatgctgaa

SEQ ID NO: 2320 - RNA, 21 nt, synthetic construct
  source 1..21: mol_type = other RNA
  modified_base 1: mod_base = OTHER; note = 2'-O-methyluridine-3'-phosphorothioate
  modified_base 2: mod_base = OTHER; note = 2'-O-methylcytidine-3'-phosphorothioate
  modified_base 3: mod_base = OTHER; note = 2'-O-methyladenosine-3'-phosphate
  modified_base 4: mod_base = OTHER; note = 2'-O-methylguanosine-3'-phosphate
  modified_base 5: mod_base = OTHER; note = 2'-O-methylcytidine-3'-phosphate
  modified_base 6: mod_base = OTHER; note = 2'-O-methyladenosine-3'-phosphate
  modified_base 7: mod_base = OTHER; note = 2'-deoxy-2'-fluorouridine-3'-phosphate
  modified_base 8: mod_base = OTHER; note = 2'-O-methylguanosine-3'-phosphate
  modified_base 9: mod_base = OTHER; note = 2'-deoxy-2'-fluorouridine-3'-phosphate
  modified_base 10: mod_base = OTHER; note = 2'-deoxy-2'-fluoroadenosine-3'-phosphate
  modified_base 11: mod_base = OTHER; note = 2'-deoxy-2'-fluorouridine-3'-phosphate
  modified_base 12: mod_base = OTHER; note = 2'-O-methyluridine-3'-phosphate
  modified_base 13: mod_base = OTHER; note = 2'-O-methyladenosine-3'-phosphate
  modified_base 14: mod_base = OTHER; note = 2'-O-methylcytidine-3'-phosphate
  modified_base 15: mod_base = OTHER; note = 2'-O-methyluridine-3'-phosphate
  modified_base 16: mod_base = OTHER; note = 2'-O-methyluridine-3'-phosphate
  modified_base 17: mod_base = OTHER; note = 2'-O-methylguanosine-3'-phosphate
  modified_base 18: mod_base = OTHER; note = 2'-O-methyladenosine-3'-phosphate
  modified_base 19: mod_base = OTHER; note = 2'-O-methylcytidine-3'-phosphate
  modified_base 20: mod_base = OTHER; note = 2'-O-methyladenosine-3'-phosphate
  modified_base 21: mod_base = OTHER; note = 2'-O-methyladenosine-3'-phosphate ((2S,4R)-1-[29-[[2-(acetylamino)-2-deoxy-beta-D-galactopyra nosyl]oxy]-14,14-bis[[3-[[3-[[5-[[2-(acetylamino)-2-deoxy-b eta-D-galactopyranosyl]oxy]-1-oxopentyl]amino]propyl]amino] -3-oxopropoxy]methyl]-1,12,19,25-tetraoxo-16-oxa-13,20,24-t riazanonacos-1-yl]-4-hydroxy-2-pyrrolidinyl)methyl ester
tcagcatgtattacttgacaa

SEQ ID NO: 2321 - RNA, 23 nt, synthetic construct
  source 1..23: mol_type = other RNA
  modified_base 1: mod_base = OTHER; note = 2'-O-methyluridine-3'-phosphorothioate
  modified_base 2: mod_base = OTHER; note = 2'-deoxy-2'-fluorouridine-3'-phosphorothioate
  modified_base 3: mod_base = OTHER; note = 2'-O-methylguanosine-3'-phosphate
  modified_base 4: mod_base = OTHER; note = 2'-O-methyluridine-3'-phosphate
  modified_base 5: mod_base = OTHER; note = 2'-O-methylcytidine-3'-phosphate
  modified_base 6: mod_base = OTHER; note = 2'-deoxy-2'-fluoroadenosine-3'-phosphate
  modified_base 7: mod_base = OTHER; note = 2'-O-methyladenosine-3'-phosphate
  modified_base 8: mod_base = OTHER; note = 2'-deoxy-2'-fluoroguanosine-3'-phosphate
  modified_base 9: mod_base = OTHER; note = 2'-deoxy-2'-fluorouridine-3'-phosphate
  modified_base 10: mod_base = OTHER; note = 2'-O-methyladenosine-3'-phosphate
  modified_base 11: mod_base = OTHER; note = 2'-O-methyladenosine-3'-phosphate
  modified_base 12: mod_base = OTHER; note = 2'-O-methyluridine-3'-phosphate
  modified_base 13: mod_base = OTHER; note = 2'-O-methyladenosine-3'-phosphate
  modified_base 14: mod_base = OTHER; note = 2'-deoxy-2'-fluorocytidine-3'-phosphate
  modified_base 15: mod_base = OTHER; note = 2'-O-methyladenosine-3'-phosphate
  modified_base 16: mod_base = OTHER; note = 2'-deoxy-2'-fluorouridine-3'-phosphate
  modified_base 17: mod_base = OTHER; note = 2'-O-methylguanosine-3'-phosphate
  modified_base 18: mod_base = OTHER; note = 2'-O-methylcytidine-3'-phosphate
  modified_base 19: mod_base = OTHER; note = 2'-O-methyluridine-3'-phosphate
  modified_base 20: mod_base = OTHER; note = 2'-O-methylguanosine-3'-phosphate
  modified_base 21: mod_base = OTHER; note = 2'-O-methyladenosine-3'-phosphorothioate
  modified_base 22: mod_base = OTHER; note = 2'-O-methyladenosine-3'-phosphorothioate
  modified_base 23: mod_base = OTHER; note = 2'-O-methyladenosine
ttgtcaagtaatacatgctgaaa

SEQ ID NO: 2322 - RNA, 21 nt, synthetic construct
  source 1..21: mol_type = other RNA
  modified_base 1: mod_base = OTHER; note = 2'-O-methylcytidine-3'-phosphorothioate
  modified_base 2: mod_base = OTHER; note = 2'-O-methyluridine-3'-phosphorothioate
  modified_base 3: mod_base = OTHER; note = 2'-O-methylguanosine-3'-phosphate
  modified_base 4: mod_base = OTHER; note = 2'-O-methylcytidine-3'-phosphate
  modified_base 5: mod_base = OTHER; note = 2'-O-methyladenosine-3'-phosphate
  modified_base 6: mod_base = OTHER; note = 2'-O-methyladenosine-3'-phosphate
  modified_base 7: mod_base = OTHER; note = 2'-deoxy-2'-fluorocytidine-3'-phosphate
  modified_base 8: mod_base = OTHER; note = 2'-O-methyluridine-3'-phosphate
  modified_base 9: mod_base = OTHER; note = 2'-deoxy-2'-fluoroguanosine-3'-phosphate
  modified_base 10: mod_base = OTHER; note = 2'-deoxy-2'-fluorouridine-3'-phosphate
  modified_base 11: mod_base = OTHER; note = 2'-deoxy-2'-fluoroadenosine-3'-phosphate
  modified_base 12: mod_base = OTHER; note = 2'-O-methyluridine-3'-phosphate
  modified_base 13: mod_base = OTHER; note = 2'-O-methyladenosine-3'-phosphate
  modified_base 14: mod_base = OTHER; note = 2'-O-methyluridine-3'-phosphate
  modified_base 15: mod_base = OTHER; note = 2'-O-methylcytidine-3'-phosphate
  modified_base 16: mod_base = OTHER; note = 2'-O-methyluridine-3'-phosphate
  modified_base 17: mod_base = OTHER; note = 2'-O-methyladenosine-3'-phosphate
  modified_base 18: mod_base = OTHER; note = 2'-O-methylcytidine-3'-phosphate
  modified_base 19: mod_base = OTHER; note = 2'-O-methyladenosine-3'-phosphate
  modified_base 20: mod_base = OTHER; note = 2'-O-methyladenosine-3'-phosphate
  modified_base 21: mod_base = OTHER; note = 2'-O-methylguanosine-3'-phosphate ((2S,4R)-1-[29-[[2-(acetylamino)-2-deoxy-beta-D-galactopyra nosyl]oxy]-14,14-bis[[3-[[3-[[5-[[2-(acetylamino)-2-deoxy-b eta-D-galactopyranosyl]oxy]-1-oxopentyl]amino]propyl]amino] -3-oxopropoxy]methyl]-1,12,19,25-tetraoxo-16-oxa-13,20,24-t riazanonacos-1-yl]-4-hydroxy-2-pyrrolidinyl)methyl ester
ctgcaactgtatatctacaag

SEQ ID NO: 2323 - RNA, 23 nt, synthetic construct
  source 1..23: mol_type = other RNA
  modified_base 1: mod_base = OTHER; note = 2'-O-methylcytidine-3'-phosphorothioate
  modified_base 2: mod_base = OTHER; note = 2'-deoxy-2'-fluorouridine-3'-phosphorothioate
  modified_base 3: mod_base = OTHER; note = 2'-O-methyluridine-3'-phosphate
  modified_base 4: mod_base = OTHER; note = 2'-O-methylguanosine-3'-phosphate
  modified_base 5: mod_base = OTHER; note = 2'-O-methyluridine-3'-phosphate
  modified_base 6: mod_base = OTHER; note = 2'-deoxy-2'-fluoroadenosine-3'-phosphate
  modified_base 7: mod_base = OTHER; note = 2'-O-methylguanosine-3'-phosphate
  modified_base 8: mod_base = OTHER; note = 2'-deoxy-2'-fluoroadenosine-3'-phosphate
  modified_base 9: mod_base = OTHER; note = 2'-deoxy-2'-fluorouridine-3'-phosphate
  modified_base 10: mod_base = OTHER; note = 2'-O-methyladenosine-3'-phosphate
  modified_base 11: mod_base = OTHER; note = 2'-O-methyluridine-3'-phosphate
  modified_base 12: mod_base = OTHER; note = 2'-O-methyladenosine-3'-phosphate
  modified_base 13: mod_base = OTHER; note = 2'-O-methylcytidine-3'-phosphate
  modified_base 14: mod_base = OTHER; note = 2'-deoxy-2'-fluoroadenosine-3'-phosphate
  modified_base 15: mod_base = OTHER; note = 2'-O-methylguanosine-3'-phosphate
  modified_base 16: mod_base = OTHER; note = 2'-deoxy-2'-fluorouridine-3'-phosphate
  modified_base 17: mod_base = OTHER; note = 2'-O-methyluridine-3'-phosphate
  modified_base 18: mod_base = OTHER; note = 2'-O-methylguanosine-3'-phosphate
  modified_base 19: mod_base = OTHER; note = 2'-O-methylcytidine-3'-phosphate
  modified_base 20: mod_base = OTHER; note = 2'-O-methyladenosine-3'-phosphate
  modified_base 21: mod_base = OTHER; note = 2'-O-methylguanosine-3'-phosphorothioate
  modified_base 22: mod_base = OTHER; note = 2'-O-methylcytidine-3'-phosphorothioate
  modified_base 23: mod_base = OTHER; note = 2'-O-methylcytidine
cttgtagatatacagttgcagcc

SEQ ID NO: 2324 - RNA, 21 nt, synthetic construct
  source 1..21: mol_type = other RNA
  modified_base 1: mod_base = OTHER; note = 2'-O-methyluridine-3'-phosphorothioate
  modified_base 2: mod_base = OTHER; note = 2'-O-methylguanosine-3'-phosphorothioate
  modified_base 3: mod_base = OTHER; note = 2'-O-methylcytidine-3'-phosphate
  modified_base 4: mod_base = OTHER; note = 2'-O-methyladenosine-3'-phosphate
  modified_base 5: mod_base = OTHER; note = 2'-O-methyladenosine-3'-phosphate
  modified_base 6: mod_base = OTHER; note = 2'-O-methylcytidine-3'-phosphate
  modified_base 7: mod_base = OTHER; note = 2'-deoxy-2'-fluorouridine-3'-phosphate
  modified_base 8: mod_base = OTHER; note = 2'-O-methylguanosine-3'-phosphate
  modified_base 9: mod_base = OTHER; note = 2'-deoxy-2'-fluorouridine-3'-phosphate
  modified_base 10: mod_base = OTHER; note = 2'-deoxy-2'-fluoroadenosine-3'-phosphate
  modified_base 11: mod_base = OTHER; note = 2'-deoxy-2'-fluorouridine-3'-phosphate
  modified_base 12: mod_base = OTHER; note = 2'-O-methyladenosine-3'-phosphate
  modified_base 13: mod_base = OTHER; note = 2'-O-methyluridine-3'-phosphate
  modified_base 14: mod_base = OTHER; note = 2'-O-methylcytidine-3'-phosphate
  modified_base 15: mod_base = OTHER; note = 2'-O-methyluridine-3'-phosphate
  modified_base 16: mod_base = OTHER; note = 2'-O-methyladenosine-3'-phosphate
  modified_base 17: mod_base = OTHER; note = 2'-O-methylcytidine-3'-phosphate
  modified_base 18: mod_base = OTHER; note = 2'-O-methyladenosine-3'-phosphate
  modified_base 19: mod_base = OTHER; note = 2'-O-methyladenosine-3'-phosphate
  modified_base 20: mod_base = OTHER; note = 2'-O-methylguanosine-3'-phosphate
  modified_base 21: mod_base = OTHER; note = 2'-O-methylguanosine-3'-phosphate ((2S,4R)-1-[29-[[2-(acetylamino)-2-deoxy-beta-D-galactopyra nosyl]oxy]-14,14-bis[[3-[[3-[[5-[[2-(acetylamino)-2-deoxy-b eta-D-galactopyranosyl]oxy]-1-oxopentyl]amino]propyl]amino] -3-oxopropoxy]methyl]-1,12,19,25-tetraoxo-16-oxa-13,20,24-t riazanonacos-1-yl]-4-hydroxy-2-pyrrolidinyl)methyl ester
tgcaactgtatatctacaagg

SEQ ID NO: 2325 - RNA, 23 nt, synthetic construct
  source 1..23: mol_type = other RNA
  modified_base 1: mod_base = OTHER; note = 2'-O-methylcytidine-3'-phosphorothioate
  modified_base 2: mod_base = OTHER; note = 2'-deoxy-2'-fluorocytidine-3'-phosphorothioate
  modified_base 3: mod_base = OTHER; note = 2'-O-methyluridine-3'-phosphate
  modified_base 4: mod_base = OTHER; note = 2'-O-methyluridine-3'-phosphate
  modified_base 5: mod_base = OTHER; note = 2'-O-methylguanosine-3'-phosphate
  modified_base 6: mod_base = OTHER; note = 2'-deoxy-2'-fluorouridine-3'-phosphate
  modified_base 7: mod_base = OTHER; note = 2'-O-methyladenosine-3'-phosphate
  modified_base 8: mod_base = OTHER; note = 2'-deoxy-2'-fluoroguanosine-3'-phosphate
  modified_base 9: mod_base = OTHER; note = 2'-deoxy-2'-fluoroadenosine-3'-phosphate
  modified_base 10: mod_base = OTHER; note = 2'-O-methyluridine-3'-phosphate
  modified_base 11: mod_base = OTHER; note = 2'-O-methyladenosine-3'-phosphate
  modified_base 12: mod_base = OTHER; note = 2'-O-methyluridine-3'-phosphate
  modified_base 13: mod_base = OTHER; note = 2'-O-methyladenosine-3'-phosphate
  modified_base 14: mod_base = OTHER; note = 2'-deoxy-2'-fluorocytidine-3'-phosphate
  modified_base 15: mod_base = OTHER; note = 2'-O-methyladenosine-3'-phosphate
  modified_base 16: mod_base = OTHER; note = 2'-deoxy-2'-fluoroguanosine-3'-phosphate
  modified_base 17: mod_base = OTHER; note = 2'-O-methyluridine-3'-phosphate
  modified_base 18: mod_base = OTHER; note = 2'-O-methyluridine-3'-phosphate
  modified_base 19: mod_base = OTHER; note = 2'-O-methylguanosine-3'-phosphate
  modified_base 20: mod_base = OTHER; note = 2'-O-methylcytidine-3'-phosphate
  modified_base 21: mod_base = OTHER; note = 2'-O-methyladenosine-3'-phosphorothioate
  modified_base 22: mod_base = OTHER; note = 2'-O-methylguanosine-3'-phosphorothioate
  modified_base 23: mod_base = OTHER; note = 2'-O-methylcytidine
ccttgtagatatacagttgcagc

SEQ ID NO: 2326 - RNA, 21 nt, synthetic construct
  source 1..21: mol_type = other RNA
  modified_base 1: mod_base = OTHER; note = 2'-O-methyluridine-3'-phosphorothioate
  modified_base 2: mod_base = OTHER; note = 2'-O-methyluridine-3'-phosphorothioate
  modified_base 3: mod_base = OTHER; note = 2'-O-methylguanosine-3'-phosphate
  modified_base 4: mod_base = OTHER; note = 2'-O-methylguanosine-3'-phosphate
  modified_base 5: mod_base = OTHER; note = 2'-O-methylcytidine-3'-phosphate
  modified_base 6: mod_base = OTHER; note = 2'-O-methyluridine-3'-phosphate
  modified_base 7: mod_base = OTHER; note = 2'-deoxy-2'-fluoroguanosine-3'-phosphate
  modified_base 8: mod_base = OTHER; note = 2'-O-methylcytidine-3'-phosphate
  modified_base 9: mod_base = OTHER; note = 2'-deoxy-2'-fluoroadenosine-3'-phosphate
  modified_base 10: mod_base = OTHER; note = 2'-deoxy-2'-fluoroadenosine-3'-phosphate
  modified_base 11: mod_base = OTHER; note = 2'-deoxy-2'-fluorocytidine-3'-phosphate
  modified_base 12: mod_base = OTHER; note = 2'-O-methyluridine-3'-phosphate
  modified_base 13: mod_base = OTHER; note = 2'-O-methylguanosine-3'-phosphate
  modified_base 14: mod_base = OTHER; note = 2'-O-methyluridine-3'-phosphate
  modified_base 15: mod_base = OTHER; note = 2'-O-methyladenosine-3'-phosphate
  modified_base 16: mod_base = OTHER; note = 2'-O-methyluridine-3'-phosphate
  modified_base 17: mod_base = OTHER; note = 2'-O-methyladenosine-3'-phosphate
  modified_base 18: mod_base = OTHER; note = 2'-O-methyluridine-3'-phosphate
  modified_base 19: mod_base = OTHER; note = 2'-O-methylcytidine-3'-phosphate
  modified_base 20: mod_base = OTHER; note = 2'-O-methyluridine-3'-phosphate
  modified_base 21: mod_base = OTHER; note = 2'-O-methyladenosine-3'-phosphate ((2S,4R)-1-[29-[[2-(acetylamino)-2-deoxy-beta-D-galactopyra nosyl]oxy]-14,14-bis[[3-[[3-[[5-[[2-(acetylamino)-2-deoxy-b eta-D-galactopyranosyl]oxy]-1-oxopentyl]amino]propyl]amino] -3-oxopropoxy]methyl]-1,12,19,25-tetraoxo-16-oxa-13,20,24-t riazanonacos-1-yl]-4-hydroxy-2-pyrrolidinyl)methyl ester
ttggctgcaactgtatatcta

SEQ ID NO: 2327 - RNA, 23 nt, synthetic construct
  source 1..23: mol_type = other RNA
  modified_base 1: mod_base = OTHER; note = 2'-O-methyluridine-3'-phosphorothioate
  modified_base 2: mod_base = OTHER; note = 2'-deoxy-2'-fluoroadenosine-3'-phosphorothioate
  modified_base 3: mod_base = OTHER; note = 2'-O-methylguanosine-3'-phosphate
  modified_base 4: mod_base = OTHER; note = 2'-O-methyladenosine-3'-phosphate
  modified_base 5: mod_base = OTHER; note = 2'-O-methyluridine-3'-phosphate
  modified_base 6: mod_base = OTHER; note = 2'-deoxy-2'-fluoroadenosine-3'-phosphate
  modified_base 7: mod_base = OTHER; note = 2'-O-methyluridine-3'-phosphate
  modified_base 8: mod_base = OTHER; note = 2'-deoxy-2'-fluoroadenosine-3'-phosphate
  modified_base 9: mod_base = OTHER; note = 2'-deoxy-2'-fluorocytidine-3'-phosphate
  modified_base 10: mod_base = OTHER; note = 2'-O-methyladenosine-3'-phosphate
  modified_base 11: mod_base = OTHER; note = 2'-O-methylguanosine-3'-phosphate
  modified_base 12: mod_base = OTHER; note = 2'-O-methyluridine-3'-phosphate
  modified_base 13: mod_base = OTHER; note = 2'-O-methyluridine-3'-phosphate
  modified_base 14: mod_base = OTHER; note = 2'-deoxy-2'-fluoroguanosine-3'-phosphate
  modified_base 15: mod_base = OTHER; note = 2'-O-methylcytidine-3'-phosphate
  modified_base 16: mod_base = OTHER; note = 2'-deoxy-2'-fluoroadenosine-3'-phosphate
  modified_base 17: mod_base = OTHER; note = 2'-O-methylguanosine-3'-phosphate
  modified_base 18: mod_base = OTHER; note = 2'-O-methylcytidine-3'-phosphate
  modified_base 19: mod_base = OTHER; note = 2'-O-methylcytidine-3'-phosphate
  modified_base 20: mod_base = OTHER; note = 2'-O-methyladenosine-3'-phosphate
  modified_base 21: mod_base = OTHER; note = 2'-O-methyladenosine-3'-phosphorothioate
  modified_base 22: mod_base = OTHER; note = 2'-O-methylcytidine-3'-phosphorothioate
  modified_base 23: mod_base = OTHER; note = 2'-O-methylguanosine
tagatatacagttgcagccaacg

SEQ ID NO: 2328 - RNA, 21 nt, synthetic construct
  source 1..21: mol_type = other RNA
  modified_base 1: mod_base = OTHER; note = 2'-O-methylguanosine-3'-phosphorothioate
  modified_base 2: mod_base = OTHER; note = 2'-O-methyluridine-3'-phosphorothioate
  modified_base 3: mod_base = OTHER; note = 2'-O-methyluridine-3'-phosphate
  modified_base 4: mod_base = OTHER; note = 2'-O-methylguanosine-3'-phosphate
  modified_base 5: mod_base = OTHER; note = 2'-O-methylguanosine-3'-phosphate
  modified_base 6: mod_base = OTHER; note = 2'-O-methylcytidine-3'-phosphate
  modified_base 7: mod_base = OTHER; note = 2'-deoxy-2'-fluorouridine-3'-phosphate
  modified_base 8: mod_base = OTHER; note = 2'-O-methylguanosine-3'-phosphate
  modified_base 9: mod_base = OTHER; note = 2'-deoxy-2'-fluorocytidine-3'-phosphate
  modified_base 10: mod_base = OTHER; note = 2'-deoxy-2'-fluoroadenosine-3'-phosphate
  modified_base 11: mod_base = OTHER; note = 2'-deoxy-2'-fluoroadenosine-3'-phosphate
  modified_base 12: mod_base = OTHER; note = 2'-O-methylcytidine-3'-phosphate
  modified_base 13: mod_base = OTHER; note = 2'-O-methyluridine-3'-phosphate
  modified_base 14: mod_base = OTHER; note = 2'-O-methylguanosine-3'-phosphate
  modified_base 15: mod_base = OTHER; note = 2'-O-methyluridine-3'-phosphate
  modified_base 16: mod_base = OTHER; note = 2'-O-methyladenosine-3'-phosphate
  modified_base 17: mod_base = OTHER; note = 2'-O-methyluridine-3'-phosphate
  modified_base 18: mod_base = OTHER; note = 2'-O-methyladenosine-3'-phosphate
  modified_base 19: mod_base = OTHER; note = 2'-O-methyluridine-3'-phosphate
  modified_base 20: mod_base = OTHER; note = 2'-O-methylcytidine-3'-phosphate
  modified_base 21: mod_base = OTHER; note = 2'-O-methyluridine-3'-phosphate ((2S,4R)-1-[29-[[2-(acetylamino)-2-deoxy-beta-D-galactopyra nosyl]oxy]-14,14-bis[[3-[[3-[[5-[[2-(acetylamino)-2-deoxy-b eta-D-galactopyranosyl]oxy]-1-oxopentyl]amino]propyl]amino] -3-oxopropoxy]methyl]-1,12,19,25-tetraoxo-16-oxa-13,20,24-t riazanonacos-1-yl]-4-hydroxy-2-pyrrolidinyl)methyl ester
gttggctgcaactgtatatct

SEQ ID NO: 2329 - RNA, 23 nt, synthetic construct
  source 1..23: mol_type = other RNA
  modified_base 1: mod_base = OTHER; note = 2'-O-methyladenosine-3'-phosphorothioate
  modified_base 2: mod_base = OTHER; note = 2'-deoxy-2'-fluoroguanosine-3'-phosphorothioate
  modified_base 3: mod_base = OTHER; note = 2'-O-methyladenosine-3'-phosphate
  modified_base 4: mod_base = OTHER; note = 2'-O-methyluridine-3'-phosphate
  modified_base 5: mod_base = OTHER; note = 2'-O-methyladenosine-3'-phosphate
  modified_base 6: mod_base = OTHER; note = 2'-deoxy-2'-fluorouridine-3'-phosphate
  modified_base 7: mod_base = OTHER; note = 2'-O-methyladenosine-3'-phosphate
  modified_base 8: mod_base = OTHER; note = 2'-deoxy-2'-fluorocytidine-3'-phosphate
  modified_base 9: mod_base = OTHER; note = 2'-deoxy-2'-fluoroadenosine-3'-phosphate
  modified_base 10: mod_base = OTHER; note = 2'-O-methylguanosine-3'-phosphate
  modified_base 11: mod_base = OTHER; note = 2'-O-methyluridine-3'-phosphate
  modified_base 12: mod_base = OTHER; note = 2'-O-methyluridine-3'-phosphate
  modified_base 13: mod_base = OTHER; note = 2'-O-methylguanosine-3'-phosphate
  modified_base 14: mod_base = OTHER; note = 2'-deoxy-2'-fluorocytidine-3'-phosphate
  modified_base 15: mod_base = OTHER; note = 2'-O-methyladenosine-3'-phosphate
  modified_base 16: mod_base = OTHER; note = 2'-deoxy-2'-fluoroguanosine-3'-phosphate
  modified_base 17: mod_base = OTHER; note = 2'-O-methylcytidine-3'-phosphate
  modified_base 18: mod_base = OTHER; note = 2'-O-methylcytidine-3'-phosphate
  modified_base 19: mod_base = OTHER; note = 2'-O-methyladenosine-3'-phosphate
  modified_base 20: mod_base = OTHER; note = 2'-O-methyladenosine-3'-phosphate
  modified_base 21: mod_base = OTHER; note = 2'-O-methylcytidine-3'-phosphorothioate
  modified_base 22: mod_base = OTHER; note = 2'-O-methylguanosine-3'-phosphorothioate
  modified_base 23: mod_base = OTHER; note = 2'-O-methyladenosine
agatatacagttgcagccaacga

SEQ ID NO: 2330 - RNA, 21 nt, synthetic construct
  source 1..21: mol_type = other RNA
  modified_base 1: mod_base = OTHER; note = 2'-O-methylcytidine-3'-phosphorothioate
  modified_base 2: mod_base = OTHER; note = 2'-O-methyladenosine-3'-phosphorothioate
  modified_base 3: mod_base = OTHER; note = 2'-O-methyladenosine-3'-phosphate
  modified_base 4: mod_base = OTHER; note = 2'-O-methyladenosine-3'-phosphate
  modified_base 5: mod_base = OTHER; note = 2'-O-methyluridine-3'-phosphate
  modified_base 6: mod_base = OTHER; note = 2'-O-methylguanosine-3'-phosphate
  modified_base 7: mod_base = OTHER; note = 2'-deoxy-2'-fluoroadenosine-3'-phosphate
  modified_base 8: mod_base = OTHER; note = 2'-O-methyluridine-3'-phosphate
  modified_base 9: mod_base = OTHER; note = 2'-deoxy-2'-fluoroguanosine-3'-phosphate
  modified_base 10: mod_base = OTHER; note = 2'-deoxy-2'-fluoroadenosine-3'-phosphate
  modified_base 11: mod_base = OTHER; note = 2'-deoxy-2'-fluoroadenosine-3'-phosphate
  modified_base 12: mod_base = OTHER; note = 2'-O-methylguanosine-3'-phosphate
  modified_base 13: mod_base = OTHER; note = 2'-O-methyladenosine-3'-phosphate
  modified_base 14: mod_base = OTHER; note = 2'-O-methyladenosine-3'-phosphate
  modified_base 15: mod_base = OTHER; note = 2'-O-methyladenosine-3'-phosphate
  modified_base 16: mod_base = OTHER; note = 2'-O-methylcytidine-3'-phosphate
  modified_base 17: mod_base = OTHER; note = 2'-O-methyluridine-3'-phosphate
  modified_base 18: mod_base = OTHER; note = 2'-O-methyluridine-3'-phosphate
  modified_base 19: mod_base = OTHER; note = 2'-O-methyluridine-3'-phosphate
  modified_base 20: mod_base = OTHER; note = 2'-O-methylguanosine-3'-phosphate
  modified_base 21: mod_base = OTHER; note = 2'-O-methylguanosine-3'-phosphate ((2S,4R)-1-[29-[[2-(acetylamino)-2-deoxy-beta-D-galactopyra nosyl]oxy]-14,14-bis[[3-[[3-[[5-[[2-(acetylamino)-2-deoxy-b eta-D-galactopyranosyl]oxy]-1-oxopentyl]amino]propyl]amino] -3-oxopropoxy]methyl]-1,12,19,25-tetraoxo-16-oxa-13,20,24-t riazanonacos-1-yl]-4-hydroxy-2-pyrrolidinyl)methyl ester
caaatgatgaagaaactttgg

SEQ ID NO: 2331 - RNA, 23 nt, synthetic construct
  source 1..23: mol_type = other RNA
  modified_base 1: mod_base = OTHER; note = 2'-O-methylcytidine-3'-phosphorothioate
  modified_base 2: mod_base = OTHER; note = 2'-deoxy-2'-fluorocytidine-3'-phosphorothioate
  modified_base 3: mod_base = OTHER; note = 2'-O-methyladenosine-3'-phosphate
  modified_base 4: mod_base = OTHER; note = 2'-O-methyladenosine-3'-phosphate
  modified_base 5: mod_base = OTHER; note = 2'-O-methyladenosine-3'-phosphate
  modified_base 6: mod_base = OTHER; note = 2'-deoxy-2'-fluoroguanosine-3'-phosphate
  modified_base 7: mod_base = OTHER; note = 2'-O-methyluridine-3'-phosphate
  modified_base 8: mod_base = OTHER; note = 2'-deoxy-2'-fluorouridine-3'-phosphate
  modified_base 9: mod_base = OTHER; note = 2'-deoxy-2'-fluorouridine-3'-phosphate
  modified_base 10: mod_base = OTHER; note = 2'-O-methylcytidine-3'-phosphate
  modified_base 11: mod_base = OTHER; note = 2'-O-methyluridine-3'-phosphate
  modified_base 12: mod_base = OTHER; note = 2'-O-methyluridine-3'-phosphate
  modified_base 13: mod_base = OTHER; note = 2'-O-methylcytidine-3'-phosphate
  modified_base 14: mod_base = OTHER; note = 2'-deoxy-2'-fluoroadenosine-3'-phosphate
  modified_base 15: mod_base = OTHER; note = 2'-O-methyluridine-3'-phosphate
  modified_base 16: mod_base = OTHER; note = 2'-deoxy-2'-fluorocytidine-3'-phosphate
  modified_base 17: mod_base = OTHER; note = 2'-O-methyladenosine-3'-phosphate
  modified_base 18: mod_base = OTHER; note = 2'-O-methyluridine-3'-phosphate
  modified_base 19: mod_base = OTHER; note = 2'-O-methyluridine-3'-phosphate
  modified_base 20: mod_base = OTHER; note = 2'-O-methyluridine-3'-phosphate
  modified_base 21: mod_base = OTHER; note = 2'-O-methylguanosine-3'-phosphorothioate
  modified_base 22: mod_base = OTHER; note = 2'-O-methylcytidine-3'-phosphorothioate
  modified_base 23: mod_base = OTHER; note = 2'-O-methylcytidine
ccaaagtttcttcatcatttgcc

SEQ ID NO: 2332 - RNA, 21 nt, synthetic construct
  source 1..21: mol_type = other RNA
  modified_base 1: mod_base = OTHER; note = 2'-O-methyladenosine-3'-phosphorothioate
  modified_base 2: mod_base = OTHER; note = 2'-O-methyladenosine-3'-phosphorothioate
  modified_base 3: mod_base = OTHER; note = 2'-O-methyladenosine-3'-phosphate
  modified_base 4: mod_base = OTHER; note = 2'-O-methyluridine-3'-phosphate
  modified_base 5: mod_base = OTHER; note = 2'-O-methylguanosine-3'-phosphate
  modified_base 6: mod_base = OTHER; note = 2'-O-methyladenosine-3'-phosphate
  modified_base 7: mod_base = OTHER; note = 2'-deoxy-2'-fluorouridine-3'-phosphate
  modified_base 8: mod_base = OTHER; note = 2'-O-methylguanosine-3'-phosphate
  modified_base 9: mod_base = OTHER; note = 2'-deoxy-2'-fluoroadenosine-3'-phosphate
  modified_base 10: mod_base = OTHER; note = 2'-deoxy-2'-fluoroadenosine-3'-phosphate
  modified_base 11: mod_base = OTHER; note = 2'-deoxy-2'-fluoroguanosine-3'-phosphate
  modified_base 12: mod_base = OTHER; note = 2'-O-methyladenosine-3'-phosphate
  modified_base 13: mod_base = OTHER; note = 2'-O-methyladenosine-3'-phosphate
  modified_base 14: mod_base = OTHER; note = 2'-O-methyladenosine-3'-phosphate
  modified_base 15: mod_base = OTHER; note = 2'-O-methylcytidine-3'-phosphate
  modified_base 16: mod_base = OTHER; note = 2'-O-methyluridine-3'-phosphate
  modified_base 17: mod_base = OTHER; note = 2'-O-methyluridine-3'-phosphate
  modified_base 18: mod_base = OTHER; note = 2'-O-methyluridine-3'-phosphate
  modified_base 19: mod_base = OTHER; note = 2'-O-methylguanosine-3'-phosphate
  modified_base 20: mod_base = OTHER; note = 2'-O-methylguanosine-3'-phosphate
  modified_base 21: mod_base = OTHER; note = 2'-O-methylcytidine-3'-phosphate ((2S,4R)-1-[29-[[2-(acetylamino)-2-deoxy-beta-D-galactopyra nosyl]oxy]-14,14-bis[[3-[[3-[[5-[[2-(acetylamino)-2-deoxy-b eta-D-galactopyranosyl]oxy]-1-oxopentyl]amino]propyl]amino] -3-oxopropoxy]methyl]-1,12,19,25-tetraoxo-16-oxa-13,20,24-t riazanonacos-1-yl]-4-hydroxy-2-pyrrolidinyl)methyl ester
aaatgatgaagaaactttggc

SEQ ID NO: 2333 - RNA, 23 nt, synthetic construct
  source 1..23: mol_type = other RNA
  modified_base 1: mod_base = OTHER; note = 2'-O-methylguanosine-3'-phosphorothioate
  modified_base 2: mod_base = OTHER; note = 2'-deoxy-2'-fluorocytidine-3'-phosphorothioate
  modified_base 3: mod_base = OTHER; note = 2'-O-methylcytidine-3'-phosphate
  modified_base 4: mod_base = OTHER; note = 2'-O-methyladenosine-3'-phosphate
  modified_base 5: mod_base = OTHER; note = 2'-O-methyladenosine-3'-phosphate
  modified_base 6: mod_base = OTHER; note = 2'-deoxy-2'-fluoroadenosine-3'-phosphate
  modified_base 7: mod_base = OTHER; note = 2'-O-methylguanosine-3'-phosphate
  modified_base 8: mod_base = OTHER; note = 2'-deoxy-2'-fluorouridine-3'-phosphate
  modified_base 9: mod_base = OTHER; note = 2'-deoxy-2'-fluorouridine-3'-phosphate
  modified_base 10: mod_base = OTHER; note = 2'-O-methyluridine-3'-phosphate
  modified_base 11: mod_base = OTHER; note = 2'-O-methylcytidine-3'-phosphate
  modified_base 12: mod_base = OTHER; note = 2'-O-methyluridine-3'-phosphate
  modified_base 13: mod_base = OTHER; note = 2'-O-methyluridine-3'-phosphate
  modified_base 14: mod_base = OTHER; note = 2'-deoxy-2'-fluorocytidine-3'-phosphate
  modified_base 15: mod_base = OTHER; note = 2'-O-methyladenosine-3'-phosphate
  modified_base 16: mod_base = OTHER; note = 2'-deoxy-2'-fluorouridine-3'-phosphate
  modified_base 17: mod_base = OTHER; note = 2'-O-methylcytidine-3'-phosphate
  modified_base 18: mod_base = OTHER; note = 2'-O-methyladenosine-3'-phosphate
  modified_base 19: mod_base = OTHER; note = 2'-O-methyluridine-3'-phosphate
  modified_base 20: mod_base = OTHER; note = 2'-O-methyluridine-3'-phosphate
  modified_base 21: mod_base = OTHER; note = 2'-O-methyluridine-3'-phosphorothioate
  modified_base 22: mod_base = OTHER; note = 2'-O-methylguanosine-3'-phosphorothioate
  modified_base 23: mod_base = OTHER; note = 2'-O-methylcytidine
gccaaagtttcttcatcatttgc

SEQ ID NO: 2334 - RNA, 21 nt, synthetic construct
  source 1..21: mol_type = other RNA
  modified_base 1: mod_base = OTHER; note = 2'-O-methylguanosine-3'-phosphorothioate
  modified_base 2: mod_base = OTHER; note = 2'-O-methylguanosine-3'-phosphorothioate
  modified_base 3: mod_base = OTHER; note = 2'-O-methylguanosine-3'-phosphate
  modified_base 4: mod_base = OTHER; note = 2'-O-methylguanosine-3'-phosphate
  modified_base 5: mod_base = OTHER; note = 2'-O-methylcytidine-3'-phosphate
  modified_base 6: mod_base = OTHER; note = 2'-O-methyladenosine-3'-phosphate
  modified_base 7: mod_base = OTHER; note = 2'-deoxy-2'-fluoroadenosine-3'-phosphate
  modified_base 8: mod_base = OTHER; note = 2'-O-methyladenosine-3'-phosphate
  modified_base 9: mod_base = OTHER; note = 2'-deoxy-2'-fluorouridine-3'-phosphate
  modified_base 10: mod_base = OTHER; note = 2'-deoxy-2'-fluoroguanosine-3'-phosphate
  modified_base 11: mod_base = OTHER; note = 2'-deoxy-2'-fluoroadenosine-3'-phosphate
  modified_base 12: mod_base = OTHER; note = 2'-O-methyluridine-3'-phosphate
  modified_base 13: mod_base = OTHER; note = 2'-O-methylguanosine-3'-phosphate
  modified_base 14: mod_base = OTHER; note = 2'-O-methyladenosine-3'-phosphate
  modified_base 15: mod_base = OTHER; note = 2'-O-methyladenosine-3'-phosphate
  modified_base 16: mod_base = OTHER; note = 2'-O-methylguanosine-3'-phosphate
  modified_base 17: mod_base = OTHER; note = 2'-O-methyladenosine-3'-phosphate
  modified_base 18: mod_base = OTHER; note = 2'-O-methyladenosine-3'-phosphate
  modified_base 19: mod_base = OTHER; note = 2'-O-methyladenosine-3'-phosphate
  modified_base 20: mod_base = OTHER; note = 2'-O-methylcytidine-3'-phosphate
  modified_base 21: mod_base = OTHER; note = 2'-O-methyluridine-3'-phosphate ((2S,4R)-1-[29-[[2-(acetylamino)-2-deoxy-beta-D-galactopyra nosyl]oxy]-14,14-bis[[3-[[3-[[5-[[2-(acetylamino)-2-deoxy-b eta-D-galactopyranosyl]oxy]-1-oxopentyl]amino]propyl]amino] -3-oxopropoxy]methyl]-1,12,19,25-tetraoxo-16-oxa-13,20,24-t riazanonacos-1-yl]-4-hydroxy-2-pyrrolidinyl)methyl ester
ggggcaaatgatgaagaaact

SEQ ID NO: 2335 - RNA, 23 nt, synthetic construct
  source 1..23: mol_type = other RNA
  modified_base 1: mod_base = OTHER; note = 2'-O-methyladenosine-3'-phosphorothioate
  modified_base 2: mod_base = OTHER; note = 2'-deoxy-2'-fluoroguanosine-3'-phosphorothioate
  modified_base 3: mod_base = OTHER; note = 2'-O-methyluridine-3'-phosphate
  modified_base 4: mod_base = OTHER; note = 2'-O-methyluridine-3'-phosphate
  modified_base 5: mod_base = OTHER; note = 2'-O-methyluridine-3'-phosphate
  modified_base 6: mod_base = OTHER; note = 2'-deoxy-2'-fluorocytidine-3'-phosphate
  modified_base 7: mod_base = OTHER; note = 2'-O-methyluridine-3'-phosphate
  modified_base 8: mod_base = OTHER; note = 2'-deoxy-2'-fluorouridine-3'-phosphate
  modified_base 9: mod_base = OTHER; note = 2'-deoxy-2'-fluorocytidine-3'-phosphate
  modified_base 10: mod_base = OTHER; note = 2'-O-methyladenosine-3'-phosphate
  modified_base 11: mod_base = OTHER; note = 2'-O-methyluridine-3'-phosphate
  modified_base 12: mod_base = OTHER; note = 2'-O-methylcytidine-3'-phosphate
  modified_base 13: mod_base = OTHER; note = 2'-O-methyladenosine-3'-phosphate
  modified_base 14: mod_base = OTHER; note = 2'-deoxy-2'-fluorouridine-3'-phosphate
  modified_base 15: mod_base = OTHER; note = 2'-O-methyluridine-3'-phosphate
  modified_base 16: mod_base = OTHER; note = 2'-deoxy-2'-fluorouridine-3'-phosphate
  modified_base 17: mod_base = OTHER; note = 2'-O-methylguanosine-3'-phosphate
  modified_base 18: mod_base = OTHER; note = 2'-O-methylcytidine-3'-phosphate
  modified_base 19: mod_base = OTHER; note = 2'-O-methylcytidine-3'-phosphate
  modified_base 20: mod_base = OTHER; note = 2'-O-methylcytidine-3'-phosphate
  modified_base 21: mod_base = OTHER; note = 2'-O-methylcytidine-3'-phosphorothioate
  modified_base 22: mod_base = OTHER; note = 2'-O-methyladenosine-3'-phosphorothioate
  modified_base 23: mod_base = OTHER; note = 2'-O-methylguanosine
agtttcttcatcatttgccccag

SEQ ID NO: 2336 - RNA, 21 nt, synthetic construct
  source 1..21: mol_type = other RNA
  modified_base 1: mod_base = OTHER; note = 2'-O-methyluridine-3'-phosphorothioate
  modified_base 2: mod_base = OTHER; note = 2'-O-methylguanosine-3'-phosphorothioate
  modified_base 3: mod_base = OTHER; note = 2'-O-methylguanosine-3'-phosphate
  modified_base 4: mod_base = OTHER; note = 2'-O-methylguanosine-3'-phosphate
  modified_base 5: mod_base = OTHER; note = 2'-O-methylguanosine-3'-phosphate
  modified_base 6: mod_base = OTHER; note = 2'-O-methylcytidine-3'-phosphate
  modified_base 7: mod_base = OTHER; note = 2'-deoxy-2'-fluoroadenosine-3'-phosphate
  modified_base 8: mod_base = OTHER; note = 2'-O-methyladenosine-3'-phosphate
  modified_base 9: mod_base = OTHER; note = 2'-deoxy-2'-fluoroadenosine-3'-phosphate
  modified_base 10: mod_base = OTHER; note = 2'-deoxy-2'-fluorouridine-3'-phosphate
  modified_base 11: mod_base = OTHER; note = 2'-deoxy-2'-fluoroguanosine-3'-phosphate
  modified_base 12: mod_base = OTHER; note = 2'-O-methyladenosine-3'-phosphate
  modified_base 13: mod_base = OTHER; note = 2'-O-methyluridine-3'-phosphate
  modified_base 14: mod_base = OTHER; note = 2'-O-methylguanosine-3'-phosphate
  modified_base 15: mod_base = OTHER; note = 2'-O-methyladenosine-3'-phosphate
  modified_base 16: mod_base = OTHER; note = 2'-O-methyladenosine-3'-phosphate
  modified_base 17: mod_base = OTHER; note = 2'-O-methylguanosine-3'-phosphate
  modified_base 18: mod_base = OTHER; note = 2'-O-methyladenosine-3'-phosphate
  modified_base 19: mod_base = OTHER; note = 2'-O-methyladenosine-3'-phosphate
  modified_base 20: mod_base = OTHER; note = 2'-O-methyladenosine-3'-phosphate
  modified_base 21: mod_base = OTHER; note = 2'-O-methylcytidine-3'-phosphate ((2S,4R)-1-[29-[[2-(acetylamino)-2-deoxy-beta-D-galactopyra nosyl]oxy]-14,14-bis[[3-[[3-[[5-[[2-(acetylamino)-2-deoxy-b eta-D-galactopyranosyl]oxy]-1-oxopentyl]amino]propyl]amino] -3-oxopropoxy]methyl]-1,12,19,25-tetraoxo-16-oxa-13,20,24-t riazanonacos-1-yl]-4-hydroxy-2-pyrrolidinyl)methyl ester
tggggcaaatgatgaagaaac

SEQ ID NO: 2337 - RNA, 23 nt, synthetic construct
  source 1..23: mol_type = other RNA
  modified_base 1: mod_base = OTHER; note = 2'-O-methylguanosine-3'-phosphorothioate
  modified_base 2: mod_base = OTHER; note = 2'-deoxy-2'-fluorouridine-3'-phosphorothioate
  modified_base 3: mod_base = OTHER; note = 2'-O-methyluridine-3'-phosphate
  modified_base 4: mod_base = OTHER; note = 2'-O-methyluridine-3'-phosphate
  modified_base 5: mod_base = OTHER; note = 2'-O-methylcytidine-3'-phosphate
  modified_base 6: mod_base = OTHER; note = 2'-deoxy-2'-fluorouridine-3'-phosphate
  modified_base 7: mod_base = OTHER; note = 2'-O-methyluridine-3'-phosphate
  modified_base 8: mod_base = OTHER; note = 2'-deoxy-2'-fluorocytidine-3'-phosphate
  modified_base 9: mod_base = OTHER; note = 2'-deoxy-2'-fluoroadenosine-3'-phosphate
  modified_base 10: mod_base = OTHER; note = 2'-O-methyluridine-3'-phosphate
  modified_base 11: mod_base = OTHER; note = 2'-O-methylcytidine-3'-phosphate
  modified_base 12: mod_base = OTHER; note = 2'-O-methyladenosine-3'-phosphate
  modified_base 13: mod_base = OTHER; note = 2'-O-methyluridine-3'-phosphate
  modified_base 14: mod_base = OTHER; note = 2'-deoxy-2'-fluorouridine-3'-phosphate
  modified_base 15: mod_base = OTHER; note = 2'-O-methyluridine-3'-phosphate
  modified_base 16: mod_base = OTHER; note = 2'-deoxy-2'-fluoroguanosine-3'-phosphate
  modified_base 17: mod_base = OTHER; note = 2'-O-methylcytidine-3'-phosphate
  modified_base 18: mod_base = OTHER; note = 2'-O-methylcytidine-3'-phosphate
  modified_base 19: mod_base = OTHER; note = 2'-O-methylcytidine-3'-phosphate
  modified_base 20: mod_base = OTHER; note = 2'-O-methylcytidine-3'-phosphate
  modified_base 21: mod_base = OTHER; note = 2'-O-methyladenosine-3'-phosphorothioate
  modified_base 22: mod_base = OTHER; note = 2'-O-methylguanosine-3'-phosphorothioate
  modified_base 23: mod_base = OTHER; note = 2'-O-methyladenosine
gtttcttcatcatttgccccaga

SEQ ID NO: 2338 - RNA, 21 nt, synthetic construct
  source 1..21: mol_type = other RNA
  modified_base 1: mod_base = OTHER; note = 2'-O-methylcytidine-3'-phosphorothioate
  modified_base 2: mod_base = OTHER; note = 2'-O-methyladenosine-3'-phosphorothioate
  modified_base 3: mod_base = OTHER; note = 2'-O-methyladenosine-3'-phosphate
  modified_base 4: mod_base = OTHER; note = 2'-O-methyladenosine-3'-phosphate
  modified_base 5: mod_base = OTHER; note = 2'-O-methylguanosine-3'-phosphate
  modified_base 6: mod_base = OTHER; note = 2'-O-methylguanosine-3'-phosphate
  modified_base 7: mod_base = OTHER; note = 2'-deoxy-2'-fluoroguanosine-3'-phosphate
  modified_base 8: mod_base = OTHER; note = 2'-O-methyluridine-3'-phosphate
  modified_base 9: mod_base = OTHER; note = 2'-deoxy-2'-fluoroguanosine-3'-phosphate
  modified_base 10: mod_base = OTHER; note = 2'-deoxy-2'-fluorouridine-3'-phosphate
  modified_base 11: mod_base = OTHER; note = 2'-deoxy-2'-fluorocytidine-3'-phosphate
  modified_base 12: mod_base = OTHER; note = 2'-O-methylguanosine-3'-phosphate
  modified_base 13: mod_base = OTHER; note = 2'-O-methyluridine-3'-phosphate
  modified_base 14: mod_base = OTHER; note = 2'-O-methyluridine-3'-phosphate
  modified_base 15: mod_base = OTHER; note = 2'-O-methylcytidine-3'-phosphate
  modified_base 16: mod_base = OTHER; note = 2'-O-methyluridine-3'-phosphate
  modified_base 17: mod_base = OTHER; note = 2'-O-methyluridine-3'-phosphate
  modified_base 18: mod_base = OTHER; note = 2'-O-methyluridine-3'-phosphate
  modified_base 19: mod_base = OTHER; note = 2'-O-methyluridine-3'-phosphate
  modified_base 20: mod_base = OTHER; note = 2'-O-methylcytidine-3'-phosphate
  modified_base 21: mod_base = OTHER; note = 2'-O-methylcytidine-3'-phosphate ((2S,4R)-1-[29-[[2-(acetylamino)-2-deoxy-beta-D-galactopyra nosyl]oxy]-14,14-bis[[3-[[3-[[5-[[2-(acetylamino)-2-deoxy-b eta-D-galactopyranosyl]oxy]-1-oxopentyl]amino]propyl]amino] -3-oxopropoxy]methyl]-1,12,19,25-tetraoxo-16-oxa-13,20,24-t riazanonacos-1-yl]-4-hydroxy-2-pyrrolidinyl)methyl ester
caaagggtgtcgttcttttcc

SEQ ID NO: 2339 - RNA, 23 nt, synthetic construct
  source 1..23: mol_type = other RNA
  modified_base 1: mod_base = OTHER; note = 2'-O-methylguanosine-3'-phosphorothioate
  modified_base 2: mod_base = OTHER; note = 2'-deoxy-2'-fluoroguanosine-3'-phosphorothioate
  modified_base 3: mod_base = OTHER; note = 2'-O-methyladenosine-3'-phosphate
  modified_base 4: mod_base = OTHER; note = 2'-O-methyladenosine-3'-phosphate
  modified_base 5: mod_base = OTHER; note = 2'-O-methyladenosine-3'-phosphate
  modified_base 6: mod_base = OTHER; note = 2'-deoxy-2'-fluoroadenosine-3'-phosphate
  modified_base 7: mod_base = OTHER; note = 2'-O-methylguanosine-3'-phosphate
  modified_base 8: mod_base = OTHER; note = 2'-deoxy-2'-fluoroadenosine-3'-phosphate
  modified_base 9: mod_base = OTHER; note = 2'-deoxy-2'-fluoroadenosine-3'-phosphate
  modified_base 10: mod_base = OTHER; note = 2'-O-methylcytidine-3'-phosphate
  modified_base 11: mod_base = OTHER; note = 2'-O-methylguanosine-3'-phosphate
  modified_base 12: mod_base = OTHER; note = 2'-O-methyladenosine-3'-phosphate
  modified_base 13: mod_base = OTHER; note = 2'-O-methylcytidine-3'-phosphate
  modified_base 14: mod_base = OTHER; note = 2'-deoxy-2'-fluoroadenosine-3'-phosphate
  modified_base 15: mod_base = OTHER; note = 2'-O-methylcytidine-3'-phosphate
  modified_base 16: mod_base = OTHER; note = 2'-deoxy-2'-fluorocytidine-3'-phosphate
  modified_base 17: mod_base = OTHER; note = 2'-O-methylcytidine-3'-phosphate
  modified_base 18: mod_base = OTHER; note = 2'-O-methyluridine-3'-phosphate
  modified_base 19: mod_base = OTHER; note = 2'-O-methyluridine-3'-phosphate
  modified_base 20: mod_base = OTHER; note = 2'-O-methyluridine-3'-phosphate
  modified_base 21: mod_base = OTHER; note = 2'-O-methylguanosine-3'-phosphorothioate
  modified_base 22: mod_base = OTHER; note = 2'-O-methyluridine-3'-phosphorothioate
  modified_base 23: mod_base = OTHER; note = 2'-O-methyladenosine
ggaaaagaacgacaccctttgta

SEQ ID NO: 2340 - RNA, 21 nt, synthetic construct
  source 1..21: mol_type = other RNA
  modified_base 1: mod_base = OTHER; note = 2'-O-methyladenosine-3'-phosphorothioate
  modified_base 2: mod_base = OTHER; note = 2'-O-methyladenosine-3'-phosphorothioate
  modified_base 3: mod_base = OTHER; note = 2'-O-methyladenosine-3'-phosphate
  modified_base 4: mod_base = OTHER; note = 2'-O-methylguanosine-3'-phosphate
  modified_base 5: mod_base = OTHER; note = 2'-O-methylguanosine-3'-phosphate
  modified_base 6: mod_base = OTHER; note = 2'-O-methylguanosine-3'-phosphate
  modified_base 7: mod_base = OTHER; note = 2'-deoxy-2'-fluorouridine-3'-phosphate
  modified_base 8: mod_base = OTHER; note = 2'-O-methylguanosine-3'-phosphate
  modified_base 9: mod_base = OTHER; note = 2'-deoxy-2'-fluorouridine-3'-phosphate
  modified_base 10: mod_base = OTHER; note = 2'-deoxy-2'-fluorocytidine-3'-phosphate
  modified_base 11: mod_base = OTHER; note = 2'-deoxy-2'-fluoroguanosine-3'-phosphate
  modified_base 12: mod_base = OTHER; note = 2'-O-methyluridine-3'-phosphate
  modified_base 13: mod_base = OTHER; note = 2'-O-methyluridine-3'-phosphate
  modified_base 14: mod_base = OTHER; note = 2'-O-methylcytidine-3'-phosphate
  modified_base 15: mod_base = OTHER; note = 2'-O-methyluridine-3'-phosphate
  modified_base 16: mod_base = OTHER; note = 2'-O-methyluridine-3'-phosphate
  modified_base 17: mod_base = OTHER; note = 2'-O-methyluridine-3'-phosphate
  modified_base 18: mod_base = OTHER; note = 2'-O-methyluridine-3'-phosphate
  modified_base 19: mod_base = OTHER; note = 2'-O-methylcytidine-3'-phosphate
  modified_base 20: mod_base = OTHER; note = 2'-O-methylcytidine-3'-phosphate
  modified_base 21: mod_base = OTHER; note = 2'-O-methyladenosine-3'-phosphate ((2S,4R)-1-[29-[[2-(acetylamino)-2-deoxy-beta-D-galactopyra nosyl]oxy]-14,14-bis[[3-[[3-[[5-[[2-(acetylamino)-2-deoxy-b eta-D-galactopyranosyl]oxy]-1-oxopentyl]amino]propyl]amino] -3-oxopropoxy]methyl]-1,12,19,25-tetraoxo-16-oxa-13,20,24-t riazanonacos-1-yl]-4-hydroxy-2-pyrrolidinyl)methyl ester
aaagggtgtcgttcttttcca

SEQ ID NO: 2341 - RNA, 23 nt, synthetic construct
  source 1..23: mol_type = other RNA
  modified_base 1: mod_base = OTHER; note = 2'-O-methyluridine-3'-phosphorothioate
  modified_base 2: mod_base = OTHER; note = 2'-deoxy-2'-fluoroguanosine-3'-phosphorothioate
  modified_base 3: mod_base = OTHER; note = 2'-O-methylguanosine-3'-phosphate
  modified_base 4: mod_base = OTHER; note = 2'-O-methyladenosine-3'-phosphate
  modified_base 5: mod_base = OTHER; note = 2'-O-methyladenosine-3'-phosphate
  modified_base 6: mod_base = OTHER; note = 2'-deoxy-2'-fluoroadenosine-3'-phosphate
  modified_base 7: mod_base = OTHER; note = 2'-O-methyladenosine-3'-phosphate
  modified_base 8: mod_base = OTHER; note = 2'-deoxy-2'-fluoroguanosine-3'-phosphate
  modified_base 9: mod_base = OTHER; note = 2'-deoxy-2'-fluoroadenosine-3'-phosphate
  modified_base 10: mod_base = OTHER; note = 2'-O-methyladenosine-3'-phosphate
  modified_base 11: mod_base = OTHER; note = 2'-O-methylcytidine-3'-phosphate
  modified_base 12: mod_base = OTHER; note = 2'-O-methylguanosine-3'-phosphate
  modified_base 13: mod_base = OTHER; note = 2'-O-methyladenosine-3'-phosphate
  modified_base 14: mod_base = OTHER; note = 2'-deoxy-2'-fluorocytidine-3'-phosphate
  modified_base 15: mod_base = OTHER; note = 2'-O-methyladenosine-3'-phosphate
  modified_base 16: mod_base = OTHER; note = 2'-deoxy-2'-fluorocytidine-3'-phosphate
  modified_base 17: mod_base = OTHER; note = 2'-O-methylcytidine-3'-phosphate
  modified_base 18: mod_base = OTHER; note = 2'-O-methylcytidine-3'-phosphate
  modified_base 19: mod_base = OTHER; note = 2'-O-methyluridine-3'-phosphate
  modified_base 20: mod_base = OTHER; note = 2'-O-methyluridine-3'-phosphate
  modified_base 21: mod_base = OTHER; note = 2'-O-methyluridine-3'-phosphorothioate
  modified_base 22: mod_base = OTHER; note = 2'-O-methylguanosine-3'-phosphorothioate
  modified_base 23: mod_base = OTHER; note = 2'-O-methyluridine
tggaaaagaacgacaccctttgt

SEQ ID NO: 2342 - RNA, 21 nt, synthetic construct
  source 1..21: mol_type = other RNA
  modified_base 1: mod_base = OTHER; note = 2'-O-methyladenosine-3'-phosphorothioate
  modified_base 2: mod_base = OTHER; note = 2'-O-methyladenosine-3'-phosphorothioate
  modified_base 3: mod_base = OTHER; note = 2'-O-methyluridine-3'-phosphate
  modified_base 4: mod_base = OTHER; note = 2'-O-methyladenosine-3'-phosphate
  modified_base 5: mod_base = OTHER; note = 2'-O-methylcytidine-3'-phosphate
  modified_base 6: mod_base = OTHER; note = 2'-O-methyladenosine-3'-phosphate
  modified_base 7: mod_base = OTHER; note = 2'-deoxy-2'-fluoroadenosine-3'-phosphate
  modified_base 8: mod_base = OTHER; note = 2'-O-methyladenosine-3'-phosphate
  modified_base 9: mod_base = OTHER; note = 2'-deoxy-2'-fluoroguanosine-3'-phosphate
  modified_base 10: mod_base = OTHER; note = 2'-deoxy-2'-fluoroguanosine-3'-phosphate
  modified_base 11: mod_base = OTHER; note = 2'-deoxy-2'-fluoroguanosine-3'-phosphate
  modified_base 12: mod_base = OTHER; note = 2'-O-methyluridine-3'-phosphate
  modified_base 13: mod_base = OTHER; note = 2'-O-methylguanosine-3'-phosphate
  modified_base 14: mod_base = OTHER; note = 2'-O-methyluridine-3'-phosphate
  modified_base 15: mod_base = OTHER; note = 2'-O-methylcytidine-3'-phosphate
  modified_base 16: mod_base = OTHER; note = 2'-O-methylguanosine-3'-phosphate
  modified_base 17: mod_base = OTHER; note = 2'-O-methyluridine-3'-phosphate
  modified_base 18: mod_base = OTHER; note = 2'-O-methyluridine-3'-phosphate
  modified_base 19: mod_base = OTHER; note = 2'-O-methylcytidine-3'-phosphate
  modified_base 20: mod_base = OTHER; note = 2'-O-methyluridine-3'-phosphate
  modified_base 21: mod_base = OTHER; note = 2'-O-methyluridine-3'-phosphate ((2S,4R)-1-[29-[[2-(acetylamino)-2-deoxy-beta-D-galactopyra nosyl]oxy]-14,14-bis[[3-[[3-[[5-[[2-(acetylamino)-2-deoxy-b eta-D-galactopyranosyl]oxy]-1-oxopentyl]amino]propyl]amino] -3-oxopropoxy]methyl]-1,12,19,25-tetraoxo-16-oxa-13,20,24-t riazanonacos-1-yl]-4-hydroxy-2-pyrrolidinyl)methyl ester
aatacaaagggtgtcgttctt

SEQ ID NO: 2343 - RNA, 23 nt, synthetic construct
  source 1..23: mol_type = other RNA
  modified_base 1: mod_base = OTHER; note = 2'-O-methyladenosine-3'-phosphorothioate
  modified_base 2: mod_base = OTHER; note = 2'-deoxy-2'-fluoroadenosine-3'-phosphorothioate
  modified_base 3: mod_base = OTHER; note = 2'-O-methylguanosine-3'-phosphate
  modified_base 4: mod_base = OTHER; note = 2'-O-methyladenosine-3'-phosphate
  modified_base 5: mod_base = OTHER; note = 2'-O-methyladenosine-3'-phosphate
  modified_base 6: mod_base = OTHER; note = 2'-deoxy-2'-fluorocytidine-3'-phosphate
  modified_base 7: mod_base = OTHER; note = 2'-O-methylguanosine-3'-phosphate
  modified_base 8: mod_base = OTHER; note = 2'-deoxy-2'-fluoroadenosine-3'-phosphate
  modified_base 9: mod_base = OTHER; note = 2'-deoxy-2'-fluorocytidine-3'-phosphate
  modified_base 10: mod_base = OTHER; note = 2'-O-methyladenosine-3'-phosphate
  modified_base 11: mod_base = OTHER; note = 2'-O-methylcytidine-3'-phosphate
  modified_base 12: mod_base = OTHER; note = 2'-O-methylcytidine-3'-phosphate
  modified_base 13: mod_base = OTHER; note = 2'-O-methylcytidine-3'-phosphate
  modified_base 14: mod_base = OTHER; note = 2'-deoxy-2'-fluorouridine-3'-phosphate
  modified_base 15: mod_base = OTHER; note = 2'-O-methyluridine-3'-phosphate
  modified_base 16: mod_base = OTHER; note = 2'-deoxy-2'-fluorouridine-3'-phosphate
  modified_base 17: mod_base = OTHER; note = 2'-O-methylguanosine-3'-phosphate
  modified_base 18: mod_base = OTHER; note = 2'-O-methyluridine-3'-phosphate
  modified_base 19: mod_base = OTHER; note = 2'-O-methyladenosine-3'-phosphate
  modified_base 20: mod_base = OTHER; note = 2'-O-methyluridine-3'-phosphate
  modified_base 21: mod_base = OTHER; note = 2'-O-methyluridine-3'-phosphorothioate
  modified_base 22: mod_base = OTHER; note = 2'-O-methylguanosine-3'-phosphorothioate
  modified_base 23: mod_base = OTHER; note = 2'-O-methyladenosine
aagaacgacaccctttgtattga

SEQ ID NO: 2344 - RNA, 21 nt, synthetic construct
  source 1..21: mol_type = other RNA
  modified_base 1: mod_base = OTHER; note = 2'-O-methylcytidine-3'-phosphorothioate
  modified_base 2: mod_base = OTHER; note = 2'-O-methyladenosine-3'-phosphorothioate
  modified_base 3: mod_base = OTHER; note = 2'-O-methyladenosine-3'-phosphate
  modified_base 4: mod_base = OTHER; note = 2'-O-methyluridine-3'-phosphate
  modified_base 5: mod_base = OTHER; note = 2'-O-methyladenosine-3'-phosphate
  modified_base 6: mod_base = OTHER; note = 2'-O-methylcytidine-3'-phosphate
  modified_base 7: mod_base = OTHER; note = 2'-deoxy-2'-fluoroadenosine-3'-phosphate
  modified_base 8: mod_base = OTHER; note = 2'-O-methyladenosine-3'-phosphate
  modified_base 9: mod_base = OTHER; note = 2'-deoxy-2'-fluoroadenosine-3'-phosphate
  modified_base 10: mod_base = OTHER; note = 2'-deoxy-2'-fluoroguanosine-3'-phosphate
  modified_base 11: mod_base = OTHER; note = 2'-deoxy-2'-fluoroguanosine-3'-phosphate
  modified_base 12: mod_base = OTHER; note = 2'-O-methylguanosine-3'-phosphate
  modified_base 13: mod_base = OTHER; note = 2'-O-methyluridine-3'-phosphate
  modified_base 14: mod_base = OTHER; note = 2'-O-methylguanosine-3'-phosphate
  modified_base 15: mod_base = OTHER; note = 2'-O-methyluridine-3'-phosphate
  modified_base 16: mod_base = OTHER; note = 2'-O-methylcytidine-3'-phosphate
  modified_base 17: mod_base = OTHER; note = 2'-O-methylguanosine-3'-phosphate
  modified_base 18: mod_base = OTHER; note = 2'-O-methyluridine-3'-phosphate
  modified_base 19: mod_base = OTHER; note = 2'-O-methyluridine-3'-phosphate
  modified_base 20: mod_base = OTHER; note = 2'-O-methylcytidine-3'-phosphate
  modified_base 21: mod_base = OTHER; note = 2'-O-methyluridine-3'-phosphate ((2S,4R)-1-[29-[[2-(acetylamino)-2-deoxy-beta-D-galactopyra nosyl]oxy]-14,14-bis[[3-[[3-[[5-[[2-(acetylamino)-2-deoxy-b eta-D-galactopyranosyl]oxy]-1-oxopentyl]amino]propyl]amino] -3-oxopropoxy]methyl]-1,12,19,25-tetraoxo-16-oxa-13,20,24-t riazanonacos-1-yl]-4-hydroxy-2-pyrrolidinyl)methyl ester
caatacaaagggtgtcgttct

SEQ ID NO: 2345 - RNA, 23 nt, synthetic construct
  source 1..23: mol_type = other RNA
  modified_base 1: mod_base = OTHER; note = 2'-O-methyladenosine-3'-phosphorothioate
  modified_base 2: mod_base = OTHER; note = 2'-deoxy-2'-fluoroguanosine-3'-phosphorothioate
  modified_base 3: mod_base = OTHER; note = 2'-O-methyladenosine-3'-phosphate
  modified_base 4: mod_base = OTHER; note = 2'-O-methyladenosine-3'-phosphate
  modified_base 5: mod_base = OTHER; note = 2'-O-methylcytidine-3'-phosphate
  modified_base 6: mod_base = OTHER; note = 2'-deoxy-2'-fluoroguanosine-3'-phosphate
  modified_base 7: mod_base = OTHER; note = 2'-O-methyladenosine-3'-phosphate
  modified_base 8: mod_base = OTHER; note = 2'-deoxy-2'-fluorocytidine-3'-phosphate
  modified_base 9: mod_base = OTHER; note = 2'-deoxy-2'-fluoroadenosine-3'-phosphate
  modified_base 10: mod_base = OTHER; note = 2'-O-methylcytidine-3'-phosphate
  modified_base 11: mod_base = OTHER; note = 2'-O-methylcytidine-3'-phosphate
  modified_base 12: mod_base = OTHER; note = 2'-O-methylcytidine-3'-phosphate
  modified_base 13: mod_base = OTHER; note = 2'-O-methyluridine-3'-phosphate
  modified_base 14: mod_base = OTHER; note = 2'-deoxy-2'-fluorouridine-3'-phosphate
  modified_base 15: mod_base = OTHER; note = 2'-O-methyluridine-3'-phosphate
  modified_base 16: mod_base = OTHER; note = 2'-deoxy-2'-fluoroguanosine-3'-phosphate
  modified_base 17: mod_base = OTHER; note = 2'-O-methyluridine-3'-phosphate
  modified_base 18: mod_base = OTHER; note = 2'-O-methyladenosine-3'-phosphate
  modified_base 19: mod_base = OTHER; note = 2'-O-methyluridine-3'-phosphate
  modified_base 20: mod_base = OTHER; note = 2'-O-methyluridine-3'-phosphate
  modified_base 21: mod_base = OTHER; note = 2'-O-methylguanosine-3'-phosphorothioate
  modified_base 22: mod_base = OTHER; note = 2'-O-methyladenosine-3'-phosphorothioate
  modified_base 23: mod_base = OTHER; note = 2'-O-methyladenosine
agaacgacaccctttgtattgaa

SEQ ID NO: 2346 - RNA, 21 nt, synthetic construct
  source 1..21: mol_type = other RNA
  modified_base 1: mod_base = OTHER; note = 2'-O-methyladenosine-3'-phosphorothioate
  modified_base 2: mod_base = OTHER; note = 2'-O-methyladenosine-3'-phosphorothioate
  modified_base 3: mod_base = OTHER; note = 2'-O-methyladenosine-3'-phosphate
  modified_base 4: mod_base = OTHER; note = 2'-O-methylguanosine-3'-phosphate
  modified_base 5: mod_base = OTHER; note = 2'-O-methylguanosine-3'-phosphate
  modified_base 6: mod_base = OTHER; note = 2'-O-methylcytidine-3'-phosphate
  modified_base 7: mod_base = OTHER; note = 2'-deoxy-2'-fluoroadenosine-3'-phosphate
  modified_base 8: mod_base = OTHER; note = 2'-O-methylcytidine-3'-phosphate
  modified_base 9: mod_base = OTHER; note = 2'-deoxy-2'-fluorouridine-3'-phosphate
  modified_base 10: mod_base = OTHER; note = 2'-deoxy-2'-fluoroguanosine-3'-phosphate
  modified_base 11: mod_base = OTHER; note = 2'-deoxy-2'-fluoroadenosine-3'-phosphate
  modified_base 12: mod_base = OTHER; note = 2'-O-methyluridine-3'-phosphate
  modified_base 13: mod_base = OTHER; note = 2'-O-methylguanosine-3'-phosphate
  modified_base 14: mod_base = OTHER; note = 2'-O-methyluridine-3'-phosphate
  modified_base 15: mod_base = OTHER; note = 2'-O-methyluridine-3'-phosphate
  modified_base 16: mod_base = OTHER; note = 2'-O-methylcytidine-3'-phosphate
  modified_base 17: mod_base = OTHER; note = 2'-O-methyluridine-3'-phosphate
  modified_base 18: mod_base = OTHER; note = 2'-O-methylguanosine-3'-phosphate
  modified_base 19: mod_base = OTHER; note = 2'-O-methyladenosine-3'-phosphate
  modified_base 20: mod_base = OTHER; note = 2'-O-methyladenosine-3'-phosphate
  modified_base 21: mod_base = OTHER; note = 2'-O-methyladenosine-3'-phosphate ((2S,4R)-1-[29-[[2-(acetylamino)-2-deoxy-beta-D-galactopyra nosyl]oxy]-14,14-bis[[3-[[3-[[5-[[2-(acetylamino)-2-deoxy-b eta-D-galactopyranosyl]oxy]-1-oxopentyl]amino]propyl]amino] -3-oxopropoxy]methyl]-1,12,19,25-tetraoxo-16-oxa-13,20,24-t riazanonacos-1-yl]-4-hydroxy-2-pyrrolidinyl)methyl ester
aaaggcactgatgttctgaaa

SEQ ID NO: 2347 - RNA, 23 nt, synthetic construct
  source 1..23: mol_type = other RNA
  modified_base 1: mod_base = OTHER; note = 2'-O-methyluridine-3'-phosphorothioate
  modified_base 2: mod_base = OTHER; note = 2'-deoxy-2'-fluorouridine-3'-phosphorothioate
  modified_base 3: mod_base = OTHER; note = 2'-O-methyluridine-3'-phosphate
  modified_base 4: mod_base = OTHER; note = 2'-O-methylcytidine-3'-phosphate
  modified_base 5: mod_base = OTHER; note = 2'-O-methyladenosine-3'-phosphate
  modified_base 6: mod_base = OTHER; note = 2'-deoxy-2'-fluoroguanosine-3'-phosphate
  modified_base 7: mod_base = OTHER; note = 2'-O-methyladenosine-3'-phosphate
  modified_base 8: mod_base = OTHER; note = 2'-deoxy-2'-fluoroadenosine-3'-phosphate
  modified_base 9: mod_base = OTHER; note = 2'-deoxy-2'-fluorocytidine-3'-phosphate
  modified_base 10: mod_base = OTHER; note = 2'-O-methyladenosine-3'-phosphate
  modified_base 11: mod_base = OTHER; note = 2'-O-methyluridine-3'-phosphate
  modified_base 12: mod_base = OTHER; note = 2'-O-methylcytidine-3'-phosphate
  modified_base 13: mod_base = OTHER; note = 2'-O-methyladenosine-3'-phosphate
  modified_base 14: mod_base = OTHER; note = 2'-deoxy-2'-fluoroguanosine-3'-phosphate
  modified_base 15: mod_base = OTHER; note = 2'-O-methyluridine-3'-phosphate
  modified_base 16: mod_base = OTHER; note = 2'-deoxy-2'-fluoroguanosine-3'-phosphate
  modified_base 17: mod_base = OTHER; note = 2'-O-methylcytidine-3'-phosphate
  modified_base 18: mod_base = OTHER; note = 2'-O-methylcytidine-3'-phosphate
  modified_base 19: mod_base = OTHER; note = 2'-O-methyluridine-3'-phosphate
  modified_base 20: mod_base = OTHER; note = 2'-O-methyluridine-3'-phosphate
  modified_base 21: mod_base = OTHER; note = 2'-O-methyluridine-3'-phosphorothioate
  modified_base 22: mod_base = OTHER; note = 2'-O-methylcytidine-3'-phosphorothioate
  modified_base 23: mod_base = OTHER; note = 2'-O-methylcytidine
tttcagaacatcagtgcctttcc

SEQ ID NO: 2348 - RNA, 21 nt, synthetic construct
  source 1..21: mol_type = other RNA
  modified_base 1: mod_base = OTHER; note = 2'-O-methyladenosine-3'-phosphorothioate
  modified_base 2: mod_base = OTHER; note = 2'-O-methyladenosine-3'-phosphorothioate
  modified_base 3: mod_base = OTHER; note = 2'-O-methylguanosine-3'-phosphate
  modified_base 4: mod_base = OTHER; note = 2'-O-methylguanosine-3'-phosphate
  modified_base 5: mod_base = OTHER; note = 2'-O-methylcytidine-3'-phosphate
  modified_base 6: mod_base = OTHER; note = 2'-O-methyladenosine-3'-phosphate
  modified_base 7: mod_base = OTHER; note = 2'-deoxy-2'-fluorocytidine-3'-phosphate
  modified_base 8: mod_base = OTHER; note = 2'-O-methyluridine-3'-phosphate
  modified_base 9: mod_base = OTHER; note = 2'-deoxy-2'-fluoroguanosine-3'-phosphate
  modified_base 10: mod_base = OTHER; note = 2'-deoxy-2'-fluoroadenosine-3'-phosphate
  modified_base 11: mod_base = OTHER; note = 2'-deoxy-2'-fluorouridine-3'-phosphate
  modified_base 12: mod_base = OTHER; note = 2'-O-methylguanosine-3'-phosphate
  modified_base 13: mod_base = OTHER; note = 2'-O-methyluridine-3'-phosphate
  modified_base 14: mod_base = OTHER; note = 2'-O-methyluridine-3'-phosphate
  modified_base 15: mod_base = OTHER; note = 2'-O-methylcytidine-3'-phosphate
  modified_base 16: mod_base = OTHER; note = 2'-O-methyluridine-3'-phosphate
  modified_base 17: mod_base = OTHER; note = 2'-O-methylguanosine-3'-phosphate
  modified_base 18: mod_base = OTHER; note = 2'-O-methyladenosine-3'-phosphate
  modified_base 19: mod_base = OTHER; note = 2'-O-methyladenosine-3'-phosphate
  modified_base 20: mod_base = OTHER; note = 2'-O-methyladenosine-3'-phosphate
  modified_base 21: mod_base = OTHER; note = 2'-O-methylguanosine-3'-phosphate ((2S,4R)-1-[29-[[2-(acetylamino)-2-deoxy-beta-D-galactopyra nosyl]oxy]-14,14-bis[[3-[[3-[[5-[[2-(acetylamino)-2-deoxy-b eta-D-galactopyranosyl]oxy]-1-oxopentyl]amino]propyl]amino] -3-oxopropoxy]methyl]-1,12,19,25-tetraoxo-16-oxa-13,20,24-t riazanonacos-1-yl]-4-hydroxy-2-pyrrolidinyl)methyl ester
aaggcactgatgttctgaaag

SEQ ID NO: 2349 - RNA, 23 nt, synthetic construct
  source 1..23: mol_type = other RNA
  modified_base 1: mod_base = OTHER; note = 2'-O-methylcytidine-3'-phosphorothioate
  modified_base 2: mod_base = OTHER; note = 2'-deoxy-2'-fluorouridine-3'-phosphorothioate
  modified_base 3: mod_base = OTHER; note = 2'-O-methyluridine-3'-phosphate
  modified_base 4: mod_base = OTHER; note = 2'-O-methyluridine-3'-phosphate
  modified_base 5: mod_base = OTHER; note = 2'-O-methylcytidine-3'-phosphate
  modified_base 6: mod_base = OTHER; note = 2'-deoxy-2'-fluoroadenosine-3'-phosphate
  modified_base 7: mod_base = OTHER; note = 2'-O-methylguanosine-3'-phosphate
  modified_base 8: mod_base = OTHER; note = 2'-deoxy-2'-fluoroadenosine-3'-phosphate
  modified_base 9: mod_base = OTHER; note = 2'-deoxy-2'-fluoroadenosine-3'-phosphate
  modified_base 10: mod_base = OTHER; note = 2'-O-methylcytidine-3'-phosphate
  modified_base 11: mod_base = OTHER; note = 2'-O-methyladenosine-3'-phosphate
  modified_base 12: mod_base = OTHER; note = 2'-O-methyluridine-3'-phosphate
  modified_base 13: mod_base = OTHER; note = 2'-O-methylcytidine-3'-phosphate
  modified_base 14: mod_base = OTHER; note = 2'-deoxy-2'-fluoroadenosine-3'-phosphate
  modified_base 15: mod_base = OTHER; note = 2'-O-methylguanosine-3'-phosphate
  modified_base 16: mod_base = OTHER; note = 2'-deoxy-2'-fluorouridine-3'-phosphate
  modified_base 17: mod_base = OTHER; note = 2'-O-methylguanosine-3'-phosphate
  modified_base 18: mod_base = OTHER; note = 2'-O-methylcytidine-3'-phosphate
  modified_base 19: mod_base = OTHER; note = 2'-O-methylcytidine-3'-phosphate
  modified_base 20: mod_base = OTHER; note = 2'-O-methyluridine-3'-phosphate
  modified_base 21: mod_base = OTHER; note = 2'-O-methyluridine-3'-phosphorothioate
  modified_base 22: mod_base = OTHER; note = 2'-O-methyluridine-3'-phosphorothioate
  modified_base 23: mod_base = OTHER; note = 2'-O-methylcytidine
ctttcagaacatcagtgcctttc

SEQ ID NO: 2350 - RNA, 21 nt, synthetic construct
  source 1..21: mol_type = other RNA
  modified_base 1: mod_base = OTHER; note = 2'-O-methylguanosine-3'-phosphorothioate
  modified_base 2: mod_base = OTHER; note = 2'-O-methylcytidine-3'-phosphorothioate
  modified_base 3: mod_base = OTHER; note = 2'-O-methylguanosine-3'-phosphate
  modified_base 4: mod_base = OTHER; note = 2'-O-methylguanosine-3'-phosphate
  modified_base 5: mod_base = OTHER; note = 2'-O-methyladenosine-3'-phosphate
  modified_base 6: mod_base = OTHER; note = 2'-O-methyladenosine-3'-phosphate
  modified_base 7: mod_base = OTHER; note = 2'-deoxy-2'-fluoroadenosine-3'-phosphate
  modified_base 8: mod_base = OTHER; note = 2'-O-methylguanosine-3'-phosphate
  modified_base 9: mod_base = OTHER; note = 2'-deoxy-2'-fluoroguanosine-3'-phosphate
  modified_base 10: mod_base = OTHER; note = 2'-deoxy-2'-fluorocytidine-3'-phosphate
  modified_base 11: mod_base = OTHER; note = 2'-deoxy-2'-fluoroadenosine-3'-phosphate
  modified_base 12: mod_base = OTHER; note = 2'-O-methylcytidine-3'-phosphate
  modified_base 13: mod_base = OTHER; note = 2'-O-methyluridine-3'-phosphate
  modified_base 14: mod_base = OTHER; note = 2'-O-methylguanosine-3'-phosphate
  modified_base 15: mod_base = OTHER; note = 2'-O-methyladenosine-3'-phosphate
  modified_base 16: mod_base = OTHER; note = 2'-O-methyluridine-3'-phosphate
  modified_base 17: mod_base = OTHER; note = 2'-O-methylguanosine-3'-phosphate
  modified_base 18: mod_base = OTHER; note = 2'-O-methyluridine-3'-phosphate
  modified_base 19: mod_base = OTHER; note = 2'-O-methyluridine-3'-phosphate
  modified_base 20: mod_base = OTHER; note = 2'-O-methylcytidine-3'-phosphate
  modified_base 21: mod_base = OTHER; note = 2'-O-methyluridine-3'-phosphate ((2S,4R)-1-[29-[[2-(acetylamino)-2-deoxy-beta-D-galactopyra nosyl]oxy]-14,14-bis[[3-[[3-[[5-[[2-(acetylamino)-2-deoxy-b eta-D-galactopyranosyl]oxy]-1-oxopentyl]amino]propyl]amino] -3-oxopropoxy]methyl]-1,12,19,25-tetraoxo-16-oxa-13,20,24-t riazanonacos-1-yl]-4-hydroxy-2-pyrrolidinyl)methyl ester
gcggaaaggcactgatgttct

SEQ ID NO: 2351 - RNA, 23 nt, synthetic construct
  source 1..23: mol_type = other RNA
  modified_base 1: mod_base = OTHER; note = 2'-O-methyladenosine-3'-phosphorothioate
  modified_base 2: mod_base = OTHER; note = 2'-deoxy-2'-fluoroguanosine-3'-phosphorothioate
  modified_base 3: mod_base = OTHER; note = 2'-O-methyladenosine-3'-phosphate
  modified_base 4: mod_base = OTHER; note = 2'-O-methyladenosine-3'-phosphate
  modified_base 5: mod_base = OTHER; note = 2'-O-methylcytidine-3'-phosphate
  modified_base 6: mod_base = OTHER; note = 2'-deoxy-2'-fluoroadenosine-3'-phosphate
  modified_base 7: mod_base = OTHER; note = 2'-O-methyluridine-3'-phosphate
  modified_base 8: mod_base = OTHER; note = 2'-deoxy-2'-fluorocytidine-3'-phosphate
  modified_base 9: mod_base = OTHER; note = 2'-deoxy-2'-fluoroadenosine-3'-phosphate
  modified_base 10: mod_base = OTHER; note = 2'-O-methylguanosine-3'-phosphate
  modified_base 11: mod_base = OTHER; note = 2'-O-methyluridine-3'-phosphate
  modified_base 12: mod_base = OTHER; note = 2'-O-methylguanosine-3'-phosphate
  modified_base 13: mod_base = OTHER; note = 2'-O-methylcytidine-3'-phosphate
  modified_base 14: mod_base = OTHER; note = 2'-deoxy-2'-fluorocytidine-3'-phosphate
  modified_base 15: mod_base = OTHER; note = 2'-O-methyluridine-3'-phosphate
  modified_base 16: mod_base = OTHER; note = 2'-deoxy-2'-fluorouridine-3'-phosphate
  modified_base 17: mod_base = OTHER; note = 2'-O-methyluridine-3'-phosphate
  modified_base 18: mod_base = OTHER; note = 2'-O-methylcytidine-3'-phosphate
  modified_base 19: mod_base = OTHER; note = 2'-O-methylcytidine-3'-phosphate
  modified_base 20: mod_base = OTHER; note = 2'-O-methylguanosine-3'-phosphate
  modified_base 21: mod_base = OTHER; note = 2'-O-methylcytidine-3'-phosphorothioate
  modified_base 22: mod_base = OTHER; note = 2'-O-methyladenosine-3'-phosphorothioate
  modified_base 23: mod_base = OTHER; note = 2'-O-methylcytidine
agaacatcagtgcctttccgcac

SEQ ID NO: 2352 - RNA, 21 nt, synthetic construct
  source 1..21: mol_type = other RNA
  modified_base 1: mod_base = OTHER; note = 2'-O-methyluridine-3'-phosphorothioate
  modified_base 2: mod_base = OTHER; note = 2'-O-methylguanosine-3'-phosphorothioate
  modified_base 3: mod_base = OTHER; note = 2'-O-methylcytidine-3'-phosphate
  modified_base 4: mod_base = OTHER; note = 2'-O-methylguanosine-3'-phosphate
  modified_base 5: mod_base = OTHER; note = 2'-O-methylguanosine-3'-phosphate
  modified_base 6: mod_base = OTHER; note = 2'-O-methyladenosine-3'-phosphate
  modified_base 7: mod_base = OTHER; note = 2'-deoxy-2'-fluoroadenosine-3'-phosphate
  modified_base 8: mod_base = OTHER; note = 2'-O-methyladenosine-3'-phosphate
  modified_base 9: mod_base = OTHER; note = 2'-deoxy-2'-fluoroguanosine-3'-phosphate
  modified_base 10: mod_base = OTHER; note = 2'-deoxy-2'-fluoroguanosine-3'-phosphate
  modified_base 11: mod_base = OTHER; note = 2'-deoxy-2'-fluorocytidine-3'-phosphate
  modified_base 12: mod_base = OTHER; note = 2'-O-methyladenosine-3'-phosphate
  modified_base 13: mod_base = OTHER; note = 2'-O-methylcytidine-3'-phosphate
  modified_base 14: mod_base = OTHER; note = 2'-O-methyluridine-3'-phosphate
  modified_base 15: mod_base = OTHER; note = 2'-O-methylguanosine-3'-phosphate
  modified_base 16: mod_base = OTHER; note = 2'-O-methyladenosine-3'-phosphate
  modified_base 17: mod_base = OTHER; note = 2'-O-methyluridine-3'-phosphate
  modified_base 18: mod_base = OTHER; note = 2'-O-methylguanosine-3'-phosphate
  modified_base 19: mod_base = OTHER; note = 2'-O-methyluridine-3'-phosphate
  modified_base 20: mod_base = OTHER; note = 2'-O-methyluridine-3'-phosphate
  modified_base 21: mod_base = OTHER; note = 2'-O-methylcytidine-3'-phosphate ((2S,4R)-1-[29-[[2-(acetylamino)-2-deoxy-beta-D-galactopyra nosyl]oxy]-14,14-bis[[3-[[3-[[5-[[2-(acetylamino)-2-deoxy-b eta-D-galactopyranosyl]oxy]-1-oxopentyl]amino]propyl]amino] -3-oxopropoxy]methyl]-1,12,19,25-tetraoxo-16-oxa-13,20,24-t riazanonacos-1-yl]-4-hydroxy-2-pyrrolidinyl)methyl ester
tgcggaaaggcactgatgttc

SEQ ID NO: 2353 - RNA, 23 nt, synthetic construct
  source 1..23: mol_type = other RNA
  modified_base 1: mod_base = OTHER; note = 2'-O-methylguanosine-3'-phosphorothioate
  modified_base 2: mod_base = OTHER; note = 2'-deoxy-2'-fluoroadenosine-3'-phosphorothioate
  modified_base 3: mod_base = OTHER; note = 2'-O-methyladenosine-3'-phosphate
  modified_base 4: mod_base = OTHER; note = 2'-O-methylcytidine-3'-phosphate
  modified_base 5: mod_base = OTHER; note = 2'-O-methyladenosine-3'-phosphate
  modified_base 6: mod_base = OTHER; note = 2'-deoxy-2'-fluorouridine-3'-phosphate
  modified_base 7: mod_base = OTHER; note = 2'-O-methylcytidine-3'-phosphate
  modified_base 8: mod_base = OTHER; note = 2'-deoxy-2'-fluoroadenosine-3'-phosphate
  modified_base 9: mod_base = OTHER; note = 2'-deoxy-2'-fluoroguanosine-3'-phosphate
  modified_base 10: mod_base = OTHER; note = 2'-O-methyluridine-3'-phosphate
  modified_base 11: mod_base = OTHER; note = 2'-O-methylguanosine-3'-phosphate
  modified_base 12: mod_base = OTHER; note = 2'-O-methylcytidine-3'-phosphate
  modified_base 13: mod_base = OTHER; note = 2'-O-methylcytidine-3'-phosphate
  modified_base 14: mod_base = OTHER; note = 2'-deoxy-2'-fluorouridine-3'-phosphate
  modified_base 15: mod_base = OTHER; note = 2'-O-methyluridine-3'-phosphate
  modified_base 16: mod_base = OTHER; note = 2'-deoxy-2'-fluorouridine-3'-phosphate
  modified_base 17: mod_base = OTHER; note = 2'-O-methylcytidine-3'-phosphate
  modified_base 18: mod_base = OTHER; note = 2'-O-methylcytidine-3'-phosphate
  modified_base 19: mod_base = OTHER; note = 2'-O-methylguanosine-3'-phosphate
  modified_base 20: mod_base = OTHER; note = 2'-O-methylcytidine-3'-phosphate
  modified_base 21: mod_base = OTHER; note = 2'-O-methyladenosine-3'-phosphorothioate
  modified_base 22: mod_base = OTHER; note = 2'-O-methylcytidine-3'-phosphorothioate
  modified_base 23: mod_base = OTHER; note = 2'-O-methyladenosine
gaacatcagtgcctttccgcaca

SEQ ID NO: 2354 - RNA, 21 nt, synthetic construct
  source 1..21: mol_type = other RNA
  modified_base 1: mod_base = OTHER; note = 2'-O-methyladenosine-3'-phosphorothioate
  modified_base 2: mod_base = OTHER; note = 2'-O-methyladenosine-3'-phosphorothioate
  modified_base 3: mod_base = OTHER; note = 2'-O-methylguanosine-3'-phosphate
  modified_base 4: mod_base = OTHER; note = 2'-O-methylguanosine-3'-phosphate
  modified_base 5: mod_base = OTHER; note = 2'-O-methyladenosine-3'-phosphate
  modified_base 6: mod_base = OTHER; note = 2'-O-methyluridine-3'-phosphate
  modified_base 7: mod_base = OTHER; note = 2'-deoxy-2'-fluoroguanosine-3'-phosphate
  modified_base 8: mod_base = OTHER; note = 2'-O-methylcytidine-3'-phosphate
  modified_base 9: mod_base = OTHER; note = 2'-deoxy-2'-fluorouridine-3'-phosphate
  modified_base 10: mod_base = OTHER; note = 2'-deoxy-2'-fluorocytidine-3'-phosphate
  modified_base 11: mod_base = OTHER; note = 2'-deoxy-2'-fluorocytidine-3'-phosphate
  modified_base 12: mod_base = OTHER; note = 2'-O-methylguanosine-3'-phosphate
  modified_base 13: mod_base = OTHER; note = 2'-O-methylguanosine-3'-phosphate
  modified_base 14: mod_base = OTHER; note = 2'-O-methyladenosine-3'-phosphate
  modified_base 15: mod_base = OTHER; note = 2'-O-methyladenosine-3'-phosphate
  modified_base 16: mod_base = OTHER; note = 2'-O-methyluridine-3'-phosphate
  modified_base 17: mod_base = OTHER; note = 2'-O-methylguanosine-3'-phosphate
  modified_base 18: mod_base = OTHER; note = 2'-O-methyluridine-3'-phosphate
  modified_base 19: mod_base = OTHER; note = 2'-O-methyluridine-3'-phosphate
  modified_base 20: mod_base = OTHER; note = 2'-O-methylguanosine-3'-phosphate
  modified_base 21: mod_base = OTHER; note = 2'-O-methylcytidine-3'-phosphate ((2S,4R)-1-[29-[[2-(acetylamino)-2-deoxy-beta-D-galactopyra nosyl]oxy]-14,14-bis[[3-[[3-[[5-[[2-(acetylamino)-2-deoxy-b eta-D-galactopyranosyl]oxy]-1-oxopentyl]amino]propyl]amino] -3-oxopropoxy]methyl]-1,12,19,25-tetraoxo-16-oxa-13,20,24-t riazanonacos-1-yl]-4-hydroxy-2-pyrrolidinyl)methyl ester
aaggatgctccggaatgttgc

SEQ ID NO: 2355 - RNA, 23 nt, synthetic construct
  source 1..23: mol_type = other RNA
  modified_base 1: mod_base = OTHER; note = 2'-O-methylguanosine-3'-phosphorothioate
  modified_base 2: mod_base = OTHER; note = 2'-deoxy-2'-fluorocytidine-3'-phosphorothioate
  modified_base 3: mod_base = OTHER; note = 2'-O-methyladenosine-3'-phosphate
  modified_base 4: mod_base = OTHER; note = 2'-O-methyladenosine-3'-phosphate
  modified_base 5: mod_base = OTHER; note = 2'-O-methylcytidine-3'-phosphate
  modified_base 6: mod_base = OTHER; note = 2'-deoxy-2'-fluoroadenosine-3'-phosphate
  modified_base 7: mod_base = OTHER; note = 2'-O-methyluridine-3'-phosphate
  modified_base 8: mod_base = OTHER; note = 2'-deoxy-2'-fluorouridine-3'-phosphate
  modified_base 9: mod_base = OTHER; note = 2'-deoxy-2'-fluorocytidine-3'-phosphate
  modified_base 10: mod_base = OTHER; note = 2'-O-methylcytidine-3'-phosphate
  modified_base 11: mod_base = OTHER; note = 2'-O-methylguanosine-3'-phosphate
  modified_base 12: mod_base = OTHER; note = 2'-O-methylguanosine-3'-phosphate
  modified_base 13: mod_base = OTHER; note = 2'-O-methyladenosine-3'-phosphate
  modified_base 14: mod_base = OTHER; note = 2'-deoxy-2'-fluoroguanosine-3'-phosphate
  modified_base 15: mod_base = OTHER; note = 2'-O-methylcytidine-3'-phosphate
  modified_base 16: mod_base = OTHER; note = 2'-deoxy-2'-fluoroadenosine-3'-phosphate
  modified_base 17: mod_base = OTHER; note = 2'-O-methyluridine-3'-phosphate
  modified_base 18: mod_base = OTHER; note = 2'-O-methylcytidine-3'-phosphate
  modified_base 19: mod_base = OTHER; note = 2'-O-methylcytidine-3'-phosphate
  modified_base 20: mod_base = OTHER; note = 2'-O-methyluridine-3'-phosphate
  modified_base 21: mod_base = OTHER; note = 2'-O-methyluridine-3'-phosphorothioate
  modified_base 22: mod_base = OTHER; note = 2'-O-methylguanosine-3'-phosphorothioate
  modified_base 23: mod_base = OTHER; note = 2'-O-methylguanosine
gcaacattccggagcatccttgg

SEQ ID NO: 2356 - RNA, 21 nt, synthetic construct
  source 1..21: mol_type = other RNA
  modified_base 1: mod_base = OTHER; note = 2'-O-methyladenosine-3'-phosphorothioate
  modified_base 2: mod_base = OTHER; note = 2'-O-methylguanosine-3'-phosphorothioate
  modified_base 3: mod_base = OTHER; note = 2'-O-methylguanosine-3'-phosphate
  modified_base 4: mod_base = OTHER; note = 2'-O-methyladenosine-3'-phosphate
  modified_base 5: mod_base = OTHER; note = 2'-O-methyluridine-3'-phosphate
  modified_base 6: mod_base = OTHER; note = 2'-O-methylguanosine-3'-phosphate
  modified_base 7: mod_base = OTHER; note = 2'-deoxy-2'-fluorocytidine-3'-phosphate
  modified_base 8: mod_base = OTHER; note = 2'-O-methyluridine-3'-phosphate
  modified_base 9: mod_base = OTHER; note = 2'-deoxy-2'-fluorocytidine-3'-phosphate
  modified_base 10: mod_base = OTHER; note = 2'-deoxy-2'-fluorocytidine-3'-phosphate
  modified_base 11: mod_base = OTHER; note = 2'-deoxy-2'-fluoroguanosine-3'-phosphate
  modified_base 12: mod_base = OTHER; note = 2'-O-methylguanosine-3'-phosphate
  modified_base 13: mod_base = OTHER; note = 2'-O-methyladenosine-3'-phosphate
  modified_base 14: mod_base = OTHER; note = 2'-O-methyladenosine-3'-phosphate
  modified_base 15: mod_base = OTHER; note = 2'-O-methyluridine-3'-phosphate
  modified_base 16: mod_base = OTHER; note = 2'-O-methylguanosine-3'-phosphate
  modified_base 17: mod_base = OTHER; note = 2'-O-methyluridine-3'-phosphate
  modified_base 18: mod_base = OTHER; note = 2'-O-methyluridine-3'-phosphate
  modified_base 19: mod_base = OTHER; note = 2'-O-methylguanosine-3'-phosphate
  modified_base 20: mod_base = OTHER; note = 2'-O-methylcytidine-3'-phosphate
  modified_base 21: mod_base = OTHER; note = 2'-O-methyluridine-3'-phosphate ((2S,4R)-1-[29-[[2-(acetylamino)-2-deoxy-beta-D-galactopyra nosyl]oxy]-14,14-bis[[3-[[3-[[5-[[2-(acetylamino)-2-deoxy-b eta-D-galactopyranosyl]oxy]-1-oxopentyl]amino]propyl]amino] -3-oxopropoxy]methyl]-1,12,19,25-tetraoxo-16-oxa-13,20,24-t riazanonacos-1-yl]-4-hydroxy-2-pyrrolidinyl)methyl ester
aggatgctccggaatgttgct

SEQ ID NO: 2357 - RNA, 23 nt, synthetic construct
  source 1..23: mol_type = other RNA
  modified_base 1: mod_base = OTHER; note = 2'-O-methyladenosine-3'-phosphorothioate
  modified_base 2: mod_base = OTHER; note = 2'-deoxy-2'-fluoroguanosine-3'-phosphorothioate
  modified_base 3: mod_base = OTHER; note = 2'-O-methylcytidine-3'-phosphate
  modified_base 4: mod_base = OTHER; note = 2'-O-methyladenosine-3'-phosphate
  modified_base 5: mod_base = OTHER; note = 2'-O-methyladenosine-3'-phosphate
  modified_base 6: mod_base = OTHER; note = 2'-deoxy-2'-fluorocytidine-3'-phosphate
  modified_base 7: mod_base = OTHER; note = 2'-O-methyladenosine-3'-phosphate
  modified_base 8: mod_base = OTHER; note = 2'-deoxy-2'-fluorouridine-3'-phosphate
  modified_base 9: mod_base = OTHER; note = 2'-deoxy-2'-fluorouridine-3'-phosphate
  modified_base 10: mod_base = OTHER; note = 2'-O-methylcytidine-3'-phosphate
  modified_base 11: mod_base = OTHER; note = 2'-O-methylcytidine-3'-phosphate
  modified_base 12: mod_base = OTHER; note = 2'-O-methylguanosine-3'-phosphate
  modified_base 13: mod_base = OTHER; note = 2'-O-methylguanosine-3'-phosphate
  modified_base 14: mod_base = OTHER; note = 2'-deoxy-2'-fluoroadenosine-3'-phosphate
  modified_base 15: mod_base = OTHER; note = 2'-O-methylguanosine-3'-phosphate
  modified_base 16: mod_base = OTHER; note = 2'-deoxy-2'-fluorocytidine-3'-phosphate
  modified_base 17: mod_base = OTHER; note = 2'-O-methyladenosine-3'-phosphate
  modified_base 18: mod_base = OTHER; note = 2'-O-methyluridine-3'-phosphate
  modified_base 19: mod_base = OTHER; note = 2'-O-methylcytidine-3'-phosphate
  modified_base 20: mod_base = OTHER; note = 2'-O-methylcytidine-3'-phosphate
  modified_base 21: mod_base = OTHER; note = 2'-O-methyluridine-3'-phosphorothioate
  modified_base 22: mod_base = OTHER; note = 2'-O-methyluridine-3'-phosphorothioate
  modified_base 23: mod_base = OTHER; note = 2'-O-methylguanosine
agcaacattccggagcatccttg

SEQ ID NO: 2358 - RNA, 21 nt, synthetic construct
  source 1..21: mol_type = other RNA
  modified_base 1: mod_base = OTHER; note = 2'-O-methyladenosine-3'-phosphorothioate
  modified_base 2: mod_base = OTHER; note = 2'-O-methyluridine-3'-phosphorothioate
  modified_base 3: mod_base = OTHER; note = 2'-O-methylcytidine-3'-phosphate
  modified_base 4: mod_base = OTHER; note = 2'-O-methylcytidine-3'-phosphate
  modified_base 5: mod_base = OTHER; note = 2'-O-methyladenosine-3'-phosphate
  modified_base 6: mod_base = OTHER; note = 2'-O-methyladenosine-3'-phosphate
  modified_base 7: mod_base = OTHER; note = 2'-deoxy-2'-fluoroguanosine-3'-phosphate
  modified_base 8: mod_base = OTHER; note = 2'-O-methylguanosine-3'-phosphate
  modified_base 9: mod_base = OTHER; note = 2'-deoxy-2'-fluoroadenosine-3'-phosphate
  modified_base 10: mod_base = OTHER; note = 2'-deoxy-2'-fluorouridine-3'-phosphate
  modified_base 11: mod_base = OTHER; note = 2'-deoxy-2'-fluoroguanosine-3'-phosphate
  modified_base 12: mod_base = OTHER; note = 2'-O-methylcytidine-3'-phosphate
  modified_base 13: mod_base = OTHER; note = 2'-O-methyluridine-3'-phosphate
  modified_base 14: mod_base = OTHER; note = 2'-O-methylcytidine-3'-phosphate
  modified_base 15: mod_base = OTHER; note = 2'-O-methylcytidine-3'-phosphate
  modified_base 16: mod_base = OTHER; note = 2'-O-methylguanosine-3'-phosphate
  modified_base 17: mod_base = OTHER; note = 2'-O-methylguanosine-3'-phosphate
  modified_base 18: mod_base = OTHER; note = 2'-O-methyladenosine-3'-phosphate
  modified_base 19: mod_base = OTHER; note = 2'-O-methyladenosine-3'-phosphate
  modified_base 20: mod_base = OTHER; note = 2'-O-methyluridine-3'-phosphate
  modified_base 21: mod_base = OTHER; note = 2'-O-methylguanosine-3'-phosphate ((2S,4R)-1-[29-[[2-(acetylamino)-2-deoxy-beta-D-galactopyra nosyl]oxy]-14,14-bis[[3-[[3-[[5-[[2-(acetylamino)-2-deoxy-b eta-D-galactopyranosyl]oxy]-1-oxopentyl]amino]propyl]amino] -3-oxopropoxy]methyl]-1,12,19,25-tetraoxo-16-oxa-13,20,24-t riazanonacos-1-yl]-4-hydroxy-2-pyrrolidinyl)methyl ester
atccaaggatgctccggaatg

SEQ ID NO: 2359 - RNA, 23 nt, synthetic construct
  source 1..23: mol_type = other RNA
  modified_base 1: mod_base = OTHER; note = 2'-O-methylcytidine-3'-phosphorothioate
  modified_base 2: mod_base = OTHER; note = 2'-deoxy-2'-fluoroadenosine-3'-phosphorothioate
  modified_base 3: mod_base = OTHER; note = 2'-O-methyluridine-3'-phosphate
  modified_base 4: mod_base = OTHER; note = 2'-O-methyluridine-3'-phosphate
  modified_base 5: mod_base = OTHER; note = 2'-O-methylcytidine-3'-phosphate
  modified_base 6: mod_base = OTHER; note = 2'-deoxy-2'-fluorocytidine-3'-phosphate
  modified_base 7: mod_base = OTHER; note = 2'-O-methylguanosine-3'-phosphate
  modified_base 8: mod_base = OTHER; note = 2'-deoxy-2'-fluoroguanosine-3'-phosphate
  modified_base 9: mod_base = OTHER; note = 2'-deoxy-2'-fluoroadenosine-3'-phosphate
  modified_base 10: mod_base = OTHER; note = 2'-O-methylguanosine-3'-phosphate
  modified_base 11: mod_base = OTHER; note = 2'-O-methylcytidine-3'-phosphate
  modified_base 12: mod_base = OTHER; note = 2'-O-methyladenosine-3'-phosphate
  modified_base 13: mod_base = OTHER; note = 2'-O-methyluridine-3'-phosphate
  modified_base 14: mod_base = OTHER; note = 2'-deoxy-2'-fluorocytidine-3'-phosphate
  modified_base 15: mod_base = OTHER; note = 2'-O-methylcytidine-3'-phosphate
  modified_base 16: mod_base = OTHER; note = 2'-deoxy-2'-fluorouridine-3'-phosphate
  modified_base 17: mod_base = OTHER; note = 2'-O-methyluridine-3'-phosphate
  modified_base 18: mod_base = OTHER; note = 2'-O-methylguanosine-3'-phosphate
  modified_base 19: mod_base = OTHER; note = 2'-O-methylguanosine-3'-phosphate
  modified_base 20: mod_base = OTHER; note = 2'-O-methyladenosine-3'-phosphate
  modified_base 21: mod_base = OTHER; note = 2'-O-methyluridine-3'-phosphorothioate
  modified_base 22: mod_base = OTHER; note = 2'-O-methyladenosine-3'-phosphorothioate
  modified_base 23: mod_base = OTHER; note = 2'-O-methylcytidine
cattccggagcatccttggatac

SEQ ID NO: 2360 - RNA, 21 nt, synthetic construct
  source 1..21: mol_type = other RNA
  modified_base 1: mod_base = OTHER; note = 2'-O-methyluridine-3'-phosphorothioate
  modified_base 2: mod_base = OTHER; note = 2'-O-methyladenosine-3'-phosphorothioate
  modified_base 3: mod_base = OTHER; note = 2'-O-methyluridine-3'-phosphate
  modified_base 4: mod_base = OTHER; note = 2'-O-methylcytidine-3'-phosphate
  modified_base 5: mod_base = OTHER; note = 2'-O-methylcytidine-3'-phosphate
  modified_base 6: mod_base = OTHER; note = 2'-O-methyladenosine-3'-phosphate
  modified_base 7: mod_base = OTHER; note = 2'-deoxy-2'-fluoroadenosine-3'-phosphate
  modified_base 8: mod_base = OTHER; note = 2'-O-methylguanosine-3'-phosphate
  modified_base 9: mod_base = OTHER; note = 2'-deoxy-2'-fluoroguanosine-3'-phosphate
  modified_base 10: mod_base = OTHER; note = 2'-deoxy-2'-fluoroadenosine-3'-phosphate
  modified_base 11: mod_base = OTHER; note = 2'-deoxy-2'-fluorouridine-3'-phosphate
  modified_base 12: mod_base = OTHER; note = 2'-O-methylguanosine-3'-phosphate
  modified_base 13: mod_base = OTHER; note = 2'-O-methylcytidine-3'-phosphate
  modified_base 14: mod_base = OTHER; note = 2'-O-methyluridine-3'-phosphate
  modified_base 15: mod_base = OTHER; note = 2'-O-methylcytidine-3'-phosphate
  modified_base 16: mod_base = OTHER; note = 2'-O-methylcytidine-3'-phosphate
  modified_base 17: mod_base = OTHER; note = 2'-O-methylguanosine-3'-phosphate
  modified_base 18: mod_base = OTHER; note = 2'-O-methylguanosine-3'-phosphate
  modified_base 19: mod_base = OTHER; note = 2'-O-methyladenosine-3'-phosphate
  modified_base 20: mod_base = OTHER; note = 2'-O-methyladenosine-3'-phosphate
  modified_base 21: mod_base = OTHER; note = 2'-O-methyluridine-3'-phosphate ((2S,4R)-1-[29-[[2-(acetylamino)-2-deoxy-beta-D-galactopyra nosyl]oxy]-14,14-bis[[3-[[3-[[5-[[2-(acetylamino)-2-deoxy-b eta-D-galactopyranosyl]oxy]-1-oxopentyl]amino]propyl]amino] -3-oxopropoxy]methyl]-1,12,19,25-tetraoxo-16-oxa-13,20,24-t riazanonacos-1-yl]-4-hydroxy-2-pyrrolidinyl)methyl ester
tatccaaggatgctccggaat

SEQ ID NO: 2361 - RNA, 23 nt, synthetic construct
  source 1..23: mol_type = other RNA
  modified_base 1: mod_base = OTHER; note = 2'-O-methyladenosine-3'-phosphorothioate
  modified_base 2: mod_base = OTHER; note = 2'-deoxy-2'-fluorouridine-3'-phosphorothioate
  modified_base 3: mod_base = OTHER; note = 2'-O-methyluridine-3'-phosphate
  modified_base 4: mod_base = OTHER; note = 2'-O-methylcytidine-3'-phosphate
  modified_base 5: mod_base = OTHER; note = 2'-O-methylcytidine-3'-phosphate
  modified_base 6: mod_base = OTHER; note = 2'-deoxy-2'-fluoroguanosine-3'-phosphate
  modified_base 7: mod_base = OTHER; note = 2'-O-methylguanosine-3'-phosphate
  modified_base 8: mod_base = OTHER; note = 2'-deoxy-2'-fluoroadenosine-3'-phosphate
  modified_base 9: mod_base = OTHER; note = 2'-deoxy-2'-fluoroguanosine-3'-phosphate
  modified_base 10: mod_base = OTHER; note = 2'-O-methylcytidine-3'-phosphate
  modified_base 11: mod_base = OTHER; note = 2'-O-methyladenosine-3'-phosphate
  modified_base 12: mod_base = OTHER; note = 2'-O-methyluridine-3'-phosphate
  modified_base 13: mod_base = OTHER; note = 2'-O-methylcytidine-3'-phosphate
  modified_base 14: mod_base = OTHER; note = 2'-deoxy-2'-fluorocytidine-3'-phosphate
  modified_base 15: mod_base = OTHER; note = 2'-O-methyluridine-3'-phosphate
  modified_base 16: mod_base = OTHER; note = 2'-deoxy-2'-fluorouridine-3'-phosphate
  modified_base 17: mod_base = OTHER; note = 2'-O-methylguanosine-3'-phosphate
  modified_base 18: mod_base = OTHER; note = 2'-O-methylguanosine-3'-phosphate
  modified_base 19: mod_base = OTHER; note = 2'-O-methyladenosine-3'-phosphate
  modified_base 20: mod_base = OTHER; note = 2'-O-methyluridine-3'-phosphate
  modified_base 21: mod_base = OTHER; note = 2'-O-methyladenosine-3'-phosphorothioate
  modified_base 22: mod_base = OTHER; note = 2'-O-methylcytidine-3'-phosphorothioate
  modified_base 23: mod_base = OTHER; note = 2'-O-methyladenosine
attccggagcatccttggataca

SEQ ID NO: 2362 - RNA, 21 nt, synthetic construct
  source 1..21: mol_type = other RNA
  modified_base 1: mod_base = OTHER; note = 2'-O-methyladenosine-3'-phosphorothioate
  modified_base 2: mod_base = OTHER; note = 2'-O-methyladenosine-3'-phosphorothioate
  modified_base 3: mod_base = OTHER; note = 2'-O-methyluridine-3'-phosphate
  modified_base 4: mod_base = OTHER; note = 2'-O-methylguanosine-3'-phosphate
  modified_base 5: mod_base = OTHER; note = 2'-O-methylguanosine-3'-phosphate
  modified_base 6: mod_base = OTHER; note = 2'-O-methylguanosine-3'-phosphate
  modified_base 7: mod_base = OTHER; note = 2'-deoxy-2'-fluorouridine-3'-phosphate
  modified_base 8: mod_base = OTHER; note = 2'-O-methylguanosine-3'-phosphate
  modified_base 9: mod_base = OTHER; note = 2'-deoxy-2'-fluoroguanosine-3'-phosphate
  modified_base 10: mod_base = OTHER; note = 2'-deoxy-2'-fluorocytidine-3'-phosphate
  modified_base 11: mod_base = OTHER; note = 2'-deoxy-2'-fluoroguanosine-3'-phosphate
  modified_base 12: mod_base = OTHER; note = 2'-O-methylguanosine-3'-phosphate
  modified_base 13: mod_base = OTHER; note = 2'-O-methyluridine-3'-phosphate
  modified_base 14: mod_base = OTHER; note = 2'-O-methyladenosine-3'-phosphate
  modified_base 15: mod_base = OTHER; note = 2'-O-methyladenosine-3'-phosphate
  modified_base 16: mod_base = OTHER; note = 2'-O-methyluridine-3'-phosphate
  modified_base 17: mod_base = OTHER; note = 2'-O-methyluridine-3'-phosphate
  modified_base 18: mod_base = OTHER; note = 2'-O-methylguanosine-3'-phosphate
  modified_base 19: mod_base = OTHER; note = 2'-O-methylguanosine-3'-phosphate
  modified_base 20: mod_base = OTHER; note = 2'-O-methyluridine-3'-phosphate
  modified_base 21: mod_base = OTHER; note = 2'-O-methylguanosine-3'-phosphate ((2S,4R)-1-[29-[[2-(acetylamino)-2-deoxy-beta-D-galactopyra nosyl]oxy]-14,14-bis[[3-[[3-[[5-[[2-(acetylamino)-2-deoxy-b eta-D-galactopyranosyl]oxy]-1-oxopentyl]amino]propyl]amino] -3-oxopropoxy]methyl]-1,12,19,25-tetraoxo-16-oxa-13,20,24-t riazanonacos-1-yl]-4-hydroxy-2-pyrrolidinyl)methyl ester
aatgggtggcggtaattggtg

SEQ ID NO: 2363 - RNA, 23 nt, synthetic construct
  source 1..23: mol_type = other RNA
  modified_base 1: mod_base = OTHER; note = 2'-O-methylcytidine-3'-phosphorothioate
  modified_base 2: mod_base = OTHER; note = 2'-deoxy-2'-fluoroadenosine-3'-phosphorothioate
  modified_base 3: mod_base = OTHER; note = 2'-O-methylcytidine-3'-phosphate
  modified_base 4: mod_base = OTHER; note = 2'-O-methylcytidine-3'-phosphate
  modified_base 5: mod_base = OTHER; note = 2'-O-methyladenosine-3'-phosphate
  modified_base 6: mod_base = OTHER; note = 2'-deoxy-2'-fluoroadenosine-3'-phosphate
  modified_base 7: mod_base = OTHER; note = 2'-O-methyluridine-3'-phosphate
  modified_base 8: mod_base = OTHER; note = 2'-deoxy-2'-fluorouridine-3'-phosphate
  modified_base 9: mod_base = OTHER; note = 2'-deoxy-2'-fluoroadenosine-3'-phosphate
  modified_base 10: mod_base = OTHER; note = 2'-O-methylcytidine-3'-phosphate
  modified_base 11: mod_base = OTHER; note = 2'-O-methylcytidine-3'-phosphate
  modified_base 12: mod_base = OTHER; note = 2'-O-methylguanosine-3'-phosphate
  modified_base 13: mod_base = OTHER; note = 2'-O-methylcytidine-3'-phosphate
  modified_base 14: mod_base = OTHER; note = 2'-deoxy-2'-fluorocytidine-3'-phosphate
  modified_base 15: mod_base = OTHER; note = 2'-O-methyladenosine-3'-phosphate
  modified_base 16: mod_base = OTHER; note = 2'-deoxy-2'-fluorocytidine-3'-phosphate
  modified_base 17: mod_base = OTHER; note = 2'-O-methylcytidine-3'-phosphate
  modified_base 18: mod_base = OTHER; note = 2'-O-methylcytidine-3'-phosphate
  modified_base 19: mod_base = OTHER; note = 2'-O-methyladenosine-3'-phosphate
  modified_base 20: mod_base = OTHER; note = 2'-O-methyluridine-3'-phosphate
  modified_base 21: mod_base = OTHER; note = 2'-O-methyluridine-3'-phosphorothioate
  modified_base 22: mod_base = OTHER; note = 2'-O-methylcytidine-3'-phosphorothioate
  modified_base 23: mod_base = OTHER; note = 2'-O-methylcytidine
caccaattaccgccacccattcc

SEQ ID NO: 2364 - RNA, 21 nt, synthetic construct
  source 1..21: mol_type = other RNA
  modified_base 1: mod_base = OTHER; note = 2'-O-methyladenosine-3'-phosphorothioate
  modified_base 2: mod_base = OTHER; note = 2'-O-methyluridine-3'-phosphorothioate
  modified_base 3: mod_base = OTHER; note = 2'-O-methylguanosine-3'-phosphate
  modified_base 4: mod_base = OTHER; note = 2'-O-methylguanosine-3'-phosphate
  modified_base 5: mod_base = OTHER; note = 2'-O-methylguanosine-3'-phosphate
  modified_base 6: mod_base = OTHER; note = 2'-O-methyluridine-3'-phosphate
  modified_base 7: mod_base = OTHER; note = 2'-deoxy-2'-fluoroguanosine-3'-phosphate
  modified_base 8: mod_base = OTHER; note = 2'-O-methylguanosine-3'-phosphate
  modified_base 9: mod_base = OTHER; note = 2'-deoxy-2'-fluorocytidine-3'-phosphate
  modified_base 10: mod_base = OTHER; note = 2'-deoxy-2'-fluoroguanosine-3'-phosphate
  modified_base 11: mod_base = OTHER; note = 2'-deoxy-2'-fluoroguanosine-3'-phosphate
  modified_base 12: mod_base = OTHER; note = 2'-O-methyluridine-3'-phosphate
  modified_base 13: mod_base = OTHER; note = 2'-O-methyladenosine-3'-phosphate
  modified_base 14: mod_base = OTHER; note = 2'-O-methyladenosine-3'-phosphate
  modified_base 15: mod_base = OTHER; note = 2'-O-methyluridine-3'-phosphate
  modified_base 16: mod_base = OTHER; note = 2'-O-methyluridine-3'-phosphate
  modified_base 17: mod_base = OTHER; note = 2'-O-methylguanosine-3'-phosphate
  modified_base 18: mod_base = OTHER; note = 2'-O-methylguanosine-3'-phosphate
  modified_base 19: mod_base = OTHER; note = 2'-O-methyluridine-3'-phosphate
  modified_base 20: mod_base = OTHER; note = 2'-O-methylguanosine-3'-phosphate
  modified_base 21: mod_base = OTHER; note = 2'-O-methyladenosine-3'-phosphate ((2S,4R)-1-[29-[[2-(acetylamino)-2-deoxy-beta-D-galactopyra nosyl]oxy]-14,14-bis[[3-[[3-[[5-[[2-(acetylamino)-2-deoxy-b eta-D-galactopyranosyl]oxy]-1-oxopentyl]amino]propyl]amino] -3-oxopropoxy]methyl]-1,12,19,25-tetraoxo-16-oxa-13,20,24-t riazanonacos-1-yl]-4-hydroxy-2-pyrrolidinyl)methyl ester
atgggtggcggtaattggtga

SEQ ID NO: 2365 - RNA, 23 nt, synthetic construct
  source 1..23: mol_type = other RNA
  modified_base 1: mod_base = OTHER; note = 2'-O-methyluridine-3'-phosphorothioate
  modified_base 2: mod_base = OTHER; note = 2'-deoxy-2'-fluorocytidine-3'-phosphorothioate
  modified_base 3: mod_base = OTHER; note = 2'-O-methyladenosine-3'-phosphate
  modified_base 4: mod_base = OTHER; note = 2'-O-methylcytidine-3'-phosphate
  modified_base 5: mod_base = OTHER; note = 2'-O-methylcytidine-3'-phosphate
  modified_base 6: mod_base = OTHER; note = 2'-deoxy-2'-fluoroadenosine-3'-phosphate
  modified_base 7: mod_base = OTHER; note = 2'-O-methyladenosine-3'-phosphate
  modified_base 8: mod_base = OTHER; note = 2'-deoxy-2'-fluorouridine-3'-phosphate
  modified_base 9: mod_base = OTHER; note = 2'-deoxy-2'-fluorouridine-3'-phosphate
  modified_base 10: mod_base = OTHER; note = 2'-O-methyladenosine-3'-phosphate
  modified_base 11: mod_base = OTHER; note = 2'-O-methylcytidine-3'-phosphate
  modified_base 12: mod_base = OTHER; note = 2'-O-methylcytidine-3'-phosphate
  modified_base 13: mod_base = OTHER; note = 2'-O-methylguanosine-3'-phosphate
  modified_base 14: mod_base = OTHER; note = 2'-deoxy-2'-fluorocytidine-3'-phosphate
  modified_base 15: mod_base = OTHER; note = 2'-O-methylcytidine-3'-phosphate
  modified_base 16: mod_base = OTHER; note = 2'-deoxy-2'-fluoroadenosine-3'-phosphate
  modified_base 17: mod_base = OTHER; note = 2'-O-methylcytidine-3'-phosphate
  modified_base 18: mod_base = OTHER; note = 2'-O-methylcytidine-3'-phosphate
  modified_base 19: mod_base = OTHER; note = 2'-O-methylcytidine-3'-phosphate
  modified_base 20: mod_base = OTHER; note = 2'-O-methyladenosine-3'-phosphate
  modified_base 21: mod_base = OTHER; note = 2'-O-methyluridine-3'-phosphorothioate
  modified_base 22: mod_base = OTHER; note = 2'-O-methyluridine-3'-phosphorothioate
  modified_base 23: mod_base = OTHER; note = 2'-O-methylcytidine
tcaccaattaccgccacccattc

SEQ ID NO: 2366 - RNA, 21 nt, synthetic construct
  source 1..21: mol_type = other RNA
  modified_base 1: mod_base = OTHER; note = 2'-O-methyluridine-3'-phosphorothioate
  modified_base 2: mod_base = OTHER; note = 2'-O-methyluridine-3'-phosphorothioate
  modified_base 3: mod_base = OTHER; note = 2'-O-methylguanosine-3'-phosphate
  modified_base 4: mod_base = OTHER; note = 2'-O-methylguanosine-3'-phosphate
  modified_base 5: mod_base = OTHER; note = 2'-O-methyladenosine-3'-phosphate
  modified_base 6: mod_base = OTHER; note = 2'-O-methyladenosine-3'-phosphate
  modified_base 7: mod_base = OTHER; note = 2'-deoxy-2'-fluorouridine-3'-phosphate
  modified_base 8: mod_base = OTHER; note = 2'-O-methylguanosine-3'-phosphate
  modified_base 9: mod_base = OTHER; note = 2'-deoxy-2'-fluoroguanosine-3'-phosphate
  modified_base 10: mod_base = OTHER; note = 2'-deoxy-2'-fluoroguanosine-3'-phosphate
  modified_base 11: mod_base = OTHER; note = 2'-deoxy-2'-fluorouridine-3'-phosphate
  modified_base 12: mod_base = OTHER; note = 2'-O-methylguanosine-3'-phosphate
  modified_base 13: mod_base = OTHER; note = 2'-O-methylguanosine-3'-phosphate
  modified_base 14: mod_base = OTHER; note = 2'-O-methylcytidine-3'-phosphate
  modified_base 15: mod_base = OTHER; note = 2'-O-methylguanosine-3'-phosphate
  modified_base 16: mod_base = OTHER; note = 2'-O-methylguanosine-3'-phosphate
  modified_base 17: mod_base = OTHER; note = 2'-O-methyluridine-3'-phosphate
  modified_base 18: mod_base = OTHER; note = 2'-O-methyladenosine-3'-phosphate
  modified_base 19: mod_base = OTHER; note = 2'-O-methyladenosine-3'-phosphate
  modified_base 20: mod_base = OTHER; note = 2'-O-methyluridine-3'-phosphate
  modified_base 21: mod_base = OTHER; note = 2'-O-methyluridine-3'-phosphate ((2S,4R)-1-[29-[[2-(acetylamino)-2-deoxy-beta-D-galactopyra nosyl]oxy]-14,14-bis[[3-[[3-[[5-[[2-(acetylamino)-2-deoxy-b eta-D-galactopyranosyl]oxy]-1-oxopentyl]amino]propyl]amino] -3-oxopropoxy]methyl]-1,12,19,25-tetraoxo-16-oxa-13,20,24-t riazanonacos-1-yl]-4-hydroxy-2-pyrrolidinyl)methyl ester
ttggaatgggtggcggtaatt

SEQ ID NO: 2367 - RNA, 23 nt, synthetic construct
  source 1..23: mol_type = other RNA
  modified_base 1: mod_base = OTHER; note = 2'-O-methyladenosine-3'-phosphorothioate
  modified_base 2: mod_base = OTHER; note = 2'-deoxy-2'-fluoroadenosine-3'-phosphorothioate
  modified_base 3: mod_base = OTHER; note = 2'-O-methyluridine-3'-phosphate
  modified_base 4: mod_base = OTHER; note = 2'-O-methyluridine-3'-phosphate
  modified_base 5: mod_base = OTHER; note = 2'-O-methyladenosine-3'-phosphate
  modified_base 6: mod_base = OTHER; note = 2'-deoxy-2'-fluorocytidine-3'-phosphate
  modified_base 7: mod_base = OTHER; note = 2'-O-methylcytidine-3'-phosphate
  modified_base 8: mod_base = OTHER; note = 2'-deoxy-2'-fluoroguanosine-3'-phosphate
  modified_base 9: mod_base = OTHER; note = 2'-deoxy-2'-fluorocytidine-3'-phosphate
  modified_base 10: mod_base = OTHER; note = 2'-O-methylcytidine-3'-phosphate
  modified_base 11: mod_base = OTHER; note = 2'-O-methyladenosine-3'-phosphate
  modified_base 12: mod_base = OTHER; note = 2'-O-methylcytidine-3'-phosphate
  modified_base 13: mod_base = OTHER; note = 2'-O-methylcytidine-3'-phosphate
  modified_base 14: mod_base = OTHER; note = 2'-deoxy-2'-fluorocytidine-3'-phosphate
  modified_base 15: mod_base = OTHER; note = 2'-O-methyladenosine-3'-phosphate
  modified_base 16: mod_base = OTHER; note = 2'-deoxy-2'-fluorouridine-3'-phosphate
  modified_base 17: mod_base = OTHER; note = 2'-O-methyluridine-3'-phosphate
  modified_base 18: mod_base = OTHER; note = 2'-O-methylcytidine-3'-phosphate
  modified_base 19: mod_base = OTHER; note = 2'-O-methylcytidine-3'-phosphate
  modified_base 20: mod_base = OTHER; note = 2'-O-methyladenosine-3'-phosphate
  modified_base 21: mod_base = OTHER; note = 2'-O-methyladenosine-3'-phosphorothioate
  modified_base 22: mod_base = OTHER; note = 2'-O-methyluridine-3'-phosphorothioate
  modified_base 23: mod_base = OTHER; note = 2'-O-methyluridine
aattaccgccacccattccaatt

SEQ ID NO: 2368 - RNA, 21 nt, synthetic construct
  source 1..21: mol_type = other RNA
  modified_base 1: mod_base = OTHER; note = 2'-O-methyladenosine-3'-phosphorothioate
  modified_base 2: mod_base = OTHER; note = 2'-O-methyluridine-3'-phosphorothioate
  modified_base 3: mod_base = OTHER; note = 2'-O-methyluridine-3'-phosphate
  modified_base 4: mod_base = OTHER; note = 2'-O-methylguanosine-3'-phosphate
  modified_base 5: mod_base = OTHER; note = 2'-O-methylguanosine-3'-phosphate
  modified_base 6: mod_base = OTHER; note = 2'-O-methyladenosine-3'-phosphate
  modified_base 7: mod_base = OTHER; note = 2'-deoxy-2'-fluoroadenosine-3'-phosphate
  modified_base 8: mod_base = OTHER; note = 2'-O-methyluridine-3'-phosphate
  modified_base 9: mod_base = OTHER; note = 2'-deoxy-2'-fluoroguanosine-3'-phosphate
  modified_base 10: mod_base = OTHER; note = 2'-deoxy-2'-fluoroguanosine-3'-phosphate
  modified_base 11: mod_base = OTHER; note = 2'-deoxy-2'-fluoroguanosine-3'-phosphate
  modified_base 12: mod_base = OTHER; note = 2'-O-methyluridine-3'-phosphate
  modified_base 13: mod_base = OTHER; note = 2'-O-methylguanosine-3'-phosphate
  modified_base 14: mod_base = OTHER; note = 2'-O-methylguanosine-3'-phosphate
  modified_base 15: mod_base = OTHER; note = 2'-O-methylcytidine-3'-phosphate
  modified_base 16: mod_base = OTHER; note = 2'-O-methylguanosine-3'-phosphate
  modified_base 17: mod_base = OTHER; note = 2'-O-methylguanosine-3'-phosphate
  modified_base 18: mod_base = OTHER; note = 2'-O-methyluridine-3'-phosphate
  modified_base 19: mod_base = OTHER; note = 2'-O-methyladenosine-3'-phosphate
  modified_base 20: mod_base = OTHER; note = 2'-O-methyladenosine-3'-phosphate
  modified_base 21: mod_base = OTHER; note = 2'-O-methyluridine-3'-phosphate ((2S,4R)-1-[29-[[2-(acetylamino)-2-deoxy-beta-D-galactopyra nosyl]oxy]-14,14-bis[[3-[[3-[[5-[[2-(acetylamino)-2-deoxy-b eta-D-galactopyranosyl]oxy]-1-oxopentyl]amino]propyl]amino] -3-oxopropoxy]methyl]-1,12,19,25-tetraoxo-16-oxa-13,20,24-t riazanonacos-1-yl]-4-hydroxy-2-pyrrolidinyl)methyl ester
attggaatgggtggcggtaat

SEQ ID NO: 2369 - RNA, 23 nt, synthetic construct
  source 1..23: mol_type = other RNA
  modified_base 1: mod_base = OTHER; note = 2'-O-methyladenosine-3'-phosphorothioate
  modified_base 2: mod_base = OTHER; note = 2'-deoxy-2'-fluorouridine-3'-phosphorothioate
  modified_base 3: mod_base = OTHER; note = 2'-O-methyluridine-3'-phosphate
  modified_base 4: mod_base = OTHER; note = 2'-O-methyladenosine-3'-phosphate
  modified_base 5: mod_base = OTHER; note = 2'-O-methylcytidine-3'-phosphate
  modified_base 6: mod_base = OTHER; note = 2'-deoxy-2'-fluorocytidine-3'-phosphate
  modified_base 7: mod_base = OTHER; note = 2'-O-methylguanosine-3'-phosphate
  modified_base 8: mod_base = OTHER; note = 2'-deoxy-2'-fluorocytidine-3'-phosphate
  modified_base 9: mod_base = OTHER; note = 2'-deoxy-2'-fluorocytidine-3'-phosphate
  modified_base 10: mod_base = OTHER; note = 2'-O-methyladenosine-3'-phosphate
  modified_base 11: mod_base = OTHER; note = 2'-O-methylcytidine-3'-phosphate
  modified_base 12: mod_base = OTHER; note = 2'-O-methylcytidine-3'-phosphate
  modified_base 13: mod_base = OTHER; note = 2'-O-methylcytidine-3'-phosphate
  modified_base 14: mod_base = OTHER; note = 2'-deoxy-2'-fluoroadenosine-3'-phosphate
  modified_base 15: mod_base = OTHER; note = 2'-O-methyluridine-3'-phosphate
  modified_base 16: mod_base = OTHER; note = 2'-deoxy-2'-fluorouridine-3'-phosphate
  modified_base 17: mod_base = OTHER; note = 2'-O-methylcytidine-3'-phosphate
  modified_base 18: mod_base = OTHER; note = 2'-O-methylcytidine-3'-phosphate
  modified_base 19: mod_base = OTHER; note = 2'-O-methyladenosine-3'-phosphate
  modified_base 20: mod_base = OTHER; note = 2'-O-methyladenosine-3'-phosphate
  modified_base 21: mod_base = OTHER; note = 2'-O-methyluridine-3'-phosphorothioate
  modified_base 22: mod_base = OTHER; note = 2'-O-methyluridine-3'-phosphorothioate
  modified_base 23: mod_base = OTHER; note = 2'-O-methylcytidine
attaccgccacccattccaattc

SEQ ID NO: 2370 - RNA, 21 nt, synthetic construct
  source 1..21: mol_type = other RNA
  modified_base 1: mod_base = OTHER; note = 2'-O-methylguanosine-3'-phosphorothioate
  modified_base 2: mod_base = OTHER; note = 2'-O-methylguanosine-3'-phosphorothioate
  modified_base 3: mod_base = OTHER; note = 2'-O-methyladenosine-3'-phosphate
  modified_base 4: mod_base = OTHER; note = 2'-O-methyladenosine-3'-phosphate
  modified_base 5: mod_base = OTHER; note = 2'-O-methyladenosine-3'-phosphate
  modified_base 6: mod_base = OTHER; note = 2'-O-methylguanosine-3'-phosphate
  modified_base 7: mod_base = OTHER; note = 2'-deoxy-2'-fluoroguanosine-3'-phosphate
  modified_base 8: mod_base = OTHER; note = 2'-O-methylcytidine-3'-phosphate
  modified_base 9: mod_base = OTHER; note = 2'-deoxy-2'-fluoroadenosine-3'-phosphate
  modified_base 10: mod_base = OTHER; note = 2'-deoxy-2'-fluorocytidine-3'-phosphate
  modified_base 11: mod_base = OTHER; note = 2'-deoxy-2'-fluorouridine-3'-phosphate
  modified_base 12: mod_base = OTHER; note = 2'-O-methylguanosine-3'-phosphate
  modified_base 13: mod_base = OTHER; note = 2'-O-methyladenosine-3'-phosphate
  modified_base 14: mod_base = OTHER; note = 2'-O-methyluridine-3'-phosphate
  modified_base 15: mod_base = OTHER; note = 2'-O-methylguanosine-3'-phosphate
  modified_base 16: mod_base = OTHER; note = 2'-O-methyluridine-3'-phosphate
  modified_base 17: mod_base = OTHER; note = 2'-O-methyluridine-3'-phosphate
  modified_base 18: mod_base = OTHER; note = 2'-O-methylcytidine-3'-phosphate
  modified_base 19: mod_base = OTHER; note = 2'-O-methyluridine-3'-phosphate
  modified_base 20: mod_base = OTHER; note = 2'-O-methylguanosine-3'-phosphate
  modified_base 21: mod_base = OTHER; note = 2'-O-methyladenosine-3'-phosphate ((2S,4R)-1-[29-[[2-(acetylamino)-2-deoxy-beta-D-galactopyra nosyl]oxy]-14,14-bis[[3-[[3-[[5-[[2-(acetylamino)-2-deoxy-b eta-D-galactopyranosyl]oxy]-1-oxopentyl]amino]propyl]amino] -3-oxopropoxy]methyl]-1,12,19,25-tetraoxo-16-oxa-13,20,24-t riazanonacos-1-yl]-4-hydroxy-2-pyrrolidinyl)methyl ester
ggaaaggcactgatgttctga

SEQ ID NO: 2371 - RNA, 23 nt, synthetic construct
  source 1..23: mol_type = other RNA
  modified_base 1: mod_base = OTHER; note = 2'-O-methyluridine-3'-phosphorothioate
  modified_base 2: mod_base = OTHER; note = 2'-deoxy-2'-fluorocytidine-3'-phosphorothioate
  modified_base 3: mod_base = OTHER; note = 2'-O-methyladenosine-3'-phosphate
  modified_base 4: mod_base = OTHER; note = 2'-O-methylguanosine-3'-phosphate
  modified_base 5: mod_base = OTHER; note = 2'-O-methyladenosine-3'-phosphate
  modified_base 6: mod_base = OTHER; note = 2'-deoxy-2'-fluoroadenosine-3'-phosphate
  modified_base 7: mod_base = OTHER; note = 2'-O-methylcytidine-3'-phosphate
  modified_base 8: mod_base = OTHER; note = 2'-deoxy-2'-fluoroadenosine-3'-phosphate
  modified_base 9: mod_base = OTHER; note = 2'-deoxy-2'-fluorouridine-3'-phosphate
  modified_base 10: mod_base = OTHER; note = 2'-O-methylcytidine-3'-phosphate
  modified_base 11: mod_base = OTHER; note = 2'-O-methyladenosine-3'-phosphate
  modified_base 12: mod_base = OTHER; note = 2'-O-methylguanosine-3'-phosphate
  modified_base 13: mod_base = OTHER; note = 2'-O-methyluridine-3'-phosphate
  modified_base 14: mod_base = OTHER; note = 2'-deoxy-2'-fluoroguanosine-3'-phosphate
  modified_base 15: mod_base = OTHER; note = 2'-O-methylcytidine-3'-phosphate
  modified_base 16: mod_base = OTHER; note = 2'-deoxy-2'-fluorocytidine-3'-phosphate
  modified_base 17: mod_base = OTHER; note = 2'-O-methyluridine-3'-phosphate
  modified_base 18: mod_base = OTHER; note = 2'-O-methyluridine-3'-phosphate
  modified_base 19: mod_base = OTHER; note = 2'-O-methyluridine-3'-phosphate
  modified_base 20: mod_base = OTHER; note = 2'-O-methylcytidine-3'-phosphate
  modified_base 21: mod_base = OTHER; note = 2'-O-methylcytidine-3'-phosphorothioate
  modified_base 22: mod_base = OTHER; note = 2'-O-methylguanosine-3'-phosphorothioate
  modified_base 23: mod_base = OTHER; note = 2'-O-methylcytidine
tcagaacatcagtgcctttccgc

SEQ ID NO: 2372 - RNA, 21 nt, synthetic construct
  source 1..21: mol_type = other RNA
  modified_base 1: mod_base = OTHER; note = 2'-O-methylguanosine-3'-phosphorothioate
  modified_base 2: mod_base = OTHER; note = 2'-O-methyladenosine-3'-phosphorothioate
  modified_base 3: mod_base = OTHER; note = 2'-O-methyladenosine-3'-phosphate
  modified_base 4: mod_base = OTHER; note = 2'-O-methyladenosine-3'-phosphate
  modified_base 5: mod_base = OTHER; note = 2'-O-methylguanosine-3'-phosphate
  modified_base 6: mod_base = OTHER; note = 2'-O-methylguanosine-3'-phosphate
  modified_base 7: mod_base = OTHER; note = 2'-deoxy-2'-fluorocytidine-3'-phosphate
  modified_base 8: mod_base = OTHER; note = 2'-O-methyladenosine-3'-phosphate
  modified_base 9: mod_base = OTHER; note = 2'-deoxy-2'-fluorocytidine-3'-phosphate
  modified_base 10: mod_base = OTHER; note = 2'-deoxy-2'-fluorouridine-3'-phosphate
  modified_base 11: mod_base = OTHER; note = 2'-deoxy-2'-fluoroguanosine-3'-phosphate
  modified_base 12: mod_base = OTHER; note = 2'-O-methyladenosine-3'-phosphate
  modified_base 13: mod_base = OTHER; note = 2'-O-methyluridine-3'-phosphate
  modified_base 14: mod_base = OTHER; note = 2'-O-methylguanosine-3'-phosphate
  modified_base 15: mod_base = OTHER; note = 2'-O-methyluridine-3'-phosphate
  modified_base 16: mod_base = OTHER; note = 2'-O-methyluridine-3'-phosphate
  modified_base 17: mod_base = OTHER; note = 2'-O-methylcytidine-3'-phosphate
  modified_base 18: mod_base = OTHER; note = 2'-O-methyluridine-3'-phosphate
  modified_base 19: mod_base = OTHER; note = 2'-O-methylguanosine-3'-phosphate
  modified_base 20: mod_base = OTHER; note = 2'-O-methyladenosine-3'-phosphate
  modified_base 21: mod_base = OTHER; note = 2'-O-methyladenosine-3'-phosphate ((2S,4R)-1-[29-[[2-(acetylamino)-2-deoxy-beta-D-galactopyra nosyl]oxy]-14,14-bis[[3-[[3-[[5-[[2-(acetylamino)-2-deoxy-b eta-D-galactopyranosyl]oxy]-1-oxopentyl]amino]propyl]amino] -3-oxopropoxy]methyl]-1,12,19,25-tetraoxo-16-oxa-13,20,24-t riazanonacos-1-yl]-4-hydroxy-2-pyrrolidinyl)methyl ester
gaaaggcactgatgttctgaa

SEQ ID NO: 2373 - RNA, 23 nt, synthetic construct
  source 1..23: mol_type = other RNA
  modified_base 1: mod_base = OTHER; note = 2'-O-methyluridine-3'-phosphorothioate
  modified_base 2: mod_base = OTHER; note = 2'-deoxy-2'-fluorouridine-3'-phosphorothioate
  modified_base 3: mod_base = OTHER; note = 2'-O-methylcytidine-3'-phosphate
  modified_base 4: mod_base = OTHER; note = 2'-O-methyladenosine-3'-phosphate
  modified_base 5: mod_base = OTHER; note = 2'-O-methylguanosine-3'-phosphate
  modified_base 6: mod_base = OTHER; note = 2'-deoxy-2'-fluoroadenosine-3'-phosphate
  modified_base 7: mod_base = OTHER; note = 2'-O-methyladenosine-3'-phosphate
  modified_base 8: mod_base = OTHER; note = 2'-deoxy-2'-fluorocytidine-3'-phosphate
  modified_base 9: mod_base = OTHER; note = 2'-deoxy-2'-fluoroadenosine-3'-phosphate
  modified_base 10: mod_base = OTHER; note = 2'-O-methyluridine-3'-phosphate
  modified_base 11: mod_base = OTHER; note = 2'-O-methylcytidine-3'-phosphate
  modified_base 12: mod_base = OTHER; note = 2'-O-methyladenosine-3'-phosphate
  modified_base 13: mod_base = OTHER; note = 2'-O-methylguanosine-3'-phosphate
  modified_base 14: mod_base = OTHER; note = 2'-deoxy-2'-fluorouridine-3'-phosphate
  modified_base 15: mod_base = OTHER; note = 2'-O-methylguanosine-3'-phosphate
  modified_base 16: mod_base = OTHER; note = 2'-deoxy-2'-fluorocytidine-3'-phosphate
  modified_base 17: mod_base = OTHER; note = 2'-O-methylcytidine-3'-phosphate
  modified_base 18: mod_base = OTHER; note = 2'-O-methyluridine-3'-phosphate
  modified_base 19: mod_base = OTHER; note = 2'-O-methyluridine-3'-phosphate
  modified_base 20: mod_base = OTHER; note = 2'-O-methyluridine-3'-phosphate
  modified_base 21: mod_base = OTHER; note = 2'-O-methylcytidine-3'-phosphorothioate
  modified_base 22: mod_base = OTHER; note = 2'-O-methylcytidine-3'-phosphorothioate
  modified_base 23: mod_base = OTHER; note = 2'-O-methylguanosine
ttcagaacatcagtgcctttccg

SEQ ID NO: 2374 - RNA, 21 nt, synthetic construct
  source 1..21: mol_type = other RNA
  modified_base 1: mod_base = OTHER; note = 2'-O-methylguanosine-3'-phosphorothioate
  modified_base 2: mod_base = OTHER; note = 2'-O-methyluridine-3'-phosphorothioate
  modified_base 3: mod_base = OTHER; note = 2'-O-methylguanosine-3'-phosphate
  modified_base 4: mod_base = OTHER; note = 2'-O-methylcytidine-3'-phosphate
  modified_base 5: mod_base = OTHER; note = 2'-O-methylguanosine-3'-phosphate
  modified_base 6: mod_base = OTHER; note = 2'-O-methylguanosine-3'-phosphate
  modified_base 7: mod_base = OTHER; note = 2'-deoxy-2'-fluoroadenosine-3'-phosphate
  modified_base 8: mod_base = OTHER; note = 2'-O-methyladenosine-3'-phosphate
  modified_base 9: mod_base = OTHER; note = 2'-deoxy-2'-fluoroadenosine-3'-phosphate
  modified_base 10: mod_base = OTHER; note = 2'-deoxy-2'-fluoroguanosine-3'-phosphate
  modified_base 11: mod_base = OTHER; note = 2'-deoxy-2'-fluoroguanosine-3'-phosphate
  modified_base 12: mod_base = OTHER; note = 2'-O-methylcytidine-3'-phosphate
  modified_base 13: mod_base = OTHER; note = 2'-O-methyladenosine-3'-phosphate
  modified_base 14: mod_base = OTHER; note = 2'-O-methylcytidine-3'-phosphate
  modified_base 15: mod_base = OTHER; note = 2'-O-methyluridine-3'-phosphate
  modified_base 16: mod_base = OTHER; note = 2'-O-methylguanosine-3'-phosphate
  modified_base 17: mod_base = OTHER; note = 2'-O-methyladenosine-3'-phosphate
  modified_base 18: mod_base = OTHER; note = 2'-O-methyluridine-3'-phosphate
  modified_base 19: mod_base = OTHER; note = 2'-O-methylguanosine-3'-phosphate
  modified_base 20: mod_base = OTHER; note = 2'-O-methyluridine-3'-phosphate
  modified_base 21: mod_base = OTHER; note = 2'-O-methyluridine-3'-phosphate ((2S,4R)-1-[29-[[2-(acetylamino)-2-deoxy-beta-D-galactopyra nosyl]oxy]-14,14-bis[[3-[[3-[[5-[[2-(acetylamino)-2-deoxy-b eta-D-galactopyranosyl]oxy]-1-oxopentyl]amino]propyl]amino] -3-oxopropoxy]methyl]-1,12,19,25-tetraoxo-16-oxa-13,20,24-t riazanonacos-1-yl]-4-hydroxy-2-pyrrolidinyl)methyl ester
gtgcggaaaggcactgatgtt

SEQ ID NO: 2375 - RNA, 23 nt, synthetic construct
  source 1..23: mol_type = other RNA
  modified_base 1: mod_base = OTHER; note = 2'-O-methyladenosine-3'-phosphorothioate
  modified_base 2: mod_base = OTHER; note = 2'-deoxy-2'-fluoroadenosine-3'-phosphorothioate
  modified_base 3: mod_base = OTHER; note = 2'-O-methylcytidine-3'-phosphate
  modified_base 4: mod_base = OTHER; note = 2'-O-methyladenosine-3'-phosphate
  modified_base 5: mod_base = OTHER; note = 2'-O-methyluridine-3'-phosphate
  modified_base 6: mod_base = OTHER; note = 2'-deoxy-2'-fluorocytidine-3'-phosphate
  modified_base 7: mod_base = OTHER; note = 2'-O-methyladenosine-3'-phosphate
  modified_base 8: mod_base = OTHER; note = 2'-deoxy-2'-fluoroguanosine-3'-phosphate
  modified_base 9: mod_base = OTHER; note = 2'-deoxy-2'-fluorouridine-3'-phosphate
  modified_base 10: mod_base = OTHER; note = 2'-O-methylguanosine-3'-phosphate
  modified_base 11: mod_base = OTHER; note = 2'-O-methylcytidine-3'-phosphate
  modified_base 12: mod_base = OTHER; note = 2'-O-methylcytidine-3'-phosphate
  modified_base 13: mod_base = OTHER; note = 2'-O-methyluridine-3'-phosphate
  modified_base 14: mod_base = OTHER; note = 2'-deoxy-2'-fluorouridine-3'-phosphate
  modified_base 15: mod_base = OTHER; note = 2'-O-methyluridine-3'-phosphate
  modified_base 16: mod_base = OTHER; note = 2'-deoxy-2'-fluorocytidine-3'-phosphate
  modified_base 17: mod_base = OTHER; note = 2'-O-methylcytidine-3'-phosphate
  modified_base 18: mod_base = OTHER; note = 2'-O-methylguanosine-3'-phosphate
  modified_base 19: mod_base = OTHER; note = 2'-O-methylcytidine-3'-phosphate
  modified_base 20: mod_base = OTHER; note = 2'-O-methyladenosine-3'-phosphate
  modified_base 21: mod_base = OTHER; note = 2'-O-methylcytidine-3'-phosphorothioate
  modified_base 22: mod_base = OTHER; note = 2'-O-methyladenosine-3'-phosphorothioate
  modified_base 23: mod_base = OTHER; note = 2'-O-methylcytidine
aacatcagtgcctttccgcacac

SEQ ID NO: 2376 - RNA, 21 nt, synthetic construct
  source 1..21: mol_type = other RNA
  modified_base 1: mod_base = OTHER; note = 2'-O-methyluridine-3'-phosphorothioate
  modified_base 2: mod_base = OTHER; note = 2'-O-methylguanosine-3'-phosphorothioate
  modified_base 3: mod_base = OTHER; note = 2'-O-methyluridine-3'-phosphate
  modified_base 4: mod_base = OTHER; note = 2'-O-methylguanosine-3'-phosphate
  modified_base 5: mod_base = OTHER; note = 2'-O-methylcytidine-3'-phosphate
  modified_base 6: mod_base = OTHER; note = 2'-O-methylguanosine-3'-phosphate
  modified_base 7: mod_base = OTHER; note = 2'-deoxy-2'-fluoroguanosine-3'-phosphate
  modified_base 8: mod_base = OTHER; note = 2'-O-methyladenosine-3'-phosphate
  modified_base 9: mod_base = OTHER; note = 2'-deoxy-2'-fluoroadenosine-3'-phosphate
  modified_base 10: mod_base = OTHER; note = 2'-deoxy-2'-fluoroadenosine-3'-phosphate
  modified_base 11: mod_base = OTHER; note = 2'-deoxy-2'-fluoroguanosine-3'-phosphate
  modified_base 12: mod_base = OTHER; note = 2'-O-methylguanosine-3'-phosphate
  modified_base 13: mod_base = OTHER; note = 2'-O-methylcytidine-3'-phosphate
  modified_base 14: mod_base = OTHER; note = 2'-O-methyladenosine-3'-phosphate
  modified_base 15: mod_base = OTHER; note = 2'-O-methylcytidine-3'-phosphate
  modified_base 16: mod_base = OTHER; note = 2'-O-methyluridine-3'-phosphate
  modified_base 17: mod_base = OTHER; note = 2'-O-methylguanosine-3'-phosphate
  modified_base 18: mod_base = OTHER; note = 2'-O-methyladenosine-3'-phosphate
  modified_base 19: mod_base = OTHER; note = 2'-O-methyluridine-3'-phosphate
  modified_base 20: mod_base = OTHER; note = 2'-O-methylguanosine-3'-phosphate
  modified_base 21: mod_base = OTHER; note = 2'-O-methyluridine-3'-phosphate ((2S,4R)-1-[29-[[2-(acetylamino)-2-deoxy-beta-D-galactopyra nosyl]oxy]-14,14-bis[[3-[[3-[[5-[[2-(acetylamino)-2-deoxy-b eta-D-galactopyranosyl]oxy]-1-oxopentyl]amino]propyl]amino] -3-oxopropoxy]methyl]-1,12,19,25-tetraoxo-16-oxa-13,20,24-t riazanonacos-1-yl]-4-hydroxy-2-pyrrolidinyl)methyl ester
tgtgcggaaaggcactgatgt

SEQ ID NO: 2377 - RNA, 23 nt, synthetic construct
  source 1..23: mol_type = other RNA
  modified_base 1: mod_base = OTHER; note = 2'-O-methyladenosine-3'-phosphorothioate
  modified_base 2: mod_base = OTHER; note = 2'-deoxy-2'-fluorocytidine-3'-phosphorothioate
  modified_base 3: mod_base = OTHER; note = 2'-O-methyladenosine-3'-phosphate
  modified_base 4: mod_base = OTHER; note = 2'-O-methyluridine-3'-phosphate
  modified_base 5: mod_base = OTHER; note = 2'-O-methylcytidine-3'-phosphate
  modified_base 6: mod_base = OTHER; note = 2'-deoxy-2'-fluoroadenosine-3'-phosphate
  modified_base 7: mod_base = OTHER; note = 2'-O-methylguanosine-3'-phosphate
  modified_base 8: mod_base = OTHER; note = 2'-deoxy-2'-fluorouridine-3'-phosphate
  modified_base 9: mod_base = OTHER; note = 2'-deoxy-2'-fluoroguanosine-3'-phosphate
  modified_base 10: mod_base = OTHER; note = 2'-O-methylcytidine-3'-phosphate
  modified_base 11: mod_base = OTHER; note = 2'-O-methylcytidine-3'-phosphate
  modified_base 12: mod_base = OTHER; note = 2'-O-methyluridine-3'-phosphate
  modified_base 13: mod_base = OTHER; note = 2'-O-methyluridine-3'-phosphate
  modified_base 14: mod_base = OTHER; note = 2'-deoxy-2'-fluorouridine-3'-phosphate
  modified_base 15: mod_base = OTHER; note = 2'-O-methylcytidine-3'-phosphate
  modified_base 16: mod_base = OTHER; note = 2'-deoxy-2'-fluorocytidine-3'-phosphate
  modified_base 17: mod_base = OTHER; note = 2'-O-methylguanosine-3'-phosphate
  modified_base 18: mod_base = OTHER; note = 2'-O-methylcytidine-3'-phosphate
  modified_base 19: mod_base = OTHER; note = 2'-O-methyladenosine-3'-phosphate
  modified_base 20: mod_base = OTHER; note = 2'-O-methylcytidine-3'-phosphate
  modified_base 21: mod_base = OTHER; note = 2'-O-methyladenosine-3'-phosphorothioate
  modified_base 22: mod_base = OTHER; note = 2'-O-methylcytidine-3'-phosphorothioate
  modified_base 23: mod_base = OTHER; note = 2'-O-methylcytidine
acatcagtgcctttccgcacacc

SEQ ID NO: 2378 - RNA, 21 nt, synthetic construct
  source 1..21: mol_type = other RNA
  modified_base 1: mod_base = OTHER; note = 2'-O-methyladenosine-3'-phosphorothioate
  modified_base 2: mod_base = OTHER; note = 2'-O-methyladenosine-3'-phosphorothioate
  modified_base 3: mod_base = OTHER; note = 2'-O-methyluridine-3'-phosphate
  modified_base 4: mod_base = OTHER; note = 2'-O-methyluridine-3'-phosphate
  modified_base 5: mod_base = OTHER; note = 2'-O-methylguanosine-3'-phosphate
  modified_base 6: mod_base = OTHER; note = 2'-O-methyluridine-3'-phosphate
  modified_base 7: mod_base = OTHER; note = 2'-deoxy-2'-fluoroadenosine-3'-phosphate
  modified_base 8: mod_base = OTHER; note = 2'-O-methyladenosine-3'-phosphate
  modified_base 9: mod_base = OTHER; note = 2'-deoxy-2'-fluoroguanosine-3'-phosphate
  modified_base 10: mod_base = OTHER; note = 2'-deoxy-2'-fluorocytidine-3'-phosphate
  modified_base 11: mod_base = OTHER; note = 2'-deoxy-2'-fluorouridine-3'-phosphate
  modified_base 12: mod_base = OTHER; note = 2'-O-methylcytidine-3'-phosphate
  modified_base 13: mod_base = OTHER; note = 2'-O-methyladenosine-3'-phosphate
  modified_base 14: mod_base = OTHER; note = 2'-O-methylguanosine-3'-phosphate
  modified_base 15: mod_base = OTHER; note = 2'-O-methylguanosine-3'-phosphate
  modified_base 16: mod_base = OTHER; note = 2'-O-methyluridine-3'-phosphate
  modified_base 17: mod_base = OTHER; note = 2'-O-methyluridine-3'-phosphate
  modified_base 18: mod_base = OTHER; note = 2'-O-methylcytidine-3'-phosphate
  modified_base 19: mod_base = OTHER; note = 2'-O-methyladenosine-3'-phosphate
  modified_base 20: mod_base = OTHER; note = 2'-O-methyladenosine-3'-phosphate
  modified_base 21: mod_base = OTHER; note = 2'-O-methyladenosine-3'-phosphate ((2S,4R)-1-[29-[[2-(acetylamino)-2-deoxy-beta-D-galactopyra nosyl]oxy]-14,14-bis[[3-[[3-[[5-[[2-(acetylamino)-2-deoxy-b eta-D-galactopyranosyl]oxy]-1-oxopentyl]amino]propyl]amino] -3-oxopropoxy]methyl]-1,12,19,25-tetraoxo-16-oxa-13,20,24-t riazanonacos-1-yl]-4-hydroxy-2-pyrrolidinyl)methyl ester
aattgtaagctcaggttcaaa

SEQ ID NO: 2379 - RNA, 23 nt, synthetic construct
  source 1..23: mol_type = other RNA
  modified_base 1: mod_base = OTHER; note = 2'-O-methyluridine-3'-phosphorothioate
  modified_base 2: mod_base = OTHER; note = 2'-deoxy-2'-fluorouridine-3'-phosphorothioate
  modified_base 3: mod_base = OTHER; note = 2'-O-methyluridine-3'-phosphate
  modified_base 4: mod_base = OTHER; note = 2'-O-methylguanosine-3'-phosphate
  modified_base 5: mod_base = OTHER; note = 2'-O-methyladenosine-3'-phosphate
  modified_base 6: mod_base = OTHER; note = 2'-deoxy-2'-fluoroadenosine-3'-phosphate
  modified_base 7: mod_base = OTHER; note = 2'-O-methylcytidine-3'-phosphate
  modified_base 8: mod_base = OTHER; note = 2'-deoxy-2'-fluorocytidine-3'-phosphate
  modified_base 9: mod_base = OTHER; note = 2'-deoxy-2'-fluorouridine-3'-phosphate
  modified_base 10: mod_base = OTHER; note = 2'-O-methylguanosine-3'-phosphate
  modified_base 11: mod_base = OTHER; note = 2'-O-methyladenosine-3'-phosphate
  modified_base 12: mod_base = OTHER; note = 2'-O-methylguanosine-3'-phosphate
  modified_base 13: mod_base = OTHER; note = 2'-O-methylcytidine-3'-phosphate
  modified_base 14: mod_base = OTHER; note = 2'-deoxy-2'-fluorouridine-3'-phosphate
  modified_base 15: mod_base = OTHER; note = 2'-O-methyluridine-3'-phosphate
  modified_base 16: mod_base = OTHER; note = 2'-deoxy-2'-fluoroadenosine-3'-phosphate
  modified_base 17: mod_base = OTHER; note = 2'-O-methylcytidine-3'-phosphate
  modified_base 18: mod_base = OTHER; note = 2'-O-methyladenosine-3'-phosphate
  modified_base 19: mod_base = OTHER; note = 2'-O-methyladenosine-3'-phosphate
  modified_base 20: mod_base = OTHER; note = 2'-O-methyluridine-3'-phosphate
  modified_base 21: mod_base = OTHER; note = 2'-O-methyluridine-3'-phosphorothioate
  modified_base 22: mod_base = OTHER; note = 2'-O-methyluridine-3'-phosphorothioate
  modified_base 23: mod_base = OTHER; note = 2'-O-methyladenosine
tttgaacctgagcttacaattta

SEQ ID NO: 2380 - RNA, 21 nt, synthetic construct
  source 1..21: mol_type = other RNA
  modified_base 1: mod_base = OTHER; note = 2'-O-methyladenosine-3'-phosphorothioate
  modified_base 2: mod_base = OTHER; note = 2'-O-methyluridine-3'-phosphorothioate
  modified_base 3: mod_base = OTHER; note = 2'-O-methyluridine-3'-phosphate
  modified_base 4: mod_base = OTHER; note = 2'-O-methylguanosine-3'-phosphate
  modified_base 5: mod_base = OTHER; note = 2'-O-methyluridine-3'-phosphate
  modified_base 6: mod_base = OTHER; note = 2'-O-methyladenosine-3'-phosphate
  modified_base 7: mod_base = OTHER; note = 2'-deoxy-2'-fluoroadenosine-3'-phosphate
  modified_base 8: mod_base = OTHER; note = 2'-O-methylguanosine-3'-phosphate
  modified_base 9: mod_base = OTHER; note = 2'-deoxy-2'-fluorocytidine-3'-phosphate
  modified_base 10: mod_base = OTHER; note = 2'-deoxy-2'-fluorouridine-3'-phosphate
  modified_base 11: mod_base = OTHER; note = 2'-deoxy-2'-fluorocytidine-3'-phosphate
  modified_base 12: mod_base = OTHER; note = 2'-O-methyladenosine-3'-phosphate
  modified_base 13: mod_base = OTHER; note = 2'-O-methylguanosine-3'-phosphate
  modified_base 14: mod_base = OTHER; note = 2'-O-methylguanosine-3'-phosphate
  modified_base 15: mod_base = OTHER; note = 2'-O-methyluridine-3'-phosphate
  modified_base 16: mod_base = OTHER; note = 2'-O-methyluridine-3'-phosphate
  modified_base 17: mod_base = OTHER; note = 2'-O-methylcytidine-3'-phosphate
  modified_base 18: mod_base = OTHER; note = 2'-O-methyladenosine-3'-phosphate
  modified_base 19: mod_base = OTHER; note = 2'-O-methyladenosine-3'-phosphate
  modified_base 20: mod_base = OTHER; note = 2'-O-methyladenosine-3'-phosphate
  modified_base 21: mod_base = OTHER; note = 2'-O-methylguanosine-3'-phosphate ((2S,4R)-1-[29-[[2-(acetylamino)-2-deoxy-beta-D-galactopyra nosyl]oxy]-14,14-bis[[3-[[3-[[5-[[2-(acetylamino)-2-deoxy-b eta-D-galactopyranosyl]oxy]-1-oxopentyl]amino]propyl]amino] -3-oxopropoxy]methyl]-1,12,19,25-tetraoxo-16-oxa-13,20,24-t riazanonacos-1-yl]-4-hydroxy-2-pyrrolidinyl)methyl ester
attgtaagctcaggttcaaag

SEQ ID NO: 2381 - RNA, 23 nt, synthetic construct
  source 1..23: mol_type = other RNA
  modified_base 1: mod_base = OTHER; note = 2'-O-methylcytidine-3'-phosphorothioate
  modified_base 2: mod_base = OTHER; note = 2'-deoxy-2'-fluorouridine-3'-phosphorothioate
  modified_base 3: mod_base = OTHER; note = 2'-O-methyluridine-3'-phosphate
  modified_base 4: mod_base = OTHER; note = 2'-O-methyluridine-3'-phosphate
  modified_base 5: mod_base = OTHER; note = 2'-O-methylguanosine-3'-phosphate
  modified_base 6: mod_base = OTHER; note = 2'-deoxy-2'-fluoroadenosine-3'-phosphate
  modified_base 7: mod_base = OTHER; note = 2'-O-methyladenosine-3'-phosphate
  modified_base 8: mod_base = OTHER; note = 2'-deoxy-2'-fluorocytidine-3'-phosphate
  modified_base 9: mod_base = OTHER; note = 2'-deoxy-2'-fluorocytidine-3'-phosphate
  modified_base 10: mod_base = OTHER; note = 2'-O-methyluridine-3'-phosphate
  modified_base 11: mod_base = OTHER; note = 2'-O-methylguanosine-3'-phosphate
  modified_base 12: mod_base = OTHER; note = 2'-O-methyladenosine-3'-phosphate
  modified_base 13: mod_base = OTHER; note = 2'-O-methylguanosine-3'-phosphate
  modified_base 14: mod_base = OTHER; note = 2'-deoxy-2'-fluorocytidine-3'-phosphate
  modified_base 15: mod_base = OTHER; note = 2'-O-methyluridine-3'-phosphate
  modified_base 16: mod_base = OTHER; note = 2'-deoxy-2'-fluorouridine-3'-phosphate
  modified_base 17: mod_base = OTHER; note = 2'-O-methyladenosine-3'-phosphate
  modified_base 18: mod_base = OTHER; note = 2'-O-methylcytidine-3'-phosphate
  modified_base 19: mod_base = OTHER; note = 2'-O-methyladenosine-3'-phosphate
  modified_base 20: mod_base = OTHER; note = 2'-O-methyladenosine-3'-phosphate
  modified_base 21: mod_base = OTHER; note = 2'-O-methyluridine-3'-phosphorothioate
  modified_base 22: mod_base = OTHER; note = 2'-O-methyluridine-3'-phosphorothioate
  modified_base 23: mod_base = OTHER; note = 2'-O-methyluridine
ctttgaacctgagcttacaattt

SEQ ID NO: 2382 - RNA, 21 nt, synthetic construct
  source 1..21: mol_type = other RNA
  modified_base 1: mod_base = OTHER; note = 2'-O-methylcytidine-3'-phosphorothioate
  modified_base 2: mod_base = OTHER; note = 2'-O-methyluridine-3'-phosphorothioate
  modified_base 3: mod_base = OTHER; note = 2'-O-methyluridine-3'-phosphate
  modified_base 4: mod_base = OTHER; note = 2'-O-methyladenosine-3'-phosphate
  modified_base 5: mod_base = OTHER; note = 2'-O-methyladenosine-3'-phosphate
  modified_base 6: mod_base = OTHER; note = 2'-O-methyladenosine-3'-phosphate
  modified_base 7: mod_base = OTHER; note = 2'-deoxy-2'-fluorouridine-3'-phosphate
  modified_base 8: mod_base = OTHER; note = 2'-O-methyluridine-3'-phosphate
  modified_base 9: mod_base = OTHER; note = 2'-deoxy-2'-fluoroguanosine-3'-phosphate
  modified_base 10: mod_base = OTHER; note = 2'-deoxy-2'-fluorouridine-3'-phosphate
  modified_base 11: mod_base = OTHER; note = 2'-deoxy-2'-fluoroadenosine-3'-phosphate
  modified_base 12: mod_base = OTHER; note = 2'-O-methyladenosine-3'-phosphate
  modified_base 13: mod_base = OTHER; note = 2'-O-methylguanosine-3'-phosphate
  modified_base 14: mod_base = OTHER; note = 2'-O-methylcytidine-3'-phosphate
  modified_base 15: mod_base = OTHER; note = 2'-O-methyluridine-3'-phosphate
  modified_base 16: mod_base = OTHER; note = 2'-O-methylcytidine-3'-phosphate
  modified_base 17: mod_base = OTHER; note = 2'-O-methyladenosine-3'-phosphate
  modified_base 18: mod_base = OTHER; note = 2'-O-methylguanosine-3'-phosphate
  modified_base 19: mod_base = OTHER; note = 2'-O-methylguanosine-3'-phosphate
  modified_base 20: mod_base = OTHER; note = 2'-O-methyluridine-3'-phosphate
  modified_base 21: mod_base = OTHER; note = 2'-O-methyluridine-3'-phosphate ((2S,4R)-1-[29-[[2-(acetylamino)-2-deoxy-beta-D-galactopyra nosyl]oxy]-14,14-bis[[3-[[3-[[5-[[2-(acetylamino)-2-deoxy-b eta-D-galactopyranosyl]oxy]-1-oxopentyl]amino]propyl]amino] -3-oxopropoxy]methyl]-1,12,19,25-tetraoxo-16-oxa-13,20,24-t riazanonacos-1-yl]-4-hydroxy-2-pyrrolidinyl)methyl ester
cttaaattgtaagctcaggtt

SEQ ID NO: 2383 - RNA, 23 nt, synthetic construct
  source 1..23: mol_type = other RNA
  modified_base 1: mod_base = OTHER; note = 2'-O-methyladenosine-3'-phosphorothioate
  modified_base 2: mod_base = OTHER; note = 2'-deoxy-2'-fluoroadenosine-3'-phosphorothioate
  modified_base 3: mod_base = OTHER; note = 2'-O-methylcytidine-3'-phosphate
  modified_base 4: mod_base = OTHER; note = 2'-O-methylcytidine-3'-phosphate
  modified_base 5: mod_base = OTHER; note = 2'-O-methyluridine-3'-phosphate
  modified_base 6: mod_base = OTHER; note = 2'-deoxy-2'-fluoroguanosine-3'-phosphate
  modified_base 7: mod_base = OTHER; note = 2'-O-methyladenosine-3'-phosphate
  modified_base 8: mod_base = OTHER; note = 2'-deoxy-2'-fluoroguanosine-3'-phosphate
  modified_base 9: mod_base = OTHER; note = 2'-deoxy-2'-fluorocytidine-3'-phosphate
  modified_base 10: mod_base = OTHER; note = 2'-O-methyluridine-3'-phosphate
  modified_base 11: mod_base = OTHER; note = 2'-O-methyluridine-3'-phosphate
  modified_base 12: mod_base = OTHER; note = 2'-O-methyladenosine-3'-phosphate
  modified_base 13: mod_base = OTHER; note = 2'-O-methylcytidine-3'-phosphate
  modified_base 14: mod_base = OTHER; note = 2'-deoxy-2'-fluoroadenosine-3'-phosphate
  modified_base 15: mod_base = OTHER; note = 2'-O-methyladenosine-3'-phosphate
  modified_base 16: mod_base = OTHER; note = 2'-deoxy-2'-fluorouridine-3'-phosphate
  modified_base 17: mod_base = OTHER; note = 2'-O-methyluridine-3'-phosphate
  modified_base 18: mod_base = OTHER; note = 2'-O-methyluridine-3'-phosphate
  modified_base 19: mod_base = OTHER; note = 2'-O-methyladenosine-3'-phosphate
  modified_base 20: mod_base = OTHER; note = 2'-O-methyladenosine-3'-phosphate
  modified_base 21: mod_base = OTHER; note = 2'-O-methylguanosine-3'-phosphorothioate
  modified_base 22: mod_base = OTHER; note = 2'-O-methyladenosine-3'-phosphorothioate
  modified_base 23: mod_base = OTHER; note = 2'-O-methyladenosine
aacctgagcttacaatttaagaa

SEQ ID NO: 2384 - RNA, 21 nt, synthetic construct
  source 1..21: mol_type = other RNA
  modified_base 1: mod_base = OTHER; note = 2'-O-methyluridine-3'-phosphorothioate
  modified_base 2: mod_base = OTHER; note = 2'-O-methylcytidine-3'-phosphorothioate
  modified_base 3: mod_base = OTHER; note = 2'-O-methyluridine-3'-phosphate
  modified_base 4: mod_base = OTHER; note = 2'-O-methyluridine-3'-phosphate
  modified_base 5: mod_base = OTHER; note = 2'-O-methyladenosine-3'-phosphate
  modified_base 6: mod_base = OTHER; note = 2'-O-methyladenosine-3'-phosphate
  modified_base 7: mod_base = OTHER; note = 2'-deoxy-2'-fluoroadenosine-3'-phosphate
  modified_base 8: mod_base = OTHER; note = 2'-O-methyluridine-3'-phosphate
  modified_base 9: mod_base = OTHER; note = 2'-deoxy-2'-fluorouridine-3'-phosphate
  modified_base 10: mod_base = OTHER; note = 2'-deoxy-2'-fluoroguanosine-3'-phosphate
  modified_base 11: mod_base = OTHER; note = 2'-deoxy-2'-fluorouridine-3'-phosphate
  modified_base 12: mod_base = OTHER; note = 2'-O-methyladenosine-3'-phosphate
  modified_base 13: mod_base = OTHER; note = 2'-O-methyladenosine-3'-phosphate
  modified_base 14: mod_base = OTHER; note = 2'-O-methylguanosine-3'-phosphate
  modified_base 15: mod_base = OTHER; note = 2'-O-methylcytidine-3'-phosphate
  modified_base 16: mod_base = OTHER; note = 2'-O-methyluridine-3'-phosphate
  modified_base 17: mod_base = OTHER; note = 2'-O-methylcytidine-3'-phosphate
  modified_base 18: mod_base = OTHER; note = 2'-O-methyladenosine-3'-phosphate
  modified_base 19: mod_base = OTHER; note = 2'-O-methylguanosine-3'-phosphate
  modified_base 20: mod_base = OTHER; note = 2'-O-methylguanosine-3'-phosphate
  modified_base 21: mod_base = OTHER; note = 2'-O-methyluridine-3'-phosphate ((2S,4R)-1-[29-[[2-(acetylamino)-2-deoxy-beta-D-galactopyra nosyl]oxy]-14,14-bis[[3-[[3-[[5-[[2-(acetylamino)-2-deoxy-b eta-D-galactopyranosyl]oxy]-1-oxopentyl]amino]propyl]amino] -3-oxopropoxy]methyl]-1,12,19,25-tetraoxo-16-oxa-13,20,24-t riazanonacos-1-yl]-4-hydroxy-2-pyrrolidinyl)methyl ester
tcttaaattgtaagctcaggt

SEQ ID NO: 2385 - RNA, 23 nt, synthetic construct
  source 1..23: mol_type = other RNA
  modified_base 1: mod_base = OTHER; note = 2'-O-methyladenosine-3'-phosphorothioate
  modified_base 2: mod_base = OTHER; note = 2'-deoxy-2'-fluorocytidine-3'-phosphorothioate
  modified_base 3: mod_base = OTHER; note = 2'-O-methylcytidine-3'-phosphate
  modified_base 4: mod_base = OTHER; note = 2'-O-methyluridine-3'-phosphate
  modified_base 5: mod_base = OTHER; note = 2'-O-methylguanosine-3'-phosphate
  modified_base 6: mod_base = OTHER; note = 2'-deoxy-2'-fluoroadenosine-3'-phosphate
  modified_base 7: mod_base = OTHER; note = 2'-O-methylguanosine-3'-phosphate
  modified_base 8: mod_base = OTHER; note = 2'-deoxy-2'-fluorocytidine-3'-phosphate
  modified_base 9: mod_base = OTHER; note = 2'-deoxy-2'-fluorouridine-3'-phosphate
  modified_base 10: mod_base = OTHER; note = 2'-O-methyluridine-3'-phosphate
  modified_base 11: mod_base = OTHER; note = 2'-O-methyladenosine-3'-phosphate
  modified_base 12: mod_base = OTHER; note = 2'-O-methylcytidine-3'-phosphate
  modified_base 13: mod_base = OTHER; note = 2'-O-methyladenosine-3'-phosphate
  modified_base 14: mod_base = OTHER; note = 2'-deoxy-2'-fluoroadenosine-3'-phosphate
  modified_base 15: mod_base = OTHER; note = 2'-O-methyluridine-3'-phosphate
  modified_base 16: mod_base = OTHER; note = 2'-deoxy-2'-fluorouridine-3'-phosphate
  modified_base 17: mod_base = OTHER; note = 2'-O-methyluridine-3'-phosphate
  modified_base 18: mod_base = OTHER; note = 2'-O-methyladenosine-3'-phosphate
  modified_base 19: mod_base = OTHER; note = 2'-O-methyladenosine-3'-phosphate
  modified_base 20: mod_base = OTHER; note = 2'-O-methylguanosine-3'-phosphate
  modified_base 21: mod_base = OTHER; note = 2'-O-methyladenosine-3'-phosphorothioate
  modified_base 22: mod_base = OTHER; note = 2'-O-methyladenosine-3'-phosphorothioate
  modified_base 23: mod_base = OTHER; note = 2'-O-methylcytidine
acctgagcttacaatttaagaac

SEQ ID NO: 2386 - RNA, 21 nt, synthetic construct
  source 1..21: mol_type = other RNA
  modified_base 1: mod_base = OTHER; note = 2'-O-methylguanosine-3'-phosphorothioate
  modified_base 2: mod_base = OTHER; note = 2'-O-methylcytidine-3'-phosphorothioate
  modified_base 3: mod_base = OTHER; note = 2'-O-methyladenosine-3'-phosphate
  modified_base 4: mod_base = OTHER; note = 2'-O-methyladenosine-3'-phosphate
  modified_base 5: mod_base = OTHER; note = 2'-O-methyladenosine-3'-phosphate
  modified_base 6: mod_base = OTHER; note = 2'-O-methylcytidine-3'-phosphate
  modified_base 7: mod_base = OTHER; note = 2'-deoxy-2'-fluoroadenosine-3'-phosphate
  modified_base 8: mod_base = OTHER; note = 2'-O-methylcytidine-3'-phosphate
  modified_base 9: mod_base = OTHER; note = 2'-deoxy-2'-fluorouridine-3'-phosphate
  modified_base 10: mod_base = OTHER; note = 2'-deoxy-2'-fluoroadenosine-3'-phosphate
  modified_base 11: mod_base = OTHER; note = 2'-deoxy-2'-fluoroadenosine-3'-phosphate
  modified_base 12: mod_base = OTHER; note = 2'-O-methylguanosine-3'-phosphate
  modified_base 13: mod_base = OTHER; note = 2'-O-methylguanosine-3'-phosphate
  modified_base 14: mod_base = OTHER; note = 2'-O-methyluridine-3'-phosphate
  modified_base 15: mod_base = OTHER; note = 2'-O-methylguanosine-3'-phosphate
  modified_base 16: mod_base = OTHER; note = 2'-O-methyladenosine-3'-phosphate
  modified_base 17: mod_base = OTHER; note = 2'-O-methyladenosine-3'-phosphate
  modified_base 18: mod_base = OTHER; note = 2'-O-methyladenosine-3'-phosphate
  modified_base 19: mod_base = OTHER; note = 2'-O-methyladenosine-3'-phosphate
  modified_base 20: mod_base = OTHER; note = 2'-O-methylguanosine-3'-phosphate
  modified_base 21: mod_base = OTHER; note = 2'-O-methyladenosine-3'-phosphate ((2S,4R)-1-[29-[[2-(acetylamino)-2-deoxy-beta-D-galactopyra nosyl]oxy]-14,14-bis[[3-[[3-[[5-[[2-(acetylamino)-2-deoxy-b eta-D-galactopyranosyl]oxy]-1-oxopentyl]amino]propyl]amino] -3-oxopropoxy]methyl]-1,12,19,25-tetraoxo-16-oxa-13,20,24-t riazanonacos-1-yl]-4-hydroxy-2-pyrrolidinyl)methyl ester
gcaaacactaaggtgaaaaga

SEQ ID NO: 2387 - RNA, 23 nt, synthetic construct
  source 1..23: mol_type = other RNA
  modified_base 1: mod_base = OTHER; note = 2'-O-methyluridine-3'-phosphorothioate
  modified_base 2: mod_base = OTHER; note = 2'-deoxy-2'-fluorocytidine-3'-phosphorothioate
  modified_base 3: mod_base = OTHER; note = 2'-O-methyluridine-3'-phosphate
  modified_base 4: mod_base = OTHER; note = 2'-O-methyluridine-3'-phosphate
  modified_base 5: mod_base = OTHER; note = 2'-O-methyluridine-3'-phosphate
  modified_base 6: mod_base = OTHER; note = 2'-deoxy-2'-fluorouridine-3'-phosphate
  modified_base 7: mod_base = OTHER; note = 2'-O-methylcytidine-3'-phosphate
  modified_base 8: mod_base = OTHER; note = 2'-deoxy-2'-fluoroadenosine-3'-phosphate
  modified_base 9: mod_base = OTHER; note = 2'-deoxy-2'-fluorocytidine-3'-phosphate
  modified_base 10: mod_base = OTHER; note = 2'-O-methylcytidine-3'-phosphate
  modified_base 11: mod_base = OTHER; note = 2'-O-methyluridine-3'-phosphate
  modified_base 12: mod_base = OTHER; note = 2'-O-methyluridine-3'-phosphate
  modified_base 13: mod_base = OTHER; note = 2'-O-methyladenosine-3'-phosphate
  modified_base 14: mod_base = OTHER; note = 2'-deoxy-2'-fluoroguanosine-3'-phosphate
  modified_base 15: mod_base = OTHER; note = 2'-O-methyluridine-3'-phosphate
  modified_base 16: mod_base = OTHER; note = 2'-deoxy-2'-fluoroguanosine-3'-phosphate
  modified_base 17: mod_base = OTHER; note = 2'-O-methyluridine-3'-phosphate
  modified_base 18: mod_base = OTHER; note = 2'-O-methyluridine-3'-phosphate
  modified_base 19: mod_base = OTHER; note = 2'-O-methyluridine-3'-phosphate
  modified_base 20: mod_base = OTHER; note = 2'-O-methylguanosine-3'-phosphate
  modified_base 21: mod_base = OTHER; note = 2'-O-methylcytidine-3'-phosphorothioate
  modified_base 22: mod_base = OTHER; note = 2'-O-methyluridine-3'-phosphorothioate
  modified_base 23: mod_base = OTHER; note = 2'-O-methyladenosine
tcttttcaccttagtgtttgcta

SEQ ID NO: 2388 - RNA, 21 nt, synthetic construct
  source 1..21: mol_type = other RNA
  modified_base 1: mod_base = OTHER; note = 2'-O-methylcytidine-3'-phosphorothioate
  modified_base 2: mod_base = OTHER; note = 2'-O-methyladenosine-3'-phosphorothioate
  modified_base 3: mod_base = OTHER; note = 2'-O-methyladenosine-3'-phosphate
  modified_base 4: mod_base = OTHER; note = 2'-O-methyladenosine-3'-phosphate
  modified_base 5: mod_base = OTHER; note = 2'-O-methylcytidine-3'-phosphate
  modified_base 6: mod_base = OTHER; note = 2'-O-methyladenosine-3'-phosphate
  modified_base 7: mod_base = OTHER; note = 2'-deoxy-2'-fluorocytidine-3'-phosphate
  modified_base 8: mod_base = OTHER; note = 2'-O-methyluridine-3'-phosphate
  modified_base 9: mod_base = OTHER; note = 2'-deoxy-2'-fluoroadenosine-3'-phosphate
  modified_base 10: mod_base = OTHER; note = 2'-deoxy-2'-fluoroadenosine-3'-phosphate
  modified_base 11: mod_base = OTHER; note = 2'-deoxy-2'-fluoroguanosine-3'-phosphate
  modified_base 12: mod_base = OTHER; note = 2'-O-methylguanosine-3'-phosphate
  modified_base 13: mod_base = OTHER; note = 2'-O-methyluridine-3'-phosphate
  modified_base 14: mod_base = OTHER; note = 2'-O-methylguanosine-3'-phosphate
  modified_base 15: mod_base = OTHER; note = 2'-O-methyladenosine-3'-phosphate
  modified_base 16: mod_base = OTHER; note = 2'-O-methyladenosine-3'-phosphate
  modified_base 17: mod_base = OTHER; note = 2'-O-methyladenosine-3'-phosphate
  modified_base 18: mod_base = OTHER; note = 2'-O-methyladenosine-3'-phosphate
  modified_base 19: mod_base = OTHER; note = 2'-O-methylguanosine-3'-phosphate
  modified_base 20: mod_base = OTHER; note = 2'-O-methyladenosine-3'-phosphate
  modified_base 21: mod_base = OTHER; note = 2'-O-methyluridine-3'-phosphate ((2S,4R)-1-[29-[[2-(acetylamino)-2-deoxy-beta-D-galactopyra nosyl]oxy]-14,14-bis[[3-[[3-[[5-[[2-(acetylamino)-2-deoxy-b eta-D-galactopyranosyl]oxy]-1-oxopentyl]amino]propyl]amino] -3-oxopropoxy]methyl]-1,12,19,25-tetraoxo-16-oxa-13,20,24-t riazanonacos-1-yl]-4-hydroxy-2-pyrrolidinyl)methyl ester
caaacactaaggtgaaaagat

SEQ ID NO: 2389 - RNA, 23 nt, synthetic construct
  source 1..23: mol_type = other RNA
  modified_base 1: mod_base = OTHER; note = 2'-O-methyladenosine-3'-phosphorothioate
  modified_base 2: mod_base = OTHER; note = 2'-deoxy-2'-fluorouridine-3'-phosphorothioate
  modified_base 3: mod_base = OTHER; note = 2'-O-methylcytidine-3'-phosphate
  modified_base 4: mod_base = OTHER; note = 2'-O-methyluridine-3'-phosphate
  modified_base 5: mod_base = OTHER; note = 2'-O-methyluridine-3'-phosphate
  modified_base 6: mod_base = OTHER; note = 2'-deoxy-2'-fluorouridine-3'-phosphate
  modified_base 7: mod_base = OTHER; note = 2'-O-methyluridine-3'-phosphate
  modified_base 8: mod_base = OTHER; note = 2'-deoxy-2'-fluorocytidine-3'-phosphate
  modified_base 9: mod_base = OTHER; note = 2'-deoxy-2'-fluoroadenosine-3'-phosphate
  modified_base 10: mod_base = OTHER; note = 2'-O-methylcytidine-3'-phosphate
  modified_base 11: mod_base = OTHER; note = 2'-O-methylcytidine-3'-phosphate
  modified_base 12: mod_base = OTHER; note = 2'-O-methyluridine-3'-phosphate
  modified_base 13: mod_base = OTHER; note = 2'-O-methyluridine-3'-phosphate
  modified_base 14: mod_base = OTHER; note = 2'-deoxy-2'-fluoroadenosine-3'-phosphate
  modified_base 15: mod_base = OTHER; note = 2'-O-methylguanosine-3'-phosphate
  modified_base 16: mod_base = OTHER; note = 2'-deoxy-2'-fluorouridine-3'-phosphate
  modified_base 17: mod_base = OTHER; note = 2'-O-methylguanosine-3'-phosphate
  modified_base 18: mod_base = OTHER; note = 2'-O-methyluridine-3'-phosphate
  modified_base 19: mod_base = OTHER; note = 2'-O-methyluridine-3'-phosphate
  modified_base 20: mod_base = OTHER; note = 2'-O-methyluridine-3'-phosphate
  modified_base 21: mod_base = OTHER; note = 2'-O-methylguanosine-3'-phosphorothioate
  modified_base 22: mod_base = OTHER; note = 2'-O-methylcytidine-3'-phosphorothioate
  modified_base 23: mod_base = OTHER; note = 2'-O-methyluridine
atcttttcaccttagtgtttgct

SEQ ID NO: 2390 - RNA, 21 nt, synthetic construct
  source 1..21: mol_type = other RNA
  modified_base 1: mod_base = OTHER; note = 2'-O-methylguanosine-3'-phosphorothioate
  modified_base 2: mod_base = OTHER; note = 2'-O-methylguanosine-3'-phosphorothioate
  modified_base 3: mod_base = OTHER; note = 2'-O-methyluridine-3'-phosphate
  modified_base 4: mod_base = OTHER; note = 2'-O-methyladenosine-3'-phosphate
  modified_base 5: mod_base = OTHER; note = 2'-O-methylguanosine-3'-phosphate
  modified_base 6: mod_base = OTHER; note = 2'-O-methylcytidine-3'-phosphate
  modified_base 7: mod_base = OTHER; note = 2'-deoxy-2'-fluoroadenosine-3'-phosphate
  modified_base 8: mod_base = OTHER; note = 2'-O-methyladenosine-3'-phosphate
  modified_base 9: mod_base = OTHER; note = 2'-deoxy-2'-fluoroadenosine-3'-phosphate
  modified_base 10: mod_base = OTHER; note = 2'-deoxy-2'-fluorocytidine-3'-phosphate
  modified_base 11: mod_base = OTHER; note = 2'-deoxy-2'-fluoroadenosine-3'-phosphate
  modified_base 12: mod_base = OTHER; note = 2'-O-methylcytidine-3'-phosphate
  modified_base 13: mod_base = OTHER; note = 2'-O-methyluridine-3'-phosphate
  modified_base 14: mod_base = OTHER; note = 2'-O-methyladenosine-3'-phosphate
  modified_base 15: mod_base = OTHER; note = 2'-O-methyladenosine-3'-phosphate
  modified_base 16: mod_base = OTHER; note = 2'-O-methylguanosine-3'-phosphate
  modified_base 17: mod_base = OTHER; note = 2'-O-methylguanosine-3'-phosphate
  modified_base 18: mod_base = OTHER; note = 2'-O-methyluridine-3'-phosphate
  modified_base 19: mod_base = OTHER; note = 2'-O-methylguanosine-3'-phosphate
  modified_base 20: mod_base = OTHER; note = 2'-O-methyladenosine-3'-phosphate
  modified_base 21: mod_base = OTHER; note = 2'-O-methyladenosine-3'-phosphate ((2S,4R)-1-[29-[[2-(acetylamino)-2-deoxy-beta-D-galactopyra nosyl]oxy]-14,14-bis[[3-[[3-[[5-[[2-(acetylamino)-2-deoxy-b eta-D-galactopyranosyl]oxy]-1-oxopentyl]amino]propyl]amino] -3-oxopropoxy]methyl]-1,12,19,25-tetraoxo-16-oxa-13,20,24-t riazanonacos-1-yl]-4-hydroxy-2-pyrrolidinyl)methyl ester
ggtagcaaacactaaggtgaa

SEQ ID NO: 2391 - RNA, 23 nt, synthetic construct
  source 1..23: mol_type = other RNA
  modified_base 1: mod_base = OTHER; note = 2'-O-methyluridine-3'-phosphorothioate
  modified_base 2: mod_base = OTHER; note = 2'-deoxy-2'-fluorouridine-3'-phosphorothioate
  modified_base 3: mod_base = OTHER; note = 2'-O-methylcytidine-3'-phosphate
  modified_base 4: mod_base = OTHER; note = 2'-O-methyladenosine-3'-phosphate
  modified_base 5: mod_base = OTHER; note = 2'-O-methylcytidine-3'-phosphate
  modified_base 6: mod_base = OTHER; note = 2'-deoxy-2'-fluorocytidine-3'-phosphate
  modified_base 7: mod_base = OTHER; note = 2'-O-methyluridine-3'-phosphate
  modified_base 8: mod_base = OTHER; note = 2'-deoxy-2'-fluorouridine-3'-phosphate
  modified_base 9: mod_base = OTHER; note = 2'-deoxy-2'-fluoroadenosine-3'-phosphate
  modified_base 10: mod_base = OTHER; note = 2'-O-methylguanosine-3'-phosphate
  modified_base 11: mod_base = OTHER; note = 2'-O-methyluridine-3'-phosphate
  modified_base 12: mod_base = OTHER; note = 2'-O-methylguanosine-3'-phosphate
  modified_base 13: mod_base = OTHER; note = 2'-O-methyluridine-3'-phosphate
  modified_base 14: mod_base = OTHER; note = 2'-deoxy-2'-fluorouridine-3'-phosphate
  modified_base 15: mod_base = OTHER; note = 2'-O-methyluridine-3'-phosphate
  modified_base 16: mod_base = OTHER; note = 2'-deoxy-2'-fluoroguanosine-3'-phosphate
  modified_base 17: mod_base = OTHER; note = 2'-O-methylcytidine-3'-phosphate
  modified_base 18: mod_base = OTHER; note = 2'-O-methyluridine-3'-phosphate
  modified_base 19: mod_base = OTHER; note = 2'-O-methyladenosine-3'-phosphate
  modified_base 20: mod_base = OTHER; note = 2'-O-methylcytidine-3'-phosphate
  modified_base 21: mod_base = OTHER; note = 2'-O-methylcytidine-3'-phosphorothioate
  modified_base 22: mod_base = OTHER; note = 2'-O-methyluridine-3'-phosphorothioate
  modified_base 23: mod_base = OTHER; note = 2'-O-methylcytidine
ttcaccttagtgtttgctacctc

SEQ ID NO: 2392 - RNA, 21 nt, synthetic construct
  source 1..21: mol_type = other RNA
  modified_base 1: mod_base = OTHER; note = 2'-O-methyladenosine-3'-phosphorothioate
  modified_base 2: mod_base = OTHER; note = 2'-O-methylguanosine-3'-phosphorothioate
  modified_base 3: mod_base = OTHER; note = 2'-O-methylguanosine-3'-phosphate
  modified_base 4: mod_base = OTHER; note = 2'-O-methyluridine-3'-phosphate
  modified_base 5: mod_base = OTHER; note = 2'-O-methyladenosine-3'-phosphate
  modified_base 6: mod_base = OTHER; note = 2'-O-methylguanosine-3'-phosphate
  modified_base 7: mod_base = OTHER; note = 2'-deoxy-2'-fluorocytidine-3'-phosphate
  modified_base 8: mod_base = OTHER; note = 2'-O-methyladenosine-3'-phosphate
  modified_base 9: mod_base = OTHER; note = 2'-deoxy-2'-fluoroadenosine-3'-phosphate
  modified_base 10: mod_base = OTHER; note = 2'-deoxy-2'-fluoroadenosine-3'-phosphate
  modified_base 11: mod_base = OTHER; note = 2'-deoxy-2'-fluorocytidine-3'-phosphate
  modified_base 12: mod_base = OTHER; note = 2'-O-methyladenosine-3'-phosphate
  modified_base 13: mod_base = OTHER; note = 2'-O-methylcytidine-3'-phosphate
  modified_base 14: mod_base = OTHER; note = 2'-O-methyluridine-3'-phosphate
  modified_base 15: mod_base = OTHER; note = 2'-O-methyladenosine-3'-phosphate
  modified_base 16: mod_base = OTHER; note = 2'-O-methyladenosine-3'-phosphate
  modified_base 17: mod_base = OTHER; note = 2'-O-methylguanosine-3'-phosphate
  modified_base 18: mod_base = OTHER; note = 2'-O-methylguanosine-3'-phosphate
  modified_base 19: mod_base = OTHER; note = 2'-O-methyluridine-3'-phosphate
  modified_base 20: mod_base = OTHER; note = 2'-O-methylguanosine-3'-phosphate
  modified_base 21: mod_base = OTHER; note = 2'-O-methyladenosine-3'-phosphate ((2S,4R)-1-[29-[[2-(acetylamino)-2-deoxy-beta-D-galactopyra nosyl]oxy]-14,14-bis[[3-[[3-[[5-[[2-(acetylamino)-2-deoxy-b eta-D-galactopyranosyl]oxy]-1-oxopentyl]amino]propyl]amino] -3-oxopropoxy]methyl]-1,12,19,25-tetraoxo-16-oxa-13,20,24-t riazanonacos-1-yl]-4-hydroxy-2-pyrrolidinyl)methyl ester
aggtagcaaacactaaggtga

SEQ ID NO: 2393 - RNA, 23 nt, synthetic construct
  source 1..23: mol_type = other RNA
  modified_base 1: mod_base = OTHER; note = 2'-O-methyluridine-3'-phosphorothioate
  modified_base 2: mod_base = OTHER; note = 2'-deoxy-2'-fluorocytidine-3'-phosphorothioate
  modified_base 3: mod_base = OTHER; note = 2'-O-methyladenosine-3'-phosphate
  modified_base 4: mod_base = OTHER; note = 2'-O-methylcytidine-3'-phosphate
  modified_base 5: mod_base = OTHER; note = 2'-O-methylcytidine-3'-phosphate
  modified_base 6: mod_base = OTHER; note = 2'-deoxy-2'-fluorouridine-3'-phosphate
  modified_base 7: mod_base = OTHER; note = 2'-O-methyluridine-3'-phosphate
  modified_base 8: mod_base = OTHER; note = 2'-deoxy-2'-fluoroadenosine-3'-phosphate
  modified_base 9: mod_base = OTHER; note = 2'-deoxy-2'-fluoroguanosine-3'-phosphate
  modified_base 10: mod_base = OTHER; note = 2'-O-methyluridine-3'-phosphate
  modified_base 11: mod_base = OTHER; note = 2'-O-methylguanosine-3'-phosphate
  modified_base 12: mod_base = OTHER; note = 2'-O-methyluridine-3'-phosphate
  modified_base 13: mod_base = OTHER; note = 2'-O-methyluridine-3'-phosphate
  modified_base 14: mod_base = OTHER; note = 2'-deoxy-2'-fluorouridine-3'-phosphate
  modified_base 15: mod_base = OTHER; note = 2'-O-methylguanosine-3'-phosphate
  modified_base 16: mod_base = OTHER; note = 2'-deoxy-2'-fluorocytidine-3'-phosphate
  modified_base 17: mod_base = OTHER; note = 2'-O-methyluridine-3'-phosphate
  modified_base 18: mod_base = OTHER; note = 2'-O-methyladenosine-3'-phosphate
  modified_base 19: mod_base = OTHER; note = 2'-O-methylcytidine-3'-phosphate
  modified_base 20: mod_base = OTHER; note = 2'-O-methylcytidine-3'-phosphate
  modified_base 21: mod_base = OTHER; note = 2'-O-methyluridine-3'-phosphorothioate
  modified_base 22: mod_base = OTHER; note = 2'-O-methylcytidine-3'-phosphorothioate
  modified_base 23: mod_base = OTHER; note = 2'-O-methylcytidine
tcaccttagtgtttgctacctcc

SEQ ID NO: 2394 - RNA, 21 nt, synthetic construct
  source 1..21: mol_type = other RNA
  modified_base 1: mod_base = OTHER; note = 2'-O-methyladenosine-3'-phosphorothioate
  modified_base 2: mod_base = OTHER; note = 2'-O-methylguanosine-3'-phosphorothioate
  modified_base 3: mod_base = OTHER; note = 2'-O-methylguanosine-3'-phosphate
  modified_base 4: mod_base = OTHER; note = 2'-O-methyluridine-3'-phosphate
  modified_base 5: mod_base = OTHER; note = 2'-O-methyladenosine-3'-phosphate
  modified_base 6: mod_base = OTHER; note = 2'-O-methylguanosine-3'-phosphate
  modified_base 7: mod_base = OTHER; note = 2'-deoxy-2'-fluorocytidine-3'-phosphate
  modified_base 8: mod_base = OTHER; note = 2'-O-methyladenosine-3'-phosphate
  modified_base 9: mod_base = OTHER; note = 2'-deoxy-2'-fluoroadenosine-3'-phosphate
  modified_base 10: mod_base = OTHER; note = 2'-deoxy-2'-fluoroadenosine-3'-phosphate
  modified_base 11: mod_base = OTHER; note = 2'-deoxy-2'-fluorocytidine-3'-phosphate
  modified_base 12: mod_base = OTHER; note = 2'-O-methyladenosine-3'-phosphate
  modified_base 13: mod_base = OTHER; note = 2'-O-methylcytidine-3'-phosphate
  modified_base 14: mod_base = OTHER; note = 2'-O-methyluridine-3'-phosphate
  modified_base 15: mod_base = OTHER; note = 2'-O-methyladenosine-3'-phosphate
  modified_base 16: mod_base = OTHER; note = 2'-O-methyladenosine-3'-phosphate
  modified_base 17: mod_base = OTHER; note = 2'-O-methylguanosine-3'-phosphate
  modified_base 18: mod_base = OTHER; note = 2'-O-methylguanosine-3'-phosphate
  modified_base 19: mod_base = OTHER; note = 2'-O-methyluridine-3'-phosphate
  modified_base 20: mod_base = OTHER; note = 2'-O-methylguanosine-3'-phosphate
  modified_base 21: mod_base = OTHER; note = 2'-O-methyladenosine-3'-phosphate ((2S,4R)-1-[29-[[2-(acetylamino)-2-deoxy-beta-D-galactopyra nosyl]oxy]-14,14-bis[[3-[[3-[[5-[[2-(acetylamino)-2-deoxy-b eta-D-galactopyranosyl]oxy]-1-oxopentyl]amino]propyl]amino] -3-oxopropoxy]methyl]-1,12,19,25-tetraoxo-16-oxa-13,20,24-t riazanonacos-1-yl]-4-hydroxy-2-pyrrolidinyl)methyl ester
aggtagcaaacactaaggtga

SEQ ID NO: 2395 - RNA, 23 nt, synthetic construct
  source 1..23: mol_type = other RNA
  modified_base 1: mod_base = OTHER; note = 2'-O-methyluridine-3'-phosphorothioate
  modified_base 2: mod_base = OTHER; note = 2'-deoxy-2'-fluorocytidine-3'-phosphorothioate
  modified_base 3: mod_base = OTHER; note = 2'-O-methyladenosine-3'-phosphate
  modified_base 4: mod_base = OTHER; note = 2'-O-methylcytidine-3'-phosphate
  modified_base 5: mod_base = OTHER; note = 2'-O-methylcytidine-3'-phosphate
  modified_base 6: mod_base = OTHER; note = 2'-deoxy-2'-fluorouridine-3'-phosphate
  modified_base 7: mod_base = OTHER; note = 2'-O-methyluridine-3'-phosphate
  modified_base 8: mod_base = OTHER; note = 2'-deoxy-2'-fluoroadenosine-3'-phosphate
  modified_base 9: mod_base = OTHER; note = 2'-deoxy-2'-fluoroguanosine-3'-phosphate
  modified_base 10: mod_base = OTHER; note = 2'-O-methyluridine-3'-phosphate
  modified_base 11: mod_base = OTHER; note = 2'-O-methylguanosine-3'-phosphate
  modified_base 12: mod_base = OTHER; note = 2'-O-methyluridine-3'-phosphate
  modified_base 13: mod_base = OTHER; note = 2'-O-methyluridine-3'-phosphate
  modified_base 14: mod_base = OTHER; note = 2'-deoxy-2'-fluorouridine-3'-phosphate
  modified_base 15: mod_base = OTHER; note = 2'-O-methylguanosine-3'-phosphate
  modified_base 16: mod_base = OTHER; note = 2'-deoxy-2'-fluorocytidine-3'-phosphate
  modified_base 17: mod_base = OTHER; note = 2'-O-methyluridine-3'-phosphate
  modified_base 18: mod_base = OTHER; note = 2'-O-methyladenosine-3'-phosphate
  modified_base 19: mod_base = OTHER; note = 2'-O-methylcytidine-3'-phosphate
  modified_base 20: mod_base = OTHER; note = 2'-O-methylcytidine-3'-phosphate
  modified_base 21: mod_base = OTHER; note = 2'-O-methyluridine-3'-phosphorothioate
  modified_base 22: mod_base = OTHER; note = 2'-O-methylcytidine-3'-phosphorothioate
  modified_base 23: mod_base = OTHER; note = 2'-O-methylcytidine
tcaccttagtgtttgctacctcc

SEQ ID NO: 2396 - RNA, 21 nt, synthetic construct
  source 1..21: mol_type = other RNA
  modified_base 1: mod_base = OTHER; note = 2'-O-methylguanosine-3'-phosphorothioate
  modified_base 2: mod_base = OTHER; note = 2'-O-methylguanosine-3'-phosphorothioate
  modified_base 3: mod_base = OTHER; note = 2'-O-methyluridine-3'-phosphate
  modified_base 4: mod_base = OTHER; note = 2'-O-methyladenosine-3'-phosphate
  modified_base 5: mod_base = OTHER; note = 2'-O-methylguanosine-3'-phosphate
  modified_base 6: mod_base = OTHER; note = 2'-O-methylcytidine-3'-phosphate
  modified_base 7: mod_base = OTHER; note = 2'-deoxy-2'-fluoroadenosine-3'-phosphate
  modified_base 8: mod_base = OTHER; note = 2'-O-methyladenosine-3'-phosphate
  modified_base 9: mod_base = OTHER; note = 2'-deoxy-2'-fluoroadenosine-3'-phosphate
  modified_base 10: mod_base = OTHER; note = 2'-deoxy-2'-fluorocytidine-3'-phosphate
  modified_base 11: mod_base = OTHER; note = 2'-deoxy-2'-fluoroadenosine-3'-phosphate
  modified_base 12: mod_base = OTHER; note = 2'-O-methylcytidine-3'-phosphate
  modified_base 13: mod_base = OTHER; note = 2'-O-methyluridine-3'-phosphate
  modified_base 14: mod_base = OTHER; note = 2'-O-methyladenosine-3'-phosphate
  modified_base 15: mod_base = OTHER; note = 2'-O-methyladenosine-3'-phosphate
  modified_base 16: mod_base = OTHER; note = 2'-O-methylguanosine-3'-phosphate
  modified_base 17: mod_base = OTHER; note = 2'-O-methylguanosine-3'-phosphate
  modified_base 18: mod_base = OTHER; note = 2'-O-methyluridine-3'-phosphate
  modified_base 19: mod_base = OTHER; note = 2'-O-methylguanosine-3'-phosphate
  modified_base 20: mod_base = OTHER; note = 2'-O-methyladenosine-3'-phosphate
  modified_base 21: mod_base = OTHER; note = 2'-O-methyladenosine-3'-phosphate ((2S,4R)-1-[29-[[2-(acetylamino)-2-deoxy-beta-D-galactopyra nosyl]oxy]-14,14-bis[[3-[[3-[[5-[[2-(acetylamino)-2-deoxy-b eta-D-galactopyranosyl]oxy]-1-oxopentyl]amino]propyl]amino] -3-oxopropoxy]methyl]-1,12,19,25-tetraoxo-16-oxa-13,20,24-t riazanonacos-1-yl]-4-hydroxy-2-pyrrolidinyl)methyl ester
ggtagcaaacactaaggtgaa

SEQ ID NO: 2397 - RNA, 23 nt, synthetic construct
  source 1..23: mol_type = other RNA
  modified_base 1: mod_base = OTHER; note = 2'-O-methyluridine-3'-phosphorothioate
  modified_base 2: mod_base = OTHER; note = 2'-deoxy-2'-fluorouridine-3'-phosphorothioate
  modified_base 3: mod_base = OTHER; note = 2'-O-methylcytidine-3'-phosphate
  modified_base 4: mod_base = OTHER; note = 2'-O-methyladenosine-3'-phosphate
  modified_base 5: mod_base = OTHER; note = 2'-O-methylcytidine-3'-phosphate
  modified_base 6: mod_base = OTHER; note = 2'-deoxy-2'-fluorocytidine-3'-phosphate
  modified_base 7: mod_base = OTHER; note = 2'-O-methyluridine-3'-phosphate
  modified_base 8: mod_base = OTHER; note = 2'-deoxy-2'-fluorouridine-3'-phosphate
  modified_base 9: mod_base = OTHER; note = 2'-deoxy-2'-fluoroadenosine-3'-phosphate
  modified_base 10: mod_base = OTHER; note = 2'-O-methylguanosine-3'-phosphate
  modified_base 11: mod_base = OTHER; note = 2'-O-methyluridine-3'-phosphate
  modified_base 12: mod_base = OTHER; note = 2'-O-methylguanosine-3'-phosphate
  modified_base 13: mod_base = OTHER; note = 2'-O-methyluridine-3'-phosphate
  modified_base 14: mod_base = OTHER; note = 2'-deoxy-2'-fluorouridine-3'-phosphate
  modified_base 15: mod_base = OTHER; note = 2'-O-methyluridine-3'-phosphate
  modified_base 16: mod_base = OTHER; note = 2'-deoxy-2'-fluoroguanosine-3'-phosphate
  modified_base 17: mod_base = OTHER; note = 2'-O-methylcytidine-3'-phosphate
  modified_base 18: mod_base = OTHER; note = 2'-O-methyluridine-3'-phosphate
  modified_base 19: mod_base = OTHER; note = 2'-O-methyladenosine-3'-phosphate
  modified_base 20: mod_base = OTHER; note = 2'-O-methylcytidine-3'-phosphate
  modified_base 21: mod_base = OTHER; note = 2'-O-methylcytidine-3'-phosphorothioate
  modified_base 22: mod_base = OTHER; note = 2'-O-methyluridine-3'-phosphorothioate
  modified_base 23: mod_base = OTHER; note = 2'-O-methylcytidine
ttcaccttagtgtttgctacctc

SEQ ID NO: 2398 - RNA, 21 nt, synthetic construct
  source 1..21: mol_type = other RNA
  modified_base 1: mod_base = OTHER; note = 2'-O-methyluridine-3'-phosphorothioate
  modified_base 2: mod_base = OTHER; note = 2'-O-methyluridine-3'-phosphorothioate
  modified_base 3: mod_base = OTHER; note = 2'-O-methylguanosine-3'-phosphate
  modified_base 4: mod_base = OTHER; note = 2'-O-methylguanosine-3'-phosphate
  modified_base 5: mod_base = OTHER; note = 2'-O-methyladenosine-3'-phosphate
  modified_base 6: mod_base = OTHER; note = 2'-O-methylguanosine-3'-phosphate
  modified_base 7: mod_base = OTHER; note = 2'-deoxy-2'-fluoroguanosine-3'-phosphate
  modified_base 8: mod_base = OTHER; note = 2'-O-methyluridine-3'-phosphate
  modified_base 9: mod_base = OTHER; note = 2'-deoxy-2'-fluoroadenosine-3'-phosphate
  modified_base 10: mod_base = OTHER; note = 2'-deoxy-2'-fluoroguanosine-3'-phosphate
  modified_base 11: mod_base = OTHER; note = 2'-deoxy-2'-fluorocytidine-3'-phosphate
  modified_base 12: mod_base = OTHER; note = 2'-O-methyladenosine-3'-phosphate
  modified_base 13: mod_base = OTHER; note = 2'-O-methyladenosine-3'-phosphate
  modified_base 14: mod_base = OTHER; note = 2'-O-methyladenosine-3'-phosphate
  modified_base 15: mod_base = OTHER; note = 2'-O-methylcytidine-3'-phosphate
  modified_base 16: mod_base = OTHER; note = 2'-O-methyladenosine-3'-phosphate
  modified_base 17: mod_base = OTHER; note = 2'-O-methylcytidine-3'-phosphate
  modified_base 18: mod_base = OTHER; note = 2'-O-methyluridine-3'-phosphate
  modified_base 19: mod_base = OTHER; note = 2'-O-methyladenosine-3'-phosphate
  modified_base 20: mod_base = OTHER; note = 2'-O-methyladenosine-3'-phosphate
  modified_base 21: mod_base = OTHER; note = 2'-O-methylguanosine-3'-phosphate ((2S,4R)-1-[29-[[2-(acetylamino)-2-deoxy-beta-D-galactopyra nosyl]oxy]-14,14-bis[[3-[[3-[[5-[[2-(acetylamino)-2-deoxy-b eta-D-galactopyranosyl]oxy]-1-oxopentyl]amino]propyl]amino] -3-oxopropoxy]methyl]-1,12,19,25-tetraoxo-16-oxa-13,20,24-t riazanonacos-1-yl]-4-hydroxy-2-pyrrolidinyl)methyl ester
ttggaggtagcaaacactaag

SEQ ID NO: 2399 - RNA, 23 nt, synthetic construct
  source 1..23: mol_type = other RNA
  modified_base 1: mod_base = OTHER; note = 2'-O-methylcytidine-3'-phosphorothioate
  modified_base 2: mod_base = OTHER; note = 2'-deoxy-2'-fluorouridine-3'-phosphorothioate
  modified_base 3: mod_base = OTHER; note = 2'-O-methyluridine-3'-phosphate
  modified_base 4: mod_base = OTHER; note = 2'-O-methyladenosine-3'-phosphate
  modified_base 5: mod_base = OTHER; note = 2'-O-methylguanosine-3'-phosphate
  modified_base 6: mod_base = OTHER; note = 2'-deoxy-2'-fluorouridine-3'-phosphate
  modified_base 7: mod_base = OTHER; note = 2'-O-methylguanosine-3'-phosphate
  modified_base 8: mod_base = OTHER; note = 2'-deoxy-2'-fluorouridine-3'-phosphate
  modified_base 9: mod_base = OTHER; note = 2'-deoxy-2'-fluorouridine-3'-phosphate
  modified_base 10: mod_base = OTHER; note = 2'-O-methyluridine-3'-phosphate
  modified_base 11: mod_base = OTHER; note = 2'-O-methylguanosine-3'-phosphate
  modified_base 12: mod_base = OTHER; note = 2'-O-methylcytidine-3'-phosphate
  modified_base 13: mod_base = OTHER; note = 2'-O-methyluridine-3'-phosphate
  modified_base 14: mod_base = OTHER; note = 2'-deoxy-2'-fluoroadenosine-3'-phosphate
  modified_base 15: mod_base = OTHER; note = 2'-O-methylcytidine-3'-phosphate
  modified_base 16: mod_base = OTHER; note = 2'-deoxy-2'-fluorocytidine-3'-phosphate
  modified_base 17: mod_base = OTHER; note = 2'-O-methyluridine-3'-phosphate
  modified_base 18: mod_base = OTHER; note = 2'-O-methylcytidine-3'-phosphate
  modified_base 19: mod_base = OTHER; note = 2'-O-methylcytidine-3'-phosphate
  modified_base 20: mod_base = OTHER; note = 2'-O-methyladenosine-3'-phosphate
  modified_base 21: mod_base = OTHER; note = 2'-O-methyladenosine-3'-phosphorothioate
  modified_base 22: mod_base = OTHER; note = 2'-O-methyluridine-3'-phosphorothioate
  modified_base 23: mod_base = OTHER; note = 2'-O-methyluridine
cttagtgtttgctacctccaatt

SEQ ID NO: 2400 - RNA, 21 nt, synthetic construct
  source 1..21: mol_type = other RNA
  modified_base 1: mod_base = OTHER; note = 2'-O-methyladenosine-3'-phosphorothioate
  modified_base 2: mod_base = OTHER; note = 2'-O-methyluridine-3'-phosphorothioate
  modified_base 3: mod_base = OTHER; note = 2'-O-methyluridine-3'-phosphate
  modified_base 4: mod_base = OTHER; note = 2'-O-methylguanosine-3'-phosphate
  modified_base 5: mod_base = OTHER; note = 2'-O-methylguanosine-3'-phosphate
  modified_base 6: mod_base = OTHER; note = 2'-O-methyladenosine-3'-phosphate
  modified_base 7: mod_base = OTHER; note = 2'-deoxy-2'-fluoroguanosine-3'-phosphate
  modified_base 8: mod_base = OTHER; note = 2'-O-methylguanosine-3'-phosphate
  modified_base 9: mod_base = OTHER; note = 2'-deoxy-2'-fluorouridine-3'-phosphate
  modified_base 10: mod_base = OTHER; note = 2'-deoxy-2'-fluoroadenosine-3'-phosphate
  modified_base 11: mod_base = OTHER; note = 2'-deoxy-2'-fluoroguanosine-3'-phosphate
  modified_base 12: mod_base = OTHER; note = 2'-O-methylcytidine-3'-phosphate
  modified_base 13: mod_base = OTHER; note = 2'-O-methyladenosine-3'-phosphate
  modified_base 14: mod_base = OTHER; note = 2'-O-methyladenosine-3'-phosphate
  modified_base 15: mod_base = OTHER; note = 2'-O-methyladenosine-3'-phosphate
  modified_base 16: mod_base = OTHER; note = 2'-O-methylcytidine-3'-phosphate
  modified_base 17: mod_base = OTHER; note = 2'-O-methyladenosine-3'-phosphate
  modified_base 18: mod_base = OTHER; note = 2'-O-methylcytidine-3'-phosphate
  modified_base 19: mod_base = OTHER; note = 2'-O-methyluridine-3'-phosphate
  modified_base 20: mod_base = OTHER; note = 2'-O-methyladenosine-3'-phosphate
  modified_base 21: mod_base = OTHER; note = 2'-O-methyladenosine-3'-phosphate ((2S,4R)-1-[29-[[2-(acetylamino)-2-deoxy-beta-D-galactopyra nosyl]oxy]-14,14-bis[[3-[[3-[[5-[[2-(acetylamino)-2-deoxy-b eta-D-galactopyranosyl]oxy]-1-oxopentyl]amino]propyl]amino] -3-oxopropoxy]methyl]-1,12,19,25-tetraoxo-16-oxa-13,20,24-t riazanonacos-1-yl]-4-hydroxy-2-pyrrolidinyl)methyl ester
attggaggtagcaaacactaa

SEQ ID NO: 2401 - RNA, 23 nt, synthetic construct
  source 1..23: mol_type = other RNA
  modified_base 1: mod_base = OTHER; note = 2'-O-methyluridine-3'-phosphorothioate
  modified_base 2: mod_base = OTHER; note = 2'-deoxy-2'-fluorouridine-3'-phosphorothioate
  modified_base 3: mod_base = OTHER; note = 2'-O-methyladenosine-3'-phosphate
  modified_base 4: mod_base = OTHER; note = 2'-O-methylguanosine-3'-phosphate
  modified_base 5: mod_base = OTHER; note = 2'-O-methyluridine-3'-phosphate
  modified_base 6: mod_base = OTHER; note = 2'-deoxy-2'-fluoroguanosine-3'-phosphate
  modified_base 7: mod_base = OTHER; note = 2'-O-methyluridine-3'-phosphate
  modified_base 8: mod_base = OTHER; note = 2'-deoxy-2'-fluorouridine-3'-phosphate
  modified_base 9: mod_base = OTHER; note = 2'-deoxy-2'-fluorouridine-3'-phosphate
  modified_base 10: mod_base = OTHER; note = 2'-O-methylguanosine-3'-phosphate
  modified_base 11: mod_base = OTHER; note = 2'-O-methylcytidine-3'-phosphate
  modified_base 12: mod_base = OTHER; note = 2'-O-methyluridine-3'-phosphate
  modified_base 13: mod_base = OTHER; note = 2'-O-methyladenosine-3'-phosphate
  modified_base 14: mod_base = OTHER; note = 2'-deoxy-2'-fluorocytidine-3'-phosphate
  modified_base 15: mod_base = OTHER; note = 2'-O-methylcytidine-3'-phosphate
  modified_base 16: mod_base = OTHER; note = 2'-deoxy-2'-fluorouridine-3'-phosphate
  modified_base 17: mod_base = OTHER; note = 2'-O-methylcytidine-3'-phosphate
  modified_base 18: mod_base = OTHER; note = 2'-O-methylcytidine-3'-phosphate
  modified_base 19: mod_base = OTHER; note = 2'-O-methyladenosine-3'-phosphate
  modified_base 20: mod_base = OTHER; note = 2'-O-methyladenosine-3'-phosphate
  modified_base 21: mod_base = OTHER; note = 2'-O-methyluridine-3'-phosphorothioate
  modified_base 22: mod_base = OTHER; note = 2'-O-methyluridine-3'-phosphorothioate
  modified_base 23: mod_base = OTHER; note = 2'-O-methyluridine
ttagtgtttgctacctccaattt

SEQ ID NO: 2402 - RNA, 21 nt, synthetic construct
  source 1..21: mol_type = other RNA
  modified_base 1: mod_base = OTHER; note = 2'-O-methyluridine-3'-phosphorothioate
  modified_base 2: mod_base = OTHER; note = 2'-O-methyladenosine-3'-phosphorothioate
  modified_base 3: mod_base = OTHER; note = 2'-O-methyladenosine-3'-phosphate
  modified_base 4: mod_base = OTHER; note = 2'-O-methyladenosine-3'-phosphate
  modified_base 5: mod_base = OTHER; note = 2'-O-methylguanosine-3'-phosphate
  modified_base 6: mod_base = OTHER; note = 2'-O-methyluridine-3'-phosphate
  modified_base 7: mod_base = OTHER; note = 2'-deoxy-2'-fluoroguanosine-3'-phosphate
  modified_base 8: mod_base = OTHER; note = 2'-O-methylcytidine-3'-phosphate
  modified_base 9: mod_base = OTHER; note = 2'-deoxy-2'-fluorouridine-3'-phosphate
  modified_base 10: mod_base = OTHER; note = 2'-deoxy-2'-fluoroguanosine-3'-phosphate
  modified_base 11: mod_base = OTHER; note = 2'-deoxy-2'-fluorouridine-3'-phosphate
  modified_base 12: mod_base = OTHER; note = 2'-O-methyladenosine-3'-phosphate
  modified_base 13: mod_base = OTHER; note = 2'-O-methyluridine-3'-phosphate
  modified_base 14: mod_base = OTHER; note = 2'-O-methylcytidine-3'-phosphate
  modified_base 15: mod_base = OTHER; note = 2'-O-methylcytidine-3'-phosphate
  modified_base 16: mod_base = OTHER; note = 2'-O-methyluridine-3'-phosphate
  modified_base 17: mod_base = OTHER; note = 2'-O-methyluridine-3'-phosphate
  modified_base 18: mod_base = OTHER; note = 2'-O-methyluridine-3'-phosphate
  modified_base 19: mod_base = OTHER; note = 2'-O-methyladenosine-3'-phosphate
  modified_base 20: mod_base = OTHER; note = 2'-O-methylguanosine-3'-phosphate
  modified_base 21: mod_base = OTHER; note = 2'-O-methyluridine-3'-phosphate ((2S,4R)-1-[29-[[2-(acetylamino)-2-deoxy-beta-D-galactopyra nosyl]oxy]-14,14-bis[[3-[[3-[[5-[[2-(acetylamino)-2-deoxy-b eta-D-galactopyranosyl]oxy]-1-oxopentyl]amino]propyl]amino] -3-oxopropoxy]methyl]-1,12,19,25-tetraoxo-16-oxa-13,20,24-t riazanonacos-1-yl]-4-hydroxy-2-pyrrolidinyl)methyl ester
taaagtgctgtatcctttagt

SEQ ID NO: 2403 - RNA, 23 nt, synthetic construct
  source 1..23: mol_type = other RNA
  modified_base 1: mod_base = OTHER; note = 2'-O-methyladenosine-3'-phosphorothioate
  modified_base 2: mod_base = OTHER; note = 2'-deoxy-2'-fluorocytidine-3'-phosphorothioate
  modified_base 3: mod_base = OTHER; note = 2'-O-methyluridine-3'-phosphate
  modified_base 4: mod_base = OTHER; note = 2'-O-methyladenosine-3'-phosphate
  modified_base 5: mod_base = OTHER; note = 2'-O-methyladenosine-3'-phosphate
  modified_base 6: mod_base = OTHER; note = 2'-deoxy-2'-fluoroadenosine-3'-phosphate
  modified_base 7: mod_base = OTHER; note = 2'-O-methylguanosine-3'-phosphate
  modified_base 8: mod_base = OTHER; note = 2'-deoxy-2'-fluoroguanosine-3'-phosphate
  modified_base 9: mod_base = OTHER; note = 2'-deoxy-2'-fluoroadenosine-3'-phosphate
  modified_base 10: mod_base = OTHER; note = 2'-O-methyluridine-3'-phosphate
  modified_base 11: mod_base = OTHER; note = 2'-O-methyladenosine-3'-phosphate
  modified_base 12: mod_base = OTHER; note = 2'-O-methylcytidine-3'-phosphate
  modified_base 13: mod_base = OTHER; note = 2'-O-methyladenosine-3'-phosphate
  modified_base 14: mod_base = OTHER; note = 2'-deoxy-2'-fluoroguanosine-3'-phosphate
  modified_base 15: mod_base = OTHER; note = 2'-O-methylcytidine-3'-phosphate
  modified_base 16: mod_base = OTHER; note = 2'-deoxy-2'-fluoroadenosine-3'-phosphate
  modified_base 17: mod_base = OTHER; note = 2'-O-methylcytidine-3'-phosphate
  modified_base 18: mod_base = OTHER; note = 2'-O-methyluridine-3'-phosphate
  modified_base 19: mod_base = OTHER; note = 2'-O-methyluridine-3'-phosphate
  modified_base 20: mod_base = OTHER; note = 2'-O-methyluridine-3'-phosphate
  modified_base 21: mod_base = OTHER; note = 2'-O-methyladenosine-3'-phosphorothioate
  modified_base 22: mod_base = OTHER; note = 2'-O-methylguanosine-3'-phosphorothioate
  modified_base 23: mod_base = OTHER; note = 2'-O-methylcytidine
actaaaggatacagcactttagc

SEQ ID NO: 2404 - RNA, 21 nt, synthetic construct
  source 1..21: mol_type = other RNA
  modified_base 1: mod_base = OTHER; note = 2'-O-methyladenosine-3'-phosphorothioate
  modified_base 2: mod_base = OTHER; note = 2'-O-methyladenosine-3'-phosphorothioate
  modified_base 3: mod_base = OTHER; note = 2'-O-methyladenosine-3'-phosphate
  modified_base 4: mod_base = OTHER; note = 2'-O-methylguanosine-3'-phosphate
  modified_base 5: mod_base = OTHER; note = 2'-O-methyluridine-3'-phosphate
  modified_base 6: mod_base = OTHER; note = 2'-O-methylguanosine-3'-phosphate
  modified_base 7: mod_base = OTHER; note = 2'-deoxy-2'-fluorocytidine-3'-phosphate
  modified_base 8: mod_base = OTHER; note = 2'-O-methyluridine-3'-phosphate
  modified_base 9: mod_base = OTHER; note = 2'-deoxy-2'-fluoroguanosine-3'-phosphate
  modified_base 10: mod_base = OTHER; note = 2'-deoxy-2'-fluorouridine-3'-phosphate
  modified_base 11: mod_base = OTHER; note = 2'-deoxy-2'-fluoroadenosine-3'-phosphate
  modified_base 12: mod_base = OTHER; note = 2'-O-methyluridine-3'-phosphate
  modified_base 13: mod_base = OTHER; note = 2'-O-methylcytidine-3'-phosphate
  modified_base 14: mod_base = OTHER; note = 2'-O-methylcytidine-3'-phosphate
  modified_base 15: mod_base = OTHER; note = 2'-O-methyluridine-3'-phosphate
  modified_base 16: mod_base = OTHER; note = 2'-O-methyluridine-3'-phosphate
  modified_base 17: mod_base = OTHER; note = 2'-O-methyluridine-3'-phosphate
  modified_base 18: mod_base = OTHER; note = 2'-O-methyladenosine-3'-phosphate
  modified_base 19: mod_base = OTHER; note = 2'-O-methylguanosine-3'-phosphate
  modified_base 20: mod_base = OTHER; note = 2'-O-methyluridine-3'-phosphate
  modified_base 21: mod_base = OTHER; note = 2'-O-methyladenosine-3'-phosphate ((2S,4R)-1-[29-[[2-(acetylamino)-2-deoxy-beta-D-galactopyra nosyl]oxy]-14,14-bis[[3-[[3-[[5-[[2-(acetylamino)-2-deoxy-b eta-D-galactopyranosyl]oxy]-1-oxopentyl]amino]propyl]amino] -3-oxopropoxy]methyl]-1,12,19,25-tetraoxo-16-oxa-13,20,24-t riazanonacos-1-yl]-4-hydroxy-2-pyrrolidinyl)methyl ester
aaagtgctgtatcctttagta

SEQ ID NO: 2405 - RNA, 23 nt, synthetic construct
  source 1..23: mol_type = other RNA
  modified_base 1: mod_base = OTHER; note = 2'-O-methyluridine-3'-phosphorothioate
  modified_base 2: mod_base = OTHER; note = 2'-deoxy-2'-fluoroadenosine-3'-phosphorothioate
  modified_base 3: mod_base = OTHER; note = 2'-O-methylcytidine-3'-phosphate
  modified_base 4: mod_base = OTHER; note = 2'-O-methyluridine-3'-phosphate
  modified_base 5: mod_base = OTHER; note = 2'-O-methyladenosine-3'-phosphate
  modified_base 6: mod_base = OTHER; note = 2'-deoxy-2'-fluoroadenosine-3'-phosphate
  modified_base 7: mod_base = OTHER; note = 2'-O-methyladenosine-3'-phosphate
  modified_base 8: mod_base = OTHER; note = 2'-deoxy-2'-fluoroguanosine-3'-phosphate
  modified_base 9: mod_base = OTHER; note = 2'-deoxy-2'-fluoroguanosine-3'-phosphate
  modified_base 10: mod_base = OTHER; note = 2'-O-methyladenosine-3'-phosphate
  modified_base 11: mod_base = OTHER; note = 2'-O-methyluridine-3'-phosphate
  modified_base 12: mod_base = OTHER; note = 2'-O-methyladenosine-3'-phosphate
  modified_base 13: mod_base = OTHER; note = 2'-O-methylcytidine-3'-phosphate
  modified_base 14: mod_base = OTHER; note = 2'-deoxy-2'-fluoroadenosine-3'-phosphate
  modified_base 15: mod_base = OTHER; note = 2'-O-methylguanosine-3'-phosphate
  modified_base 16: mod_base = OTHER; note = 2'-deoxy-2'-fluorocytidine-3'-phosphate
  modified_base 17: mod_base = OTHER; note = 2'-O-methyladenosine-3'-phosphate
  modified_base 18: mod_base = OTHER; note = 2'-O-methylcytidine-3'-phosphate
  modified_base 19: mod_base = OTHER; note = 2'-O-methyluridine-3'-phosphate
  modified_base 20: mod_base = OTHER; note = 2'-O-methyluridine-3'-phosphate
  modified_base 21: mod_base = OTHER; note = 2'-O-methyluridine-3'-phosphorothioate
  modified_base 22: mod_base = OTHER; note = 2'-O-methyladenosine-3'-phosphorothioate
  modified_base 23: mod_base = OTHER; note = 2'-O-methylguanosine
tactaaaggatacagcactttag

SEQ ID NO: 2406 - RNA, 21 nt, synthetic construct
  source 1..21: mol_type = other RNA
  modified_base 1: mod_base = OTHER; note = 2'-O-methyladenosine-3'-phosphorothioate
  modified_base 2: mod_base = OTHER; note = 2'-O-methylguanosine-3'-phosphorothioate
  modified_base 3: mod_base = OTHER; note = 2'-O-methylguanosine-3'-phosphate
  modified_base 4: mod_base = OTHER; note = 2'-O-methylcytidine-3'-phosphate
  modified_base 5: mod_base = OTHER; note = 2'-O-methyluridine-3'-phosphate
  modified_base 6: mod_base = OTHER; note = 2'-O-methyladenosine-3'-phosphate
  modified_base 7: mod_base = OTHER; note = 2'-deoxy-2'-fluoroadenosine-3'-phosphate
  modified_base 8: mod_base = OTHER; note = 2'-O-methyladenosine-3'-phosphate
  modified_base 9: mod_base = OTHER; note = 2'-deoxy-2'-fluoroguanosine-3'-phosphate
  modified_base 10: mod_base = OTHER; note = 2'-deoxy-2'-fluorouridine-3'-phosphate
  modified_base 11: mod_base = OTHER; note = 2'-deoxy-2'-fluoroguanosine-3'-phosphate
  modified_base 12: mod_base = OTHER; note = 2'-O-methylcytidine-3'-phosphate
  modified_base 13: mod_base = OTHER; note = 2'-O-methyluridine-3'-phosphate
  modified_base 14: mod_base = OTHER; note = 2'-O-methylguanosine-3'-phosphate
  modified_base 15: mod_base = OTHER; note = 2'-O-methyluridine-3'-phosphate
  modified_base 16: mod_base = OTHER; note = 2'-O-methyladenosine-3'-phosphate
  modified_base 17: mod_base = OTHER; note = 2'-O-methyluridine-3'-phosphate
  modified_base 18: mod_base = OTHER; note = 2'-O-methylcytidine-3'-phosphate
  modified_base 19: mod_base = OTHER; note = 2'-O-methylcytidine-3'-phosphate
  modified_base 20: mod_base = OTHER; note = 2'-O-methyluridine-3'-phosphate
  modified_base 21: mod_base = OTHER; note = 2'-O-methyluridine-3'-phosphate ((2S,4R)-1-[29-[[2-(acetylamino)-2-deoxy-beta-D-galactopyra nosyl]oxy]-14,14-bis[[3-[[3-[[5-[[2-(acetylamino)-2-deoxy-b eta-D-galactopyranosyl]oxy]-1-oxopentyl]amino]propyl]amino] -3-oxopropoxy]methyl]-1,12,19,25-tetraoxo-16-oxa-13,20,24-t riazanonacos-1-yl]-4-hydroxy-2-pyrrolidinyl)methyl ester
aggctaaagtgctgtatcctt

SEQ ID NO: 2407 - RNA, 23 nt, synthetic construct
  source 1..23: mol_type = other RNA
  modified_base 1: mod_base = OTHER; note = 2'-O-methyladenosine-3'-phosphorothioate
  modified_base 2: mod_base = OTHER; note = 2'-deoxy-2'-fluoroadenosine-3'-phosphorothioate
  modified_base 3: mod_base = OTHER; note = 2'-O-methylguanosine-3'-phosphate
  modified_base 4: mod_base = OTHER; note = 2'-O-methylguanosine-3'-phosphate
  modified_base 5: mod_base = OTHER; note = 2'-O-methyladenosine-3'-phosphate
  modified_base 6: mod_base = OTHER; note = 2'-deoxy-2'-fluorouridine-3'-phosphate
  modified_base 7: mod_base = OTHER; note = 2'-O-methyladenosine-3'-phosphate
  modified_base 8: mod_base = OTHER; note = 2'-deoxy-2'-fluorocytidine-3'-phosphate
  modified_base 9: mod_base = OTHER; note = 2'-deoxy-2'-fluoroadenosine-3'-phosphate
  modified_base 10: mod_base = OTHER; note = 2'-O-methylguanosine-3'-phosphate
  modified_base 11: mod_base = OTHER; note = 2'-O-methylcytidine-3'-phosphate
  modified_base 12: mod_base = OTHER; note = 2'-O-methyladenosine-3'-phosphate
  modified_base 13: mod_base = OTHER; note = 2'-O-methylcytidine-3'-phosphate
  modified_base 14: mod_base = OTHER; note = 2'-deoxy-2'-fluorouridine-3'-phosphate
  modified_base 15: mod_base = OTHER; note = 2'-O-methyluridine-3'-phosphate
  modified_base 16: mod_base = OTHER; note = 2'-deoxy-2'-fluorouridine-3'-phosphate
  modified_base 17: mod_base = OTHER; note = 2'-O-methyladenosine-3'-phosphate
  modified_base 18: mod_base = OTHER; note = 2'-O-methylguanosine-3'-phosphate
  modified_base 19: mod_base = OTHER; note = 2'-O-methylcytidine-3'-phosphate
  modified_base 20: mod_base = OTHER; note = 2'-O-methylcytidine-3'-phosphate
  modified_base 21: mod_base = OTHER; note = 2'-O-methyluridine-3'-phosphorothioate
  modified_base 22: mod_base = OTHER; note = 2'-O-methylguanosine-3'-phosphorothioate
  modified_base 23: mod_base = OTHER; note = 2'-O-methylcytidine
aaggatacagcactttagcctgc

SEQ ID NO: 2408 - RNA, 21 nt, synthetic construct
  source 1..21: mol_type = other RNA
  modified_base 1: mod_base = OTHER; note = 2'-O-methylcytidine-3'-phosphorothioate
  modified_base 2: mod_base = OTHER; note = 2'-O-methyladenosine-3'-phosphorothioate
  modified_base 3: mod_base = OTHER; note = 2'-O-methylguanosine-3'-phosphate
  modified_base 4: mod_base = OTHER; note = 2'-O-methylguanosine-3'-phosphate
  modified_base 5: mod_base = OTHER; note = 2'-O-methylcytidine-3'-phosphate
  modified_base 6: mod_base = OTHER; note = 2'-O-methyluridine-3'-phosphate
  modified_base 7: mod_base = OTHER; note = 2'-deoxy-2'-fluoroadenosine-3'-phosphate
  modified_base 8: mod_base = OTHER; note = 2'-O-methyladenosine-3'-phosphate
  modified_base 9: mod_base = OTHER; note = 2'-deoxy-2'-fluoroadenosine-3'-phosphate
  modified_base 10: mod_base = OTHER; note = 2'-deoxy-2'-fluoroguanosine-3'-phosphate
  modified_base 11: mod_base = OTHER; note = 2'-deoxy-2'-fluorouridine-3'-phosphate
  modified_base 12: mod_base = OTHER; note = 2'-O-methylguanosine-3'-phosphate
  modified_base 13: mod_base = OTHER; note = 2'-O-methylcytidine-3'-phosphate
  modified_base 14: mod_base = OTHER; note = 2'-O-methyluridine-3'-phosphate
  modified_base 15: mod_base = OTHER; note = 2'-O-methylguanosine-3'-phosphate
  modified_base 16: mod_base = OTHER; note = 2'-O-methyluridine-3'-phosphate
  modified_base 17: mod_base = OTHER; note = 2'-O-methyladenosine-3'-phosphate
  modified_base 18: mod_base = OTHER; note = 2'-O-methyluridine-3'-phosphate
  modified_base 19: mod_base = OTHER; note = 2'-O-methylcytidine-3'-phosphate
  modified_base 20: mod_base = OTHER; note = 2'-O-methylcytidine-3'-phosphate
  modified_base 21: mod_base = OTHER; note = 2'-O-methyluridine-3'-phosphate ((2S,4R)-1-[29-[[2-(acetylamino)-2-deoxy-beta-D-galactopyra nosyl]oxy]-14,14-bis[[3-[[3-[[5-[[2-(acetylamino)-2-deoxy-b eta-D-galactopyranosyl]oxy]-1-oxopentyl]amino]propyl]amino] -3-oxopropoxy]methyl]-1,12,19,25-tetraoxo-16-oxa-13,20,24-t riazanonacos-1-yl]-4-hydroxy-2-pyrrolidinyl)methyl ester
caggctaaagtgctgtatcct

SEQ ID NO: 2409 - RNA, 23 nt, synthetic construct
  source 1..23: mol_type = other RNA
  modified_base 1: mod_base = OTHER; note = 2'-O-methyladenosine-3'-phosphorothioate
  modified_base 2: mod_base = OTHER; note = 2'-deoxy-2'-fluoroguanosine-3'-phosphorothioate
  modified_base 3: mod_base = OTHER; note = 2'-O-methylguanosine-3'-phosphate
  modified_base 4: mod_base = OTHER; note = 2'-O-methyladenosine-3'-phosphate
  modified_base 5: mod_base = OTHER; note = 2'-O-methyluridine-3'-phosphate
  modified_base 6: mod_base = OTHER; note = 2'-deoxy-2'-fluoroadenosine-3'-phosphate
  modified_base 7: mod_base = OTHER; note = 2'-O-methylcytidine-3'-phosphate
  modified_base 8: mod_base = OTHER; note = 2'-deoxy-2'-fluoroadenosine-3'-phosphate
  modified_base 9: mod_base = OTHER; note = 2'-deoxy-2'-fluoroguanosine-3'-phosphate
  modified_base 10: mod_base = OTHER; note = 2'-O-methylcytidine-3'-phosphate
  modified_base 11: mod_base = OTHER; note = 2'-O-methyladenosine-3'-phosphate
  modified_base 12: mod_base = OTHER; note = 2'-O-methylcytidine-3'-phosphate
  modified_base 13: mod_base = OTHER; note = 2'-O-methyluridine-3'-phosphate
  modified_base 14: mod_base = OTHER; note = 2'-deoxy-2'-fluorouridine-3'-phosphate
  modified_base 15: mod_base = OTHER; note = 2'-O-methyluridine-3'-phosphate
  modified_base 16: mod_base = OTHER; note = 2'-deoxy-2'-fluoroadenosine-3'-phosphate
  modified_base 17: mod_base = OTHER; note = 2'-O-methylguanosine-3'-phosphate
  modified_base 18: mod_base = OTHER; note = 2'-O-methylcytidine-3'-phosphate
  modified_base 19: mod_base = OTHER; note = 2'-O-methylcytidine-3'-phosphate
  modified_base 20: mod_base = OTHER; note = 2'-O-methyluridine-3'-phosphate
  modified_base 21: mod_base = OTHER; note = 2'-O-methylguanosine-3'-phosphorothioate
  modified_base 22: mod_base = OTHER; note = 2'-O-methylcytidine-3'-phosphorothioate
  modified_base 23: mod_base = OTHER; note = 2'-O-methylcytidine
aggatacagcactttagcctgcc

SEQ ID NO: 2410 - RNA, 21 nt, synthetic construct
  source 1..21: mol_type = other RNA
  modified_base 1: mod_base = OTHER; note = 2'-O-methyladenosine-3'-phosphorothioate
  modified_base 2: mod_base = OTHER; note = 2'-O-methyladenosine-3'-phosphorothioate
  modified_base 3: mod_base = OTHER; note = 2'-O-methylguanosine-3'-phosphate
  modified_base 4: mod_base = OTHER; note = 2'-O-methyladenosine-3'-phosphate
  modified_base 5: mod_base = OTHER; note = 2'-O-methylcytidine-3'-phosphate
  modified_base 6: mod_base = OTHER; note = 2'-O-methyladenosine-3'-phosphate
  modified_base 7: mod_base = OTHER; note = 2'-deoxy-2'-fluorouridine-3'-phosphate
  modified_base 8: mod_base = OTHER; note = 2'-O-methyluridine-3'-phosphate
  modified_base 9: mod_base = OTHER; note = 2'-deoxy-2'-fluoroguanosine-3'-phosphate
  modified_base 10: mod_base = OTHER; note = 2'-deoxy-2'-fluoroguanosine-3'-phosphate
  modified_base 11: mod_base = OTHER; note = 2'-deoxy-2'-fluorouridine-3'-phosphate
  modified_base 12: mod_base = OTHER; note = 2'-O-methylguanosine-3'-phosphate
  modified_base 13: mod_base = OTHER; note = 2'-O-methyladenosine-3'-phosphate
  modified_base 14: mod_base = OTHER; note = 2'-O-methylguanosine-3'-phosphate
  modified_base 15: mod_base = OTHER; note = 2'-O-methylguanosine-3'-phosphate
  modified_base 16: mod_base = OTHER; note = 2'-O-methyladenosine-3'-phosphate
  modified_base 17: mod_base = OTHER; note = 2'-O-methyladenosine-3'-phosphate
  modified_base 18: mod_base = OTHER; note = 2'-O-methyladenosine-3'-phosphate
  modified_base 19: mod_base = OTHER; note = 2'-O-methyladenosine-3'-phosphate
  modified_base 20: mod_base = OTHER; note = 2'-O-methyladenosine-3'-phosphate
  modified_base 21: mod_base = OTHER; note = 2'-O-methyluridine-3'-phosphate ((2S,4R)-1-[29-[[2-(acetylamino)-2-deoxy-beta-D-galactopyra nosyl]oxy]-14,14-bis[[3-[[3-[[5-[[2-(acetylamino)-2-deoxy-b eta-D-galactopyranosyl]oxy]-1-oxopentyl]amino]propyl]amino] -3-oxopropoxy]methyl]-1,12,19,25-tetraoxo-16-oxa-13,20,24-t riazanonacos-1-yl]-4-hydroxy-2-pyrrolidinyl)methyl ester
aagacattggtgaggaaaaat

SEQ ID NO: 2411 - RNA, 23 nt, synthetic construct
  source 1..23: mol_type = other RNA
  modified_base 1: mod_base = OTHER; note = 2'-O-methyladenosine-3'-phosphorothioate
  modified_base 2: mod_base = OTHER; note = 2'-deoxy-2'-fluorouridine-3'-phosphorothioate
  modified_base 3: mod_base = OTHER; note = 2'-O-methyluridine-3'-phosphate
  modified_base 4: mod_base = OTHER; note = 2'-O-methyluridine-3'-phosphate
  modified_base 5: mod_base = OTHER; note = 2'-O-methyluridine-3'-phosphate
  modified_base 6: mod_base = OTHER; note = 2'-deoxy-2'-fluorouridine-3'-phosphate
  modified_base 7: mod_base = OTHER; note = 2'-O-methylcytidine-3'-phosphate
  modified_base 8: mod_base = OTHER; note = 2'-deoxy-2'-fluorocytidine-3'-phosphate
  modified_base 9: mod_base = OTHER; note = 2'-deoxy-2'-fluorouridine-3'-phosphate
  modified_base 10: mod_base = OTHER; note = 2'-O-methylcytidine-3'-phosphate
  modified_base 11: mod_base = OTHER; note = 2'-O-methyladenosine-3'-phosphate
  modified_base 12: mod_base = OTHER; note = 2'-O-methylcytidine-3'-phosphate
  modified_base 13: mod_base = OTHER; note = 2'-O-methylcytidine-3'-phosphate
  modified_base 14: mod_base = OTHER; note = 2'-deoxy-2'-fluoroadenosine-3'-phosphate
  modified_base 15: mod_base = OTHER; note = 2'-O-methyladenosine-3'-phosphate
  modified_base 16: mod_base = OTHER; note = 2'-deoxy-2'-fluorouridine-3'-phosphate
  modified_base 17: mod_base = OTHER; note = 2'-O-methylguanosine-3'-phosphate
  modified_base 18: mod_base = OTHER; note = 2'-O-methyluridine-3'-phosphate
  modified_base 19: mod_base = OTHER; note = 2'-O-methylcytidine-3'-phosphate
  modified_base 20: mod_base = OTHER; note = 2'-O-methyluridine-3'-phosphate
  modified_base 21: mod_base = OTHER; note = 2'-O-methyluridine-3'-phosphorothioate
  modified_base 22: mod_base = OTHER; note = 2'-O-methylguanosine-3'-phosphorothioate
  modified_base 23: mod_base = OTHER; note = 2'-O-methyluridine
atttttcctcaccaatgtcttgt

SEQ ID NO: 2412 - RNA, 21 nt, synthetic construct
  source 1..21: mol_type = other RNA
  modified_base 1: mod_base = OTHER; note = 2'-O-methyladenosine-3'-phosphorothioate
  modified_base 2: mod_base = OTHER; note = 2'-O-methylguanosine-3'-phosphorothioate
  modified_base 3: mod_base = OTHER; note = 2'-O-methyladenosine-3'-phosphate
  modified_base 4: mod_base = OTHER; note = 2'-O-methylcytidine-3'-phosphate
  modified_base 5: mod_base = OTHER; note = 2'-O-methyladenosine-3'-phosphate
  modified_base 6: mod_base = OTHER; note = 2'-O-methyluridine-3'-phosphate
  modified_base 7: mod_base = OTHER; note = 2'-deoxy-2'-fluorouridine-3'-phosphate
  modified_base 8: mod_base = OTHER; note = 2'-O-methylguanosine-3'-phosphate
  modified_base 9: mod_base = OTHER; note = 2'-deoxy-2'-fluoroguanosine-3'-phosphate
  modified_base 10: mod_base = OTHER; note = 2'-deoxy-2'-fluorouridine-3'-phosphate
  modified_base 11: mod_base = OTHER; note = 2'-deoxy-2'-fluoroguanosine-3'-phosphate
  modified_base 12: mod_base = OTHER; note = 2'-O-methyladenosine-3'-phosphate
  modified_base 13: mod_base = OTHER; note = 2'-O-methylguanosine-3'-phosphate
  modified_base 14: mod_base = OTHER; note = 2'-O-methylguanosine-3'-phosphate
  modified_base 15: mod_base = OTHER; note = 2'-O-methyladenosine-3'-phosphate
  modified_base 16: mod_base = OTHER; note = 2'-O-methyladenosine-3'-phosphate
  modified_base 17: mod_base = OTHER; note = 2'-O-methyladenosine-3'-phosphate
  modified_base 18: mod_base = OTHER; note = 2'-O-methyladenosine-3'-phosphate
  modified_base 19: mod_base = OTHER; note = 2'-O-methyladenosine-3'-phosphate
  modified_base 20: mod_base = OTHER; note = 2'-O-methyluridine-3'-phosphate
  modified_base 21: mod_base = OTHER; note = 2'-O-methylcytidine-3'-phosphate ((2S,4R)-1-[29-[[2-(acetylamino)-2-deoxy-beta-D-galactopyra nosyl]oxy]-14,14-bis[[3-[[3-[[5-[[2-(acetylamino)-2-deoxy-b eta-D-galactopyranosyl]oxy]-1-oxopentyl]amino]propyl]amino] -3-oxopropoxy]methyl]-1,12,19,25-tetraoxo-16-oxa-13,20,24-t riazanonacos-1-yl]-4-hydroxy-2-pyrrolidinyl)methyl ester
agacattggtgaggaaaaatc

SEQ ID NO: 2413 - RNA, 23 nt, synthetic construct
  source 1..23: mol_type = other RNA
  modified_base 1: mod_base = OTHER; note = 2'-O-methylguanosine-3'-phosphorothioate
  modified_base 2: mod_base = OTHER; note = 2'-deoxy-2'-fluoroadenosine-3'-phosphorothioate
  modified_base 3: mod_base = OTHER; note = 2'-O-methyluridine-3'-phosphate
  modified_base 4: mod_base = OTHER; note = 2'-O-methyluridine-3'-phosphate
  modified_base 5: mod_base = OTHER; note = 2'-O-methyluridine-3'-phosphate
  modified_base 6: mod_base = OTHER; note = 2'-deoxy-2'-fluorouridine-3'-phosphate
  modified_base 7: mod_base = OTHER; note = 2'-O-methyluridine-3'-phosphate
  modified_base 8: mod_base = OTHER; note = 2'-deoxy-2'-fluorocytidine-3'-phosphate
  modified_base 9: mod_base = OTHER; note = 2'-deoxy-2'-fluorocytidine-3'-phosphate
  modified_base 10: mod_base = OTHER; note = 2'-O-methyluridine-3'-phosphate
  modified_base 11: mod_base = OTHER; note = 2'-O-methylcytidine-3'-phosphate
  modified_base 12: mod_base = OTHER; note = 2'-O-methyladenosine-3'-phosphate
  modified_base 13: mod_base = OTHER; note = 2'-O-methylcytidine-3'-phosphate
  modified_base 14: mod_base = OTHER; note = 2'-deoxy-2'-fluorocytidine-3'-phosphate
  modified_base 15: mod_base = OTHER; note = 2'-O-methyladenosine-3'-phosphate
  modified_base 16: mod_base = OTHER; note = 2'-deoxy-2'-fluoroadenosine-3'-phosphate
  modified_base 17: mod_base = OTHER; note = 2'-O-methyluridine-3'-phosphate
  modified_base 18: mod_base = OTHER; note = 2'-O-methylguanosine-3'-phosphate
  modified_base 19: mod_base = OTHER; note = 2'-O-methyluridine-3'-phosphate
  modified_base 20: mod_base = OTHER; note = 2'-O-methylcytidine-3'-phosphate
  modified_base 21: mod_base = OTHER; note = 2'-O-methyluridine-3'-phosphorothioate
  modified_base 22: mod_base = OTHER; note = 2'-O-methyluridine-3'-phosphorothioate
  modified_base 23: mod_base = OTHER; note = 2'-O-methylguanosine
gatttttcctcaccaatgtcttg

SEQ ID NO: 2414 - RNA, 21 nt, synthetic construct
  source 1..21: mol_type = other RNA
  modified_base 1: mod_base = OTHER; note = 2'-O-methylcytidine-3'-phosphorothioate
  modified_base 2: mod_base = OTHER; note = 2'-O-methylguanosine-3'-phosphorothioate
  modified_base 3: mod_base = OTHER; note = 2'-O-methyladenosine-3'-phosphate
  modified_base 4: mod_base = OTHER; note = 2'-O-methylcytidine-3'-phosphate
  modified_base 5: mod_base = OTHER; note = 2'-O-methyladenosine-3'-phosphate
  modified_base 6: mod_base = OTHER; note = 2'-O-methyladenosine-3'-phosphate
  modified_base 7: mod_base = OTHER; note = 2'-deoxy-2'-fluoroguanosine-3'-phosphate
  modified_base 8: mod_base = OTHER; note = 2'-O-methyladenosine-3'-phosphate
  modified_base 9: mod_base = OTHER; note = 2'-deoxy-2'-fluorocytidine-3'-phosphate
  modified_base 10: mod_base = OTHER; note = 2'-deoxy-2'-fluoroadenosine-3'-phosphate
  modified_base 11: mod_base = OTHER; note = 2'-deoxy-2'-fluorouridine-3'-phosphate
  modified_base 12: mod_base = OTHER; note = 2'-O-methyluridine-3'-phosphate
  modified_base 13: mod_base = OTHER; note = 2'-O-methylguanosine-3'-phosphate
  modified_base 14: mod_base = OTHER; note = 2'-O-methylguanosine-3'-phosphate
  modified_base 15: mod_base = OTHER; note = 2'-O-methyluridine-3'-phosphate
  modified_base 16: mod_base = OTHER; note = 2'-O-methylguanosine-3'-phosphate
  modified_base 17: mod_base = OTHER; note = 2'-O-methyladenosine-3'-phosphate
  modified_base 18: mod_base = OTHER; note = 2'-O-methylguanosine-3'-phosphate
  modified_base 19: mod_base = OTHER; note = 2'-O-methylguanosine-3'-phosphate
  modified_base 20: mod_base = OTHER; note = 2'-O-methyladenosine-3'-phosphate
  modified_base 21: mod_base = OTHER; note = 2'-O-methyladenosine-3'-phosphate ((2S,4R)-1-[29-[[2-(acetylamino)-2-deoxy-beta-D-galactopyra nosyl]oxy]-14,14-bis[[3-[[3-[[5-[[2-(acetylamino)-2-deoxy-b eta-D-galactopyranosyl]oxy]-1-oxopentyl]amino]propyl]amino] -3-oxopropoxy]methyl]-1,12,19,25-tetraoxo-16-oxa-13,20,24-t riazanonacos-1-yl]-4-hydroxy-2-pyrrolidinyl)methyl ester
cgacaagacattggtgaggaa

SEQ ID NO: 2415 - RNA, 23 nt, synthetic construct
  source 1..23: mol_type = other RNA
  modified_base 1: mod_base = OTHER; note = 2'-O-methyluridine-3'-phosphorothioate
  modified_base 2: mod_base = OTHER; note = 2'-deoxy-2'-fluorouridine-3'-phosphorothioate
  modified_base 3: mod_base = OTHER; note = 2'-O-methylcytidine-3'-phosphate
  modified_base 4: mod_base = OTHER; note = 2'-O-methylcytidine-3'-phosphate
  modified_base 5: mod_base = OTHER; note = 2'-O-methyluridine-3'-phosphate
  modified_base 6: mod_base = OTHER; note = 2'-deoxy-2'-fluorocytidine-3'-phosphate
  modified_base 7: mod_base = OTHER; note = 2'-O-methyladenosine-3'-phosphate
  modified_base 8: mod_base = OTHER; note = 2'-deoxy-2'-fluorocytidine-3'-phosphate
  modified_base 9: mod_base = OTHER; note = 2'-deoxy-2'-fluorocytidine-3'-phosphate
  modified_base 10: mod_base = OTHER; note = 2'-O-methyladenosine-3'-phosphate
  modified_base 11: mod_base = OTHER; note = 2'-O-methyladenosine-3'-phosphate
  modified_base 12: mod_base = OTHER; note = 2'-O-methyluridine-3'-phosphate
  modified_base 13: mod_base = OTHER; note = 2'-O-methylguanosine-3'-phosphate
  modified_base 14: mod_base = OTHER; note = 2'-deoxy-2'-fluorouridine-3'-phosphate
  modified_base 15: mod_base = OTHER; note = 2'-O-methylcytidine-3'-phosphate
  modified_base 16: mod_base = OTHER; note = 2'-deoxy-2'-fluorouridine-3'-phosphate
  modified_base 17: mod_base = OTHER; note = 2'-O-methyluridine-3'-phosphate
  modified_base 18: mod_base = OTHER; note = 2'-O-methylguanosine-3'-phosphate
  modified_base 19: mod_base = OTHER; note = 2'-O-methyluridine-3'-phosphate
  modified_base 20: mod_base = OTHER; note = 2'-O-methylcytidine-3'-phosphate
  modified_base 21: mod_base = OTHER; note = 2'-O-methylguanosine-3'-phosphorothioate
  modified_base 22: mod_base = OTHER; note = 2'-O-methyladenosine-3'-phosphorothioate
  modified_base 23: mod_base = OTHER; note = 2'-O-methyluridine
ttcctcaccaatgtcttgtcgat

SEQ ID NO: 2416 - RNA, 21 nt, synthetic construct
  source 1..21: mol_type = other RNA
  modified_base 1: mod_base = OTHER; note = 2'-O-methyluridine-3'-phosphorothioate
  modified_base 2: mod_base = OTHER; note = 2'-O-methylcytidine-3'-phosphorothioate
  modified_base 3: mod_base = OTHER; note = 2'-O-methylguanosine-3'-phosphate
  modified_base 4: mod_base = OTHER; note = 2'-O-methyladenosine-3'-phosphate
  modified_base 5: mod_base = OTHER; note = 2'-O-methylcytidine-3'-phosphate
  modified_base 6: mod_base = OTHER; note = 2'-O-methyladenosine-3'-phosphate
  modified_base 7: mod_base = OTHER; note = 2'-deoxy-2'-fluoroadenosine-3'-phosphate
  modified_base 8: mod_base = OTHER; note = 2'-O-methylguanosine-3'-phosphate
  modified_base 9: mod_base = OTHER; note = 2'-deoxy-2'-fluoroadenosine-3'-phosphate
  modified_base 10: mod_base = OTHER; note = 2'-deoxy-2'-fluorocytidine-3'-phosphate
  modified_base 11: mod_base = OTHER; note = 2'-deoxy-2'-fluoroadenosine-3'-phosphate
  modified_base 12: mod_base = OTHER; note = 2'-O-methyluridine-3'-phosphate
  modified_base 13: mod_base = OTHER; note = 2'-O-methyluridine-3'-phosphate
  modified_base 14: mod_base = OTHER; note = 2'-O-methylguanosine-3'-phosphate
  modified_base 15: mod_base = OTHER; note = 2'-O-methylguanosine-3'-phosphate
  modified_base 16: mod_base = OTHER; note = 2'-O-methyluridine-3'-phosphate
  modified_base 17: mod_base = OTHER; note = 2'-O-methylguanosine-3'-phosphate
  modified_base 18: mod_base = OTHER; note = 2'-O-methyladenosine-3'-phosphate
  modified_base 19: mod_base = OTHER; note = 2'-O-methylguanosine-3'-phosphate
  modified_base 20: mod_base = OTHER; note = 2'-O-methylguanosine-3'-phosphate
  modified_base 21: mod_base = OTHER; note = 2'-O-methyladenosine-3'-phosphate ((2S,4R)-1-[29-[[2-(acetylamino)-2-deoxy-beta-D-galactopyra nosyl]oxy]-14,14-bis[[3-[[3-[[5-[[2-(acetylamino)-2-deoxy-b eta-D-galactopyranosyl]oxy]-1-oxopentyl]amino]propyl]amino] -3-oxopropoxy]methyl]-1,12,19,25-tetraoxo-16-oxa-13,20,24-t riazanonacos-1-yl]-4-hydroxy-2-pyrrolidinyl)methyl ester
tcgacaagacattggtgagga

SEQ ID NO: 2417 - RNA, 23 nt, synthetic construct
  source 1..23: mol_type = other RNA
  modified_base 1: mod_base = OTHER; note = 2'-O-methyluridine-3'-phosphorothioate
  modified_base 2: mod_base = OTHER; note = 2'-deoxy-2'-fluorocytidine-3'-phosphorothioate
  modified_base 3: mod_base = OTHER; note = 2'-O-methylcytidine-3'-phosphate
  modified_base 4: mod_base = OTHER; note = 2'-O-methyluridine-3'-phosphate
  modified_base 5: mod_base = OTHER; note = 2'-O-methylcytidine-3'-phosphate
  modified_base 6: mod_base = OTHER; note = 2'-deoxy-2'-fluoroadenosine-3'-phosphate
  modified_base 7: mod_base = OTHER; note = 2'-O-methylcytidine-3'-phosphate
  modified_base 8: mod_base = OTHER; note = 2'-deoxy-2'-fluorocytidine-3'-phosphate
  modified_base 9: mod_base = OTHER; note = 2'-deoxy-2'-fluoroadenosine-3'-phosphate
  modified_base 10: mod_base = OTHER; note = 2'-O-methyladenosine-3'-phosphate
  modified_base 11: mod_base = OTHER; note = 2'-O-methyluridine-3'-phosphate
  modified_base 12: mod_base = OTHER; note = 2'-O-methylguanosine-3'-phosphate
  modified_base 13: mod_base = OTHER; note = 2'-O-methyluridine-3'-phosphate
  modified_base 14: mod_base = OTHER; note = 2'-deoxy-2'-fluorocytidine-3'-phosphate
  modified_base 15: mod_base = OTHER; note = 2'-O-methyluridine-3'-phosphate
  modified_base 16: mod_base = OTHER; note = 2'-deoxy-2'-fluorouridine-3'-phosphate
  modified_base 17: mod_base = OTHER; note = 2'-O-methylguanosine-3'-phosphate
  modified_base 18: mod_base = OTHER; note = 2'-O-methyluridine-3'-phosphate
  modified_base 19: mod_base = OTHER; note = 2'-O-methylcytidine-3'-phosphate
  modified_base 20: mod_base = OTHER; note = 2'-O-methylguanosine-3'-phosphate
  modified_base 21: mod_base = OTHER; note = 2'-O-methyladenosine-3'-phosphorothioate
  modified_base 22: mod_base = OTHER; note = 2'-O-methyluridine-3'-phosphorothioate
  modified_base 23: mod_base = OTHER; note = 2'-O-methylguanosine
tcctcaccaatgtcttgtcgatg

SEQ ID NO: 2418 - RNA, 21 nt, synthetic construct
  source 1..21: mol_type = other RNA
  modified_base 1: mod_base = OTHER; note = 2'-O-methyladenosine-3'-phosphorothioate
  modified_base 2: mod_base = OTHER; note = 2'-O-methyladenosine-3'-phosphorothioate
  modified_base 3: mod_base = OTHER; note = 2'-O-methylguanosine-3'-phosphate
  modified_base 4: mod_base = OTHER; note = 2'-O-methyladenosine-3'-phosphate
  modified_base 5: mod_base = OTHER; note = 2'-O-methyluridine-3'-phosphate
  modified_base 6: mod_base = OTHER; note = 2'-O-methylguanosine-3'-phosphate
  modified_base 7: mod_base = OTHER; note = 2'-deoxy-2'-fluorouridine-3'-phosphate
  modified_base 8: mod_base = OTHER; note = 2'-O-methylcytidine-3'-phosphate
  modified_base 9: mod_base = OTHER; note = 2'-deoxy-2'-fluorocytidine-3'-phosphate
  modified_base 10: mod_base = OTHER; note = 2'-deoxy-2'-fluorouridine-3'-phosphate
  modified_base 11: mod_base = OTHER; note = 2'-deoxy-2'-fluorocytidine-3'-phosphate
  modified_base 12: mod_base = OTHER; note = 2'-O-methylguanosine-3'-phosphate
  modified_base 13: mod_base = OTHER; note = 2'-O-methyladenosine-3'-phosphate
  modified_base 14: mod_base = OTHER; note = 2'-O-methylguanosine-3'-phosphate
  modified_base 15: mod_base = OTHER; note = 2'-O-methyladenosine-3'-phosphate
  modified_base 16: mod_base = OTHER; note = 2'-O-methyluridine-3'-phosphate
  modified_base 17: mod_base = OTHER; note = 2'-O-methyladenosine-3'-phosphate
  modified_base 18: mod_base = OTHER; note = 2'-O-methylcytidine-3'-phosphate
  modified_base 19: mod_base = OTHER; note = 2'-O-methyluridine-3'-phosphate
  modified_base 20: mod_base = OTHER; note = 2'-O-methyladenosine-3'-phosphate
  modified_base 21: mod_base = OTHER; note = 2'-O-methyladenosine-3'-phosphate ((2S,4R)-1-[29-[[2-(acetylamino)-2-deoxy-beta-D-galactopyra nosyl]oxy]-14,14-bis[[3-[[3-[[5-[[2-(acetylamino)-2-deoxy-b eta-D-galactopyranosyl]oxy]-1-oxopentyl]amino]propyl]amino] -3-oxopropoxy]methyl]-1,12,19,25-tetraoxo-16-oxa-13,20,24-t riazanonacos-1-yl]-4-hydroxy-2-pyrrolidinyl)methyl ester
aagatgtcctcgagatactaa

SEQ ID NO: 2419 - RNA, 23 nt, synthetic construct
  source 1..23: mol_type = other RNA
  modified_base 1: mod_base = OTHER; note = 2'-O-methyluridine-3'-phosphorothioate
  modified_base 2: mod_base = OTHER; note = 2'-deoxy-2'-fluorouridine-3'-phosphorothioate
  modified_base 3: mod_base = OTHER; note = 2'-O-methyladenosine-3'-phosphate
  modified_base 4: mod_base = OTHER; note = 2'-O-methylguanosine-3'-phosphate
  modified_base 5: mod_base = OTHER; note = 2'-O-methyluridine-3'-phosphate
  modified_base 6: mod_base = OTHER; note = 2'-deoxy-2'-fluoroadenosine-3'-phosphate
  modified_base 7: mod_base = OTHER; note = 2'-O-methyluridine-3'-phosphate
  modified_base 8: mod_base = OTHER; note = 2'-deoxy-2'-fluorocytidine-3'-phosphate
  modified_base 9: mod_base = OTHER; note = 2'-deoxy-2'-fluorouridine-3'-phosphate
  modified_base 10: mod_base = OTHER; note = 2'-O-methylcytidine-3'-phosphate
  modified_base 11: mod_base = OTHER; note = 2'-O-methylguanosine-3'-phosphate
  modified_base 12: mod_base = OTHER; note = 2'-O-methyladenosine-3'-phosphate
  modified_base 13: mod_base = OTHER; note = 2'-O-methylguanosine-3'-phosphate
  modified_base 14: mod_base = OTHER; note = 2'-deoxy-2'-fluoroguanosine-3'-phosphate
  modified_base 15: mod_base = OTHER; note = 2'-O-methyladenosine-3'-phosphate
  modified_base 16: mod_base = OTHER; note = 2'-deoxy-2'-fluorocytidine-3'-phosphate
  modified_base 17: mod_base = OTHER; note = 2'-O-methyladenosine-3'-phosphate
  modified_base 18: mod_base = OTHER; note = 2'-O-methyluridine-3'-phosphate
  modified_base 19: mod_base = OTHER; note = 2'-O-methylcytidine-3'-phosphate
  modified_base 20: mod_base = OTHER; note = 2'-O-methyluridine-3'-phosphate
  modified_base 21: mod_base = OTHER; note = 2'-O-methyluridine-3'-phosphorothioate
  modified_base 22: mod_base = OTHER; note = 2'-O-methylguanosine-3'-phosphorothioate
  modified_base 23: mod_base = OTHER; note = 2'-O-methyladenosine
ttagtatctcgaggacatcttga

SEQ ID NO: 2420 - RNA, 21 nt, synthetic construct
  source 1..21: mol_type = other RNA
  modified_base 1: mod_base = OTHER; note = 2'-O-methyladenosine-3'-phosphorothioate
  modified_base 2: mod_base = OTHER; note = 2'-O-methylguanosine-3'-phosphorothioate
  modified_base 3: mod_base = OTHER; note = 2'-O-methyladenosine-3'-phosphate
  modified_base 4: mod_base = OTHER; note = 2'-O-methyluridine-3'-phosphate
  modified_base 5: mod_base = OTHER; note = 2'-O-methylguanosine-3'-phosphate
  modified_base 6: mod_base = OTHER; note = 2'-O-methyluridine-3'-phosphate
  modified_base 7: mod_base = OTHER; note = 2'-deoxy-2'-fluorocytidine-3'-phosphate
  modified_base 8: mod_base = OTHER; note = 2'-O-methylcytidine-3'-phosphate
  modified_base 9: mod_base = OTHER; note = 2'-deoxy-2'-fluorouridine-3'-phosphate
  modified_base 10: mod_base = OTHER; note = 2'-deoxy-2'-fluorocytidine-3'-phosphate
  modified_base 11: mod_base = OTHER; note = 2'-deoxy-2'-fluoroguanosine-3'-phosphate
  modified_base 12: mod_base = OTHER; note = 2'-O-methyladenosine-3'-phosphate
  modified_base 13: mod_base = OTHER; note = 2'-O-methylguanosine-3'-phosphate
  modified_base 14: mod_base = OTHER; note = 2'-O-methyladenosine-3'-phosphate
  modified_base 15: mod_base = OTHER; note = 2'-O-methyluridine-3'-phosphate
  modified_base 16: mod_base = OTHER; note = 2'-O-methyladenosine-3'-phosphate
  modified_base 17: mod_base = OTHER; note = 2'-O-methylcytidine-3'-phosphate
  modified_base 18: mod_base = OTHER; note = 2'-O-methyluridine-3'-phosphate
  modified_base 19: mod_base = OTHER; note = 2'-O-methyladenosine-3'-phosphate
  modified_base 20: mod_base = OTHER; note = 2'-O-methyladenosine-3'-phosphate
  modified_base 21: mod_base = OTHER; note = 2'-O-methyladenosine-3'-phosphate ((2S,4R)-1-[29-[[2-(acetylamino)-2-deoxy-beta-D-galactopyra nosyl]oxy]-14,14-bis[[3-[[3-[[5-[[2-(acetylamino)-2-deoxy-b eta-D-galactopyranosyl]oxy]-1-oxopentyl]amino]propyl]amino] -3-oxopropoxy]methyl]-1,12,19,25-tetraoxo-16-oxa-13,20,24-t riazanonacos-1-yl]-4-hydroxy-2-pyrrolidinyl)methyl ester
agatgtcctcgagatactaaa

SEQ ID NO: 2421 - RNA, 23 nt, synthetic construct
  source 1..23: mol_type = other RNA
  modified_base 1: mod_base = OTHER; note = 2'-O-methyluridine-3'-phosphorothioate
  modified_base 2: mod_base = OTHER; note = 2'-deoxy-2'-fluorouridine-3'-phosphorothioate
  modified_base 3: mod_base = OTHER; note = 2'-O-methyluridine-3'-phosphate
  modified_base 4: mod_base = OTHER; note = 2'-O-methyladenosine-3'-phosphate
  modified_base 5: mod_base = OTHER; note = 2'-O-methylguanosine-3'-phosphate
  modified_base 6: mod_base = OTHER; note = 2'-deoxy-2'-fluorouridine-3'-phosphate
  modified_base 7: mod_base = OTHER; note = 2'-O-methyladenosine-3'-phosphate
  modified_base 8: mod_base = OTHER; note = 2'-deoxy-2'-fluorouridine-3'-phosphate
  modified_base 9: mod_base = OTHER; note = 2'-deoxy-2'-fluorocytidine-3'-phosphate
  modified_base 10: mod_base = OTHER; note = 2'-O-methyluridine-3'-phosphate
  modified_base 11: mod_base = OTHER; note = 2'-O-methylcytidine-3'-phosphate
  modified_base 12: mod_base = OTHER; note = 2'-O-methylguanosine-3'-phosphate
  modified_base 13: mod_base = OTHER; note = 2'-O-methyladenosine-3'-phosphate
  modified_base 14: mod_base = OTHER; note = 2'-deoxy-2'-fluoroguanosine-3'-phosphate
  modified_base 15: mod_base = OTHER; note = 2'-O-methylguanosine-3'-phosphate
  modified_base 16: mod_base = OTHER; note = 2'-deoxy-2'-fluoroadenosine-3'-phosphate
  modified_base 17: mod_base = OTHER; note = 2'-O-methylcytidine-3'-phosphate
  modified_base 18: mod_base = OTHER; note = 2'-O-methyladenosine-3'-phosphate
  modified_base 19: mod_base = OTHER; note = 2'-O-methyluridine-3'-phosphate
  modified_base 20: mod_base = OTHER; note = 2'-O-methylcytidine-3'-phosphate
  modified_base 21: mod_base = OTHER; note = 2'-O-methyluridine-3'-phosphorothioate
  modified_base 22: mod_base = OTHER; note = 2'-O-methyluridine-3'-phosphorothioate
  modified_base 23: mod_base = OTHER; note = 2'-O-methylguanosine
tttagtatctcgaggacatcttg

SEQ ID NO: 2422 - RNA, 21 nt, synthetic construct
  source 1..21: mol_type = other RNA
  modified_base 1: mod_base = OTHER; note = 2'-O-methylguanosine-3'-phosphorothioate
  modified_base 2: mod_base = OTHER; note = 2'-O-methyluridine-3'-phosphorothioate
  modified_base 3: mod_base = OTHER; note = 2'-O-methyluridine-3'-phosphate
  modified_base 4: mod_base = OTHER; note = 2'-O-methylcytidine-3'-phosphate
  modified_base 5: mod_base = OTHER; note = 2'-O-methyladenosine-3'-phosphate
  modified_base 6: mod_base = OTHER; note = 2'-O-methyladenosine-3'-phosphate
  modified_base 7: mod_base = OTHER; note = 2'-deoxy-2'-fluoroguanosine-3'-phosphate
  modified_base 8: mod_base = OTHER; note = 2'-O-methyladenosine-3'-phosphate
  modified_base 9: mod_base = OTHER; note = 2'-deoxy-2'-fluorouridine-3'-phosphate
  modified_base 10: mod_base = OTHER; note = 2'-deoxy-2'-fluoroguanosine-3'-phosphate
  modified_base 11: mod_base = OTHER; note = 2'-deoxy-2'-fluorouridine-3'-phosphate
  modified_base 12: mod_base = OTHER; note = 2'-O-methylcytidine-3'-phosphate
  modified_base 13: mod_base = OTHER; note = 2'-O-methylcytidine-3'-phosphate
  modified_base 14: mod_base = OTHER; note = 2'-O-methyluridine-3'-phosphate
  modified_base 15: mod_base = OTHER; note = 2'-O-methylcytidine-3'-phosphate
  modified_base 16: mod_base = OTHER; note = 2'-O-methylguanosine-3'-phosphate
  modified_base 17: mod_base = OTHER; note = 2'-O-methyladenosine-3'-phosphate
  modified_base 18: mod_base = OTHER; note = 2'-O-methylguanosine-3'-phosphate
  modified_base 19: mod_base = OTHER; note = 2'-O-methyladenosine-3'-phosphate
  modified_base 20: mod_base = OTHER; note = 2'-O-methyluridine-3'-phosphate
  modified_base 21: mod_base = OTHER; note = 2'-O-methyladenosine-3'-phosphate ((2S,4R)-1-[29-[[2-(acetylamino)-2-deoxy-beta-D-galactopyra nosyl]oxy]-14,14-bis[[3-[[3-[[5-[[2-(acetylamino)-2-deoxy-b eta-D-galactopyranosyl]oxy]-1-oxopentyl]amino]propyl]amino] -3-oxopropoxy]methyl]-1,12,19,25-tetraoxo-16-oxa-13,20,24-t riazanonacos-1-yl]-4-hydroxy-2-pyrrolidinyl)methyl ester
gttcaagatgtcctcgagata

SEQ ID NO: 2423 - RNA, 23 nt, synthetic construct
  source 1..23: mol_type = other RNA
  modified_base 1: mod_base = OTHER; note = 2'-O-methyluridine-3'-phosphorothioate
  modified_base 2: mod_base = OTHER; note = 2'-deoxy-2'-fluoroadenosine-3'-phosphorothioate
  modified_base 3: mod_base = OTHER; note = 2'-O-methyluridine-3'-phosphate
  modified_base 4: mod_base = OTHER; note = 2'-O-methylcytidine-3'-phosphate
  modified_base 5: mod_base = OTHER; note = 2'-O-methyluridine-3'-phosphate
  modified_base 6: mod_base = OTHER; note = 2'-deoxy-2'-fluorocytidine-3'-phosphate
  modified_base 7: mod_base = OTHER; note = 2'-O-methylguanosine-3'-phosphate
  modified_base 8: mod_base = OTHER; note = 2'-deoxy-2'-fluoroadenosine-3'-phosphate
  modified_base 9: mod_base = OTHER; note = 2'-deoxy-2'-fluoroguanosine-3'-phosphate
  modified_base 10: mod_base = OTHER; note = 2'-O-methylguanosine-3'-phosphate
  modified_base 11: mod_base = OTHER; note = 2'-O-methyladenosine-3'-phosphate
  modified_base 12: mod_base = OTHER; note = 2'-O-methylcytidine-3'-phosphate
  modified_base 13: mod_base = OTHER; note = 2'-O-methyladenosine-3'-phosphate
  modified_base 14: mod_base = OTHER; note = 2'-deoxy-2'-fluorouridine-3'-phosphate
  modified_base 15: mod_base = OTHER; note = 2'-O-methylcytidine-3'-phosphate
  modified_base 16: mod_base = OTHER; note = 2'-deoxy-2'-fluorouridine-3'-phosphate
  modified_base 17: mod_base = OTHER; note = 2'-O-methyluridine-3'-phosphate
  modified_base 18: mod_base = OTHER; note = 2'-O-methylguanosine-3'-phosphate
  modified_base 19: mod_base = OTHER; note = 2'-O-methyladenosine-3'-phosphate
  modified_base 20: mod_base = OTHER; note = 2'-O-methyladenosine-3'-phosphate
  modified_base 21: mod_base = OTHER; note = 2'-O-methylcytidine-3'-phosphorothioate
  modified_base 22: mod_base = OTHER; note = 2'-O-methyladenosine-3'-phosphorothioate
  modified_base 23: mod_base = OTHER; note = 2'-O-methylcytidine
tatctcgaggacatcttgaacac

SEQ ID NO: 2424 - RNA, 21 nt, synthetic construct
  source 1..21: mol_type = other RNA
  modified_base 1: mod_base = OTHER; note = 2'-O-methyluridine-3'-phosphorothioate
  modified_base 2: mod_base = OTHER; note = 2'-O-methylguanosine-3'-phosphorothioate
  modified_base 3: mod_base = OTHER; note = 2'-O-methyluridine-3'-phosphate
  modified_base 4: mod_base = OTHER; note = 2'-O-methyluridine-3'-phosphate
  modified_base 5: mod_base = OTHER; note = 2'-O-methylcytidine-3'-phosphate
  modified_base 6: mod_base = OTHER; note = 2'-O-methyladenosine-3'-phosphate
  modified_base 7: mod_base = OTHER; note = 2'-deoxy-2'-fluoroadenosine-3'-phosphate
  modified_base 8: mod_base = OTHER; note = 2'-O-methylguanosine-3'-phosphate
  modified_base 9: mod_base = OTHER; note = 2'-deoxy-2'-fluoroadenosine-3'-phosphate
  modified_base 10: mod_base = OTHER; note = 2'-deoxy-2'-fluorouridine-3'-phosphate
  modified_base 11: mod_base = OTHER; note = 2'-deoxy-2'-fluoroguanosine-3'-phosphate
  modified_base 12: mod_base = OTHER; note = 2'-O-methyluridine-3'-phosphate
  modified_base 13: mod_base = OTHER; note = 2'-O-methylcytidine-3'-phosphate
  modified_base 14: mod_base = OTHER; note = 2'-O-methylcytidine-3'-phosphate
  modified_base 15: mod_base = OTHER; note = 2'-O-methyluridine-3'-phosphate
  modified_base 16: mod_base = OTHER; note = 2'-O-methylcytidine-3'-phosphate
  modified_base 17: mod_base = OTHER; note = 2'-O-methylguanosine-3'-phosphate
  modified_base 18: mod_base = OTHER; note = 2'-O-methyladenosine-3'-phosphate
  modified_base 19: mod_base = OTHER; note = 2'-O-methylguanosine-3'-phosphate
  modified_base 20: mod_base = OTHER; note = 2'-O-methyladenosine-3'-phosphate
  modified_base 21: mod_base = OTHER; note = 2'-O-methyluridine-3'-phosphate ((2S,4R)-1-[29-[[2-(acetylamino)-2-deoxy-beta-D-galactopyra nosyl]oxy]-14,14-bis[[3-[[3-[[5-[[2-(acetylamino)-2-deoxy-b eta-D-galactopyranosyl]oxy]-1-oxopentyl]amino]propyl]amino] -3-oxopropoxy]methyl]-1,12,19,25-tetraoxo-16-oxa-13,20,24-t riazanonacos-1-yl]-4-hydroxy-2-pyrrolidinyl)methyl ester
tgttcaagatgtcctcgagat

SEQ ID NO: 2425 - RNA, 23 nt, synthetic construct
  source 1..23: mol_type = other RNA
  modified_base 1: mod_base = OTHER; note = 2'-O-methyladenosine-3'-phosphorothioate
  modified_base 2: mod_base = OTHER; note = 2'-deoxy-2'-fluorouridine-3'-phosphorothioate
  modified_base 3: mod_base = OTHER; note = 2'-O-methylcytidine-3'-phosphate
  modified_base 4: mod_base = OTHER; note = 2'-O-methyluridine-3'-phosphate
  modified_base 5: mod_base = OTHER; note = 2'-O-methylcytidine-3'-phosphate
  modified_base 6: mod_base = OTHER; note = 2'-deoxy-2'-fluoroguanosine-3'-phosphate
  modified_base 7: mod_base = OTHER; note = 2'-O-methyladenosine-3'-phosphate
  modified_base 8: mod_base = OTHER; note = 2'-deoxy-2'-fluoroguanosine-3'-phosphate
  modified_base 9: mod_base = OTHER; note = 2'-deoxy-2'-fluoroguanosine-3'-phosphate
  modified_base 10: mod_base = OTHER; note = 2'-O-methyladenosine-3'-phosphate
  modified_base 11: mod_base = OTHER; note = 2'-O-methylcytidine-3'-phosphate
  modified_base 12: mod_base = OTHER; note = 2'-O-methyladenosine-3'-phosphate
  modified_base 13: mod_base = OTHER; note = 2'-O-methyluridine-3'-phosphate
  modified_base 14: mod_base = OTHER; note = 2'-deoxy-2'-fluorocytidine-3'-phosphate
  modified_base 15: mod_base = OTHER; note = 2'-O-methyluridine-3'-phosphate
  modified_base 16: mod_base = OTHER; note = 2'-deoxy-2'-fluorouridine-3'-phosphate
  modified_base 17: mod_base = OTHER; note = 2'-O-methylguanosine-3'-phosphate
  modified_base 18: mod_base = OTHER; note = 2'-O-methyladenosine-3'-phosphate
  modified_base 19: mod_base = OTHER; note = 2'-O-methyladenosine-3'-phosphate
  modified_base 20: mod_base = OTHER; note = 2'-O-methylcytidine-3'-phosphate
  modified_base 21: mod_base = OTHER; note = 2'-O-methyladenosine-3'-phosphorothioate
  modified_base 22: mod_base = OTHER; note = 2'-O-methylcytidine-3'-phosphorothioate
  modified_base 23: mod_base = OTHER; note = 2'-O-methylcytidine
atctcgaggacatcttgaacacc

SEQ ID NO: 2426 - RNA, 21 nt, synthetic construct
  source 1..21: mol_type = other RNA
  modified_base 1: mod_base = OTHER; note = 2'-O-methylguanosine-3'-phosphorothioate
  modified_base 2: mod_base = OTHER; note = 2'-O-methyladenosine-3'-phosphorothioate
  modified_base 3: mod_base = OTHER; note = 2'-O-methylguanosine-3'-phosphate
  modified_base 4: mod_base = OTHER; note = 2'-O-methyladenosine-3'-phosphate
  modified_base 5: mod_base = OTHER; note = 2'-O-methyladenosine-3'-phosphate
  modified_base 6: mod_base = OTHER; note = 2'-O-methyladenosine-3'-phosphate
  modified_base 7: mod_base = OTHER; note = 2'-deoxy-2'-fluoroguanosine-3'-phosphate
  modified_base 8: mod_base = OTHER; note = 2'-O-methylguanosine-3'-phosphate
  modified_base 9: mod_base = OTHER; note = 2'-deoxy-2'-fluorouridine-3'-phosphate
  modified_base 10: mod_base = OTHER; note = 2'-deoxy-2'-fluoroguanosine-3'-phosphate
  modified_base 11: mod_base = OTHER; note = 2'-deoxy-2'-fluorouridine-3'-phosphate
  modified_base 12: mod_base = OTHER; note = 2'-O-methyluridine-3'-phosphate
  modified_base 13: mod_base = OTHER; note = 2'-O-methylcytidine-3'-phosphate
  modified_base 14: mod_base = OTHER; note = 2'-O-methyladenosine-3'-phosphate
  modified_base 15: mod_base = OTHER; note = 2'-O-methyladenosine-3'-phosphate
  modified_base 16: mod_base = OTHER; note = 2'-O-methylguanosine-3'-phosphate
  modified_base 17: mod_base = OTHER; note = 2'-O-methyladenosine-3'-phosphate
  modified_base 18: mod_base = OTHER; note = 2'-O-methyluridine-3'-phosphate
  modified_base 19: mod_base = OTHER; note = 2'-O-methylguanosine-3'-phosphate
  modified_base 20: mod_base = OTHER; note = 2'-O-methyluridine-3'-phosphate
  modified_base 21: mod_base = OTHER; note = 2'-O-methylcytidine-3'-phosphate ((2S,4R)-1-[29-[[2-(acetylamino)-2-deoxy-beta-D-galactopyra nosyl]oxy]-14,14-bis[[3-[[3-[[5-[[2-(acetylamino)-2-deoxy-b eta-D-galactopyranosyl]oxy]-1-oxopentyl]amino]propyl]amino] -3-oxopropoxy]methyl]-1,12,19,25-tetraoxo-16-oxa-13,20,24-t riazanonacos-1-yl]-4-hydroxy-2-pyrrolidinyl)methyl ester
gagaaaggtgttcaagatgtc

SEQ ID NO: 2427 - RNA, 23 nt, synthetic construct
  source 1..23: mol_type = other RNA
  modified_base 1: mod_base = OTHER; note = 2'-O-methylguanosine-3'-phosphorothioate
  modified_base 2: mod_base = OTHER; note = 2'-deoxy-2'-fluoroadenosine-3'-phosphorothioate
  modified_base 3: mod_base = OTHER; note = 2'-O-methylcytidine-3'-phosphate
  modified_base 4: mod_base = OTHER; note = 2'-O-methyladenosine-3'-phosphate
  modified_base 5: mod_base = OTHER; note = 2'-O-methyluridine-3'-phosphate
  modified_base 6: mod_base = OTHER; note = 2'-deoxy-2'-fluorocytidine-3'-phosphate
  modified_base 7: mod_base = OTHER; note = 2'-O-methyluridine-3'-phosphate
  modified_base 8: mod_base = OTHER; note = 2'-deoxy-2'-fluorouridine-3'-phosphate
  modified_base 9: mod_base = OTHER; note = 2'-deoxy-2'-fluoroguanosine-3'-phosphate
  modified_base 10: mod_base = OTHER; note = 2'-O-methyladenosine-3'-phosphate
  modified_base 11: mod_base = OTHER; note = 2'-O-methyladenosine-3'-phosphate
  modified_base 12: mod_base = OTHER; note = 2'-O-methylcytidine-3'-phosphate
  modified_base 13: mod_base = OTHER; note = 2'-O-methyladenosine-3'-phosphate
  modified_base 14: mod_base = OTHER; note = 2'-deoxy-2'-fluorocytidine-3'-phosphate
  modified_base 15: mod_base = OTHER; note = 2'-O-methylcytidine-3'-phosphate
  modified_base 16: mod_base = OTHER; note = 2'-deoxy-2'-fluorouridine-3'-phosphate
  modified_base 17: mod_base = OTHER; note = 2'-O-methyluridine-3'-phosphate
  modified_base 18: mod_base = OTHER; note = 2'-O-methyluridine-3'-phosphate
  modified_base 19: mod_base = OTHER; note = 2'-O-methylcytidine-3'-phosphate
  modified_base 20: mod_base = OTHER; note = 2'-O-methyluridine-3'-phosphate
  modified_base 21: mod_base = OTHER; note = 2'-O-methylcytidine-3'-phosphorothioate
  modified_base 22: mod_base = OTHER; note = 2'-O-methylcytidine-3'-phosphorothioate
  modified_base 23: mod_base = OTHER; note = 2'-O-methylcytidine
gacatcttgaacacctttctccc

SEQ ID NO: 2428 - RNA, 21 nt, synthetic construct
  source 1..21: mol_type = other RNA
  modified_base 1: mod_base = OTHER; note = 2'-O-methyladenosine-3'-phosphorothioate
  modified_base 2: mod_base = OTHER; note = 2'-O-methylguanosine-3'-phosphorothioate
  modified_base 3: mod_base = OTHER; note = 2'-O-methyladenosine-3'-phosphate
  modified_base 4: mod_base = OTHER; note = 2'-O-methyladenosine-3'-phosphate
  modified_base 5: mod_base = OTHER; note = 2'-O-methyladenosine-3'-phosphate
  modified_base 6: mod_base = OTHER; note = 2'-O-methylguanosine-3'-phosphate
  modified_base 7: mod_base = OTHER; note = 2'-deoxy-2'-fluoroguanosine-3'-phosphate
  modified_base 8: mod_base = OTHER; note = 2'-O-methyluridine-3'-phosphate
  modified_base 9: mod_base = OTHER; note = 2'-deoxy-2'-fluoroguanosine-3'-phosphate
  modified_base 10: mod_base = OTHER; note = 2'-deoxy-2'-fluorouridine-3'-phosphate
  modified_base 11: mod_base = OTHER; note = 2'-deoxy-2'-fluorouridine-3'-phosphate
  modified_base 12: mod_base = OTHER; note = 2'-O-methylcytidine-3'-phosphate
  modified_base 13: mod_base = OTHER; note = 2'-O-methyladenosine-3'-phosphate
  modified_base 14: mod_base = OTHER; note = 2'-O-methyladenosine-3'-phosphate
  modified_base 15: mod_base = OTHER; note = 2'-O-methylguanosine-3'-phosphate
  modified_base 16: mod_base = OTHER; note = 2'-O-methyladenosine-3'-phosphate
  modified_base 17: mod_base = OTHER; note = 2'-O-methyluridine-3'-phosphate
  modified_base 18: mod_base = OTHER; note = 2'-O-methylguanosine-3'-phosphate
  modified_base 19: mod_base = OTHER; note = 2'-O-methyluridine-3'-phosphate
  modified_base 20: mod_base = OTHER; note = 2'-O-methylcytidine-3'-phosphate
  modified_base 21: mod_base = OTHER; note = 2'-O-methylcytidine-3'-phosphate ((2S,4R)-1-[29-[[2-(acetylamino)-2-deoxy-beta-D-galactopyra nosyl]oxy]-14,14-bis[[3-[[3-[[5-[[2-(acetylamino)-2-deoxy-b eta-D-galactopyranosyl]oxy]-1-oxopentyl]amino]propyl]amino] -3-oxopropoxy]methyl]-1,12,19,25-tetraoxo-16-oxa-13,20,24-t riazanonacos-1-yl]-4-hydroxy-2-pyrrolidinyl)methyl ester
agaaaggtgttcaagatgtcc

SEQ ID NO: 2429 - RNA, 23 nt, synthetic construct
  source 1..23: mol_type = other RNA
  modified_base 1: mod_base = OTHER; note = 2'-O-methylguanosine-3'-phosphorothioate
  modified_base 2: mod_base = OTHER; note = 2'-deoxy-2'-fluoroguanosine-3'-phosphorothioate
  modified_base 3: mod_base = OTHER; note = 2'-O-methyladenosine-3'-phosphate
  modified_base 4: mod_base = OTHER; note = 2'-O-methylcytidine-3'-phosphate
  modified_base 5: mod_base = OTHER; note = 2'-O-methyladenosine-3'-phosphate
  modified_base 6: mod_base = OTHER; note = 2'-deoxy-2'-fluorouridine-3'-phosphate
  modified_base 7: mod_base = OTHER; note = 2'-O-methylcytidine-3'-phosphate
  modified_base 8: mod_base = OTHER; note = 2'-deoxy-2'-fluorouridine-3'-phosphate
  modified_base 9: mod_base = OTHER; note = 2'-deoxy-2'-fluorouridine-3'-phosphate
  modified_base 10: mod_base = OTHER; note = 2'-O-methylguanosine-3'-phosphate
  modified_base 11: mod_base = OTHER; note = 2'-O-methyladenosine-3'-phosphate
  modified_base 12: mod_base = OTHER; note = 2'-O-methyladenosine-3'-phosphate
  modified_base 13: mod_base = OTHER; note = 2'-O-methylcytidine-3'-phosphate
  modified_base 14: mod_base = OTHER; note = 2'-deoxy-2'-fluoroadenosine-3'-phosphate
  modified_base 15: mod_base = OTHER; note = 2'-O-methylcytidine-3'-phosphate
  modified_base 16: mod_base = OTHER; note = 2'-deoxy-2'-fluorocytidine-3'-phosphate
  modified_base 17: mod_base = OTHER; note = 2'-O-methyluridine-3'-phosphate
  modified_base 18: mod_base = OTHER; note = 2'-O-methyluridine-3'-phosphate
  modified_base 19: mod_base = OTHER; note = 2'-O-methyluridine-3'-phosphate
  modified_base 20: mod_base = OTHER; note = 2'-O-methylcytidine-3'-phosphate
  modified_base 21: mod_base = OTHER; note = 2'-O-methyluridine-3'-phosphorothioate
  modified_base 22: mod_base = OTHER; note = 2'-O-methylcytidine-3'-phosphorothioate
  modified_base 23: mod_base = OTHER; note = 2'-O-methylcytidine
ggacatcttgaacacctttctcc

SEQ ID NO: 2430 - RNA, 21 nt, synthetic construct
  source 1..21: mol_type = other RNA
  modified_base 1: mod_base = OTHER; note = 2'-O-methylguanosine-3'-phosphorothioate
  modified_base 2: mod_base = OTHER; note = 2'-O-methylguanosine-3'-phosphorothioate
  modified_base 3: mod_base = OTHER; note = 2'-O-methylguanosine-3'-phosphate
  modified_base 4: mod_base = OTHER; note = 2'-O-methylguanosine-3'-phosphate
  modified_base 5: mod_base = OTHER; note = 2'-O-methylguanosine-3'-phosphate
  modified_base 6: mod_base = OTHER; note = 2'-O-methyladenosine-3'-phosphate
  modified_base 7: mod_base = OTHER; note = 2'-deoxy-2'-fluoroguanosine-3'-phosphate
  modified_base 8: mod_base = OTHER; note = 2'-O-methyladenosine-3'-phosphate
  modified_base 9: mod_base = OTHER; note = 2'-deoxy-2'-fluoroadenosine-3'-phosphate
  modified_base 10: mod_base = OTHER; note = 2'-deoxy-2'-fluoroadenosine-3'-phosphate
  modified_base 11: mod_base = OTHER; note = 2'-deoxy-2'-fluoroguanosine-3'-phosphate
  modified_base 12: mod_base = OTHER; note = 2'-O-methylguanosine-3'-phosphate
  modified_base 13: mod_base = OTHER; note = 2'-O-methyluridine-3'-phosphate
  modified_base 14: mod_base = OTHER; note = 2'-O-methylguanosine-3'-phosphate
  modified_base 15: mod_base = OTHER; note = 2'-O-methyluridine-3'-phosphate
  modified_base 16: mod_base = OTHER; note = 2'-O-methyluridine-3'-phosphate
  modified_base 17: mod_base = OTHER; note = 2'-O-methylcytidine-3'-phosphate
  modified_base 18: mod_base = OTHER; note = 2'-O-methyladenosine-3'-phosphate
  modified_base 19: mod_base = OTHER; note = 2'-O-methyladenosine-3'-phosphate
  modified_base 20: mod_base = OTHER; note = 2'-O-methylguanosine-3'-phosphate
  modified_base 21: mod_base = OTHER; note = 2'-O-methyladenosine-3'-phosphate ((2S,4R)-1-[29-[[2-(acetylamino)-2-deoxy-beta-D-galactopyra nosyl]oxy]-14,14-bis[[3-[[3-[[5-[[2-(acetylamino)-2-deoxy-b eta-D-galactopyranosyl]oxy]-1-oxopentyl]amino]propyl]amino] -3-oxopropoxy]methyl]-1,12,19,25-tetraoxo-16-oxa-13,20,24-t riazanonacos-1-yl]-4-hydroxy-2-pyrrolidinyl)methyl ester
gggggagaaaggtgttcaaga

SEQ ID NO: 2431 - RNA, 23 nt, synthetic construct
  source 1..23: mol_type = other RNA
  modified_base 1: mod_base = OTHER; note = 2'-O-methyluridine-3'-phosphorothioate
  modified_base 2: mod_base = OTHER; note = 2'-deoxy-2'-fluorocytidine-3'-phosphorothioate
  modified_base 3: mod_base = OTHER; note = 2'-O-methyluridine-3'-phosphate
  modified_base 4: mod_base = OTHER; note = 2'-O-methyluridine-3'-phosphate
  modified_base 5: mod_base = OTHER; note = 2'-O-methylguanosine-3'-phosphate
  modified_base 6: mod_base = OTHER; note = 2'-deoxy-2'-fluoroadenosine-3'-phosphate
  modified_base 7: mod_base = OTHER; note = 2'-O-methyladenosine-3'-phosphate
  modified_base 8: mod_base = OTHER; note = 2'-deoxy-2'-fluorocytidine-3'-phosphate
  modified_base 9: mod_base = OTHER; note = 2'-deoxy-2'-fluoroadenosine-3'-phosphate
  modified_base 10: mod_base = OTHER; note = 2'-O-methylcytidine-3'-phosphate
  modified_base 11: mod_base = OTHER; note = 2'-O-methylcytidine-3'-phosphate
  modified_base 12: mod_base = OTHER; note = 2'-O-methyluridine-3'-phosphate
  modified_base 13: mod_base = OTHER; note = 2'-O-methyluridine-3'-phosphate
  modified_base 14: mod_base = OTHER; note = 2'-deoxy-2'-fluorouridine-3'-phosphate
  modified_base 15: mod_base = OTHER; note = 2'-O-methylcytidine-3'-phosphate
  modified_base 16: mod_base = OTHER; note = 2'-deoxy-2'-fluorouridine-3'-phosphate
  modified_base 17: mod_base = OTHER; note = 2'-O-methylcytidine-3'-phosphate
  modified_base 18: mod_base = OTHER; note = 2'-O-methylcytidine-3'-phosphate
  modified_base 19: mod_base = OTHER; note = 2'-O-methylcytidine-3'-phosphate
  modified_base 20: mod_base = OTHER; note = 2'-O-methylcytidine-3'-phosphate
  modified_base 21: mod_base = OTHER; note = 2'-O-methylcytidine-3'-phosphorothioate
  modified_base 22: mod_base = OTHER; note = 2'-O-methyluridine-3'-phosphorothioate
  modified_base 23: mod_base = OTHER; note = 2'-O-methylguanosine
tcttgaacacctttctccccctg

SEQ ID NO: 2432 - RNA, 21 nt, synthetic construct
  source 1..21: mol_type = other RNA
  modified_base 1: mod_base = OTHER; note = 2'-O-methyladenosine-3'-phosphorothioate
  modified_base 2: mod_base = OTHER; note = 2'-O-methylguanosine-3'-phosphorothioate
  modified_base 3: mod_base = OTHER; note = 2'-O-methylguanosine-3'-phosphate
  modified_base 4: mod_base = OTHER; note = 2'-O-methylguanosine-3'-phosphate
  modified_base 5: mod_base = OTHER; note = 2'-O-methylguanosine-3'-phosphate
  modified_base 6: mod_base = OTHER; note = 2'-O-methylguanosine-3'-phosphate
  modified_base 7: mod_base = OTHER; note = 2'-deoxy-2'-fluoroadenosine-3'-phosphate
  modified_base 8: mod_base = OTHER; note = 2'-O-methylguanosine-3'-phosphate
  modified_base 9: mod_base = OTHER; note = 2'-deoxy-2'-fluoroadenosine-3'-phosphate
  modified_base 10: mod_base = OTHER; note = 2'-deoxy-2'-fluoroadenosine-3'-phosphate
  modified_base 11: mod_base = OTHER; note = 2'-deoxy-2'-fluoroadenosine-3'-phosphate
  modified_base 12: mod_base = OTHER; note = 2'-O-methylguanosine-3'-phosphate
  modified_base 13: mod_base = OTHER; note = 2'-O-methylguanosine-3'-phosphate
  modified_base 14: mod_base = OTHER; note = 2'-O-methyluridine-3'-phosphate
  modified_base 15: mod_base = OTHER; note = 2'-O-methylguanosine-3'-phosphate
  modified_base 16: mod_base = OTHER; note = 2'-O-methyluridine-3'-phosphate
  modified_base 17: mod_base = OTHER; note = 2'-O-methyluridine-3'-phosphate
  modified_base 18: mod_base = OTHER; note = 2'-O-methylcytidine-3'-phosphate
  modified_base 19: mod_base = OTHER; note = 2'-O-methyladenosine-3'-phosphate
  modified_base 20: mod_base = OTHER; note = 2'-O-methyladenosine-3'-phosphate
  modified_base 21: mod_base = OTHER; note = 2'-O-methylguanosine-3'-phosphate ((2S,4R)-1-[29-[[2-(acetylamino)-2-deoxy-beta-D-galactopyra nosyl]oxy]-14,14-bis[[3-[[3-[[5-[[2-(acetylamino)-2-deoxy-b eta-D-galactopyranosyl]oxy]-1-oxopentyl]amino]propyl]amino] -3-oxopropoxy]methyl]-1,12,19,25-tetraoxo-16-oxa-13,20,24-t riazanonacos-1-yl]-4-hydroxy-2-pyrrolidinyl)methyl ester
agggggagaaaggtgttcaag

SEQ ID NO: 2433 - RNA, 23 nt, synthetic construct
  source 1..23: mol_type = other RNA
  modified_base 1: mod_base = OTHER; note = 2'-O-methylcytidine-3'-phosphorothioate
  modified_base 2: mod_base = OTHER; note = 2'-deoxy-2'-fluorouridine-3'-phosphorothioate
  modified_base 3: mod_base = OTHER; note = 2'-O-methyluridine-3'-phosphate
  modified_base 4: mod_base = OTHER; note = 2'-O-methylguanosine-3'-phosphate
  modified_base 5: mod_base = OTHER; note = 2'-O-methyladenosine-3'-phosphate
  modified_base 6: mod_base = OTHER; note = 2'-deoxy-2'-fluoroadenosine-3'-phosphate
  modified_base 7: mod_base = OTHER; note = 2'-O-methylcytidine-3'-phosphate
  modified_base 8: mod_base = OTHER; note = 2'-deoxy-2'-fluoroadenosine-3'-phosphate
  modified_base 9: mod_base = OTHER; note = 2'-deoxy-2'-fluorocytidine-3'-phosphate
  modified_base 10: mod_base = OTHER; note = 2'-O-methylcytidine-3'-phosphate
  modified_base 11: mod_base = OTHER; note = 2'-O-methyluridine-3'-phosphate
  modified_base 12: mod_base = OTHER; note = 2'-O-methyluridine-3'-phosphate
  modified_base 13: mod_base = OTHER; note = 2'-O-methyluridine-3'-phosphate
  modified_base 14: mod_base = OTHER; note = 2'-deoxy-2'-fluorocytidine-3'-phosphate
  modified_base 15: mod_base = OTHER; note = 2'-O-methyluridine-3'-phosphate
  modified_base 16: mod_base = OTHER; note = 2'-deoxy-2'-fluorocytidine-3'-phosphate
  modified_base 17: mod_base = OTHER; note = 2'-O-methylcytidine-3'-phosphate
  modified_base 18: mod_base = OTHER; note = 2'-O-methylcytidine-3'-phosphate
  modified_base 19: mod_base = OTHER; note = 2'-O-methylcytidine-3'-phosphate
  modified_base 20: mod_base = OTHER; note = 2'-O-methylcytidine-3'-phosphate
  modified_base 21: mod_base = OTHER; note = 2'-O-methyluridine-3'-phosphorothioate
  modified_base 22: mod_base = OTHER; note = 2'-O-methylguanosine-3'-phosphorothioate
  modified_base 23: mod_base = OTHER; note = 2'-O-methylguanosine
cttgaacacctttctccccctgg

SEQ ID NO: 2434 - RNA, 21 nt, synthetic construct
  source 1..21: mol_type = other RNA
  modified_base 1: mod_base = OTHER; note = 2'-O-methylguanosine-3'-phosphorothioate
  modified_base 2: mod_base = OTHER; note = 2'-O-methylcytidine-3'-phosphorothioate
  modified_base 3: mod_base = OTHER; note = 2'-O-methyluridine-3'-phosphate
  modified_base 4: mod_base = OTHER; note = 2'-O-methylguanosine-3'-phosphate
  modified_base 5: mod_base = OTHER; note = 2'-O-methylguanosine-3'-phosphate
  modified_base 6: mod_base = OTHER; note = 2'-O-methylguanosine-3'-phosphate
  modified_base 7: mod_base = OTHER; note = 2'-deoxy-2'-fluoroadenosine-3'-phosphate
  modified_base 8: mod_base = OTHER; note = 2'-O-methyladenosine-3'-phosphate
  modified_base 9: mod_base = OTHER; note = 2'-deoxy-2'-fluoroguanosine-3'-phosphate
  modified_base 10: mod_base = OTHER; note = 2'-deoxy-2'-fluoroadenosine-3'-phosphate
  modified_base 11: mod_base = OTHER; note = 2'-deoxy-2'-fluorouridine-3'-phosphate
  modified_base 12: mod_base = OTHER; note = 2'-O-methyladenosine-3'-phosphate
  modified_base 13: mod_base = OTHER; note = 2'-O-methyluridine-3'-phosphate
  modified_base 14: mod_base = OTHER; note = 2'-O-methylcytidine-3'-phosphate
  modified_base 15: mod_base = OTHER; note = 2'-O-methyladenosine-3'-phosphate
  modified_base 16: mod_base = OTHER; note = 2'-O-methyladenosine-3'-phosphate
  modified_base 17: mod_base = OTHER; note = 2'-O-methyladenosine-3'-phosphate
  modified_base 18: mod_base = OTHER; note = 2'-O-methyluridine-3'-phosphate
  modified_base 19: mod_base = OTHER; note = 2'-O-methylguanosine-3'-phosphate
  modified_base 20: mod_base = OTHER; note = 2'-O-methylguanosine-3'-phosphate
  modified_base 21: mod_base = OTHER; note = 2'-O-methylcytidine-3'-phosphate ((2S,4R)-1-[29-[[2-(acetylamino)-2-deoxy-beta-D-galactopyra nosyl]oxy]-14,14-bis[[3-[[3-[[5-[[2-(acetylamino)-2-deoxy-b eta-D-galactopyranosyl]oxy]-1-oxopentyl]amino]propyl]amino] -3-oxopropoxy]methyl]-1,12,19,25-tetraoxo-16-oxa-13,20,24-t riazanonacos-1-yl]-4-hydroxy-2-pyrrolidinyl)methyl ester
gctgggaagatatcaaatggc

SEQ ID NO: 2435 - RNA, 23 nt, synthetic construct
  source 1..23: mol_type = other RNA
  modified_base 1: mod_base = OTHER; note = 2'-O-methylguanosine-3'-phosphorothioate
  modified_base 2: mod_base = OTHER; note = 2'-deoxy-2'-fluorocytidine-3'-phosphorothioate
  modified_base 3: mod_base = OTHER; note = 2'-O-methylcytidine-3'-phosphate
  modified_base 4: mod_base = OTHER; note = 2'-O-methyladenosine-3'-phosphate
  modified_base 5: mod_base = OTHER; note = 2'-O-methyluridine-3'-phosphate
  modified_base 6: mod_base = OTHER; note = 2'-deoxy-2'-fluorouridine-3'-phosphate
  modified_base 7: mod_base = OTHER; note = 2'-O-methyluridine-3'-phosphate
  modified_base 8: mod_base = OTHER; note = 2'-deoxy-2'-fluoroguanosine-3'-phosphate
  modified_base 9: mod_base = OTHER; note = 2'-deoxy-2'-fluoroadenosine-3'-phosphate
  modified_base 10: mod_base = OTHER; note = 2'-O-methyluridine-3'-phosphate
  modified_base 11: mod_base = OTHER; note = 2'-O-methyladenosine-3'-phosphate
  modified_base 12: mod_base = OTHER; note = 2'-O-methyluridine-3'-phosphate
  modified_base 13: mod_base = OTHER; note = 2'-O-methylcytidine-3'-phosphate
  modified_base 14: mod_base = OTHER; note = 2'-deoxy-2'-fluorouridine-3'-phosphate
  modified_base 15: mod_base = OTHER; note = 2'-O-methyluridine-3'-phosphate
  modified_base 16: mod_base = OTHER; note = 2'-deoxy-2'-fluorocytidine-3'-phosphate
  modified_base 17: mod_base = OTHER; note = 2'-O-methylcytidine-3'-phosphate
  modified_base 18: mod_base = OTHER; note = 2'-O-methylcytidine-3'-phosphate
  modified_base 19: mod_base = OTHER; note = 2'-O-methyladenosine-3'-phosphate
  modified_base 20: mod_base = OTHER; note = 2'-O-methylguanosine-3'-phosphate
  modified_base 21: mod_base = OTHER; note = 2'-O-methylcytidine-3'-phosphorothioate
  modified_base 22: mod_base = OTHER; note = 2'-O-methyluridine-3'-phosphorothioate
  modified_base 23: mod_base = OTHER; note = 2'-O-methylguanosine
gccatttgatatcttcccagctg

SEQ ID NO: 2436 - RNA, 21 nt, synthetic construct
  source 1..21: mol_type = other RNA
  modified_base 1: mod_base = OTHER; note = 2'-O-methylcytidine-3'-phosphorothioate
  modified_base 2: mod_base = OTHER; note = 2'-O-methyluridine-3'-phosphorothioate
  modified_base 3: mod_base = OTHER; note = 2'-O-methylguanosine-3'-phosphate
  modified_base 4: mod_base = OTHER; note = 2'-O-methylguanosine-3'-phosphate
  modified_base 5: mod_base = OTHER; note = 2'-O-methylguanosine-3'-phosphate
  modified_base 6: mod_base = OTHER; note = 2'-O-methyladenosine-3'-phosphate
  modified_base 7: mod_base = OTHER; note = 2'-deoxy-2'-fluoroadenosine-3'-phosphate
  modified_base 8: mod_base = OTHER; note = 2'-O-methylguanosine-3'-phosphate
  modified_base 9: mod_base = OTHER; note = 2'-deoxy-2'-fluoroadenosine-3'-phosphate
  modified_base 10: mod_base = OTHER; note = 2'-deoxy-2'-fluorouridine-3'-phosphate
  modified_base 11: mod_base = OTHER; note = 2'-deoxy-2'-fluoroadenosine-3'-phosphate
  modified_base 12: mod_base = OTHER; note = 2'-O-methyluridine-3'-phosphate
  modified_base 13: mod_base = OTHER; note = 2'-O-methylcytidine-3'-phosphate
  modified_base 14: mod_base = OTHER; note = 2'-O-methyladenosine-3'-phosphate
  modified_base 15: mod_base = OTHER; note = 2'-O-methyladenosine-3'-phosphate
  modified_base 16: mod_base = OTHER; note = 2'-O-methyladenosine-3'-phosphate
  modified_base 17: mod_base = OTHER; note = 2'-O-methyluridine-3'-phosphate
  modified_base 18: mod_base = OTHER; note = 2'-O-methylguanosine-3'-phosphate
  modified_base 19: mod_base = OTHER; note = 2'-O-methylguanosine-3'-phosphate
  modified_base 20: mod_base = OTHER; note = 2'-O-methylcytidine-3'-phosphate
  modified_base 21: mod_base = OTHER; note = 2'-O-methyluridine-3'-phosphate ((2S,4R)-1-[29-[[2-(acetylamino)-2-deoxy-beta-D-galactopyra nosyl]oxy]-14,14-bis[[3-[[3-[[5-[[2-(acetylamino)-2-deoxy-b eta-D-galactopyranosyl]oxy]-1-oxopentyl]amino]propyl]amino] -3-oxopropoxy]methyl]-1,12,19,25-tetraoxo-16-oxa-13,20,24-t riazanonacos-1-yl]-4-hydroxy-2-pyrrolidinyl)methyl ester
ctgggaagatatcaaatggct

SEQ ID NO: 2437 - RNA, 23 nt, synthetic construct
  source 1..23: mol_type = other RNA
  modified_base 1: mod_base = OTHER; note = 2'-O-methyladenosine-3'-phosphorothioate
  modified_base 2: mod_base = OTHER; note = 2'-deoxy-2'-fluoroguanosine-3'-phosphorothioate
  modified_base 3: mod_base = OTHER; note = 2'-O-methylcytidine-3'-phosphate
  modified_base 4: mod_base = OTHER; note = 2'-O-methylcytidine-3'-phosphate
  modified_base 5: mod_base = OTHER; note = 2'-O-methyladenosine-3'-phosphate
  modified_base 6: mod_base = OTHER; note = 2'-deoxy-2'-fluorouridine-3'-phosphate
  modified_base 7: mod_base = OTHER; note = 2'-O-methyluridine-3'-phosphate
  modified_base 8: mod_base = OTHER; note = 2'-deoxy-2'-fluorouridine-3'-phosphate
  modified_base 9: mod_base = OTHER; note = 2'-deoxy-2'-fluoroguanosine-3'-phosphate
  modified_base 10: mod_base = OTHER; note = 2'-O-methyladenosine-3'-phosphate
  modified_base 11: mod_base = OTHER; note = 2'-O-methyluridine-3'-phosphate
  modified_base 12: mod_base = OTHER; note = 2'-O-methyladenosine-3'-phosphate
  modified_base 13: mod_base = OTHER; note = 2'-O-methyluridine-3'-phosphate
  modified_base 14: mod_base = OTHER; note = 2'-deoxy-2'-fluorocytidine-3'-phosphate
  modified_base 15: mod_base = OTHER; note = 2'-O-methyluridine-3'-phosphate
  modified_base 16: mod_base = OTHER; note = 2'-deoxy-2'-fluorouridine-3'-phosphate
  modified_base 17: mod_base = OTHER; note = 2'-O-methylcytidine-3'-phosphate
  modified_base 18: mod_base = OTHER; note = 2'-O-methylcytidine-3'-phosphate
  modified_base 19: mod_base = OTHER; note = 2'-O-methylcytidine-3'-phosphate
  modified_base 20: mod_base = OTHER; note = 2'-O-methyladenosine-3'-phosphate
  modified_base 21: mod_base = OTHER; note = 2'-O-methylguanosine-3'-phosphorothioate
  modified_base 22: mod_base = OTHER; note = 2'-O-methylcytidine-3'-phosphorothioate
  modified_base 23: mod_base = OTHER; note = 2'-O-methyluridine
agccatttgatatcttcccagct

SEQ ID NO: 2438 - RNA, 21 nt, synthetic construct
  source 1..21: mol_type = other RNA
  modified_base 1: mod_base = OTHER; note = 2'-O-methyladenosine-3'-phosphorothioate
  modified_base 2: mod_base = OTHER; note = 2'-O-methyluridine-3'-phosphorothioate
  modified_base 3: mod_base = OTHER; note = 2'-O-methylcytidine-3'-phosphate
  modified_base 4: mod_base = OTHER; note = 2'-O-methyladenosine-3'-phosphate
  modified_base 5: mod_base = OTHER; note = 2'-O-methylguanosine-3'-phosphate
  modified_base 6: mod_base = OTHER; note = 2'-O-methylcytidine-3'-phosphate
  modified_base 7: mod_base = OTHER; note = 2'-deoxy-2'-fluorouridine-3'-phosphate
  modified_base 8: mod_base = OTHER; note = 2'-O-methylguanosine-3'-phosphate
  modified_base 9: mod_base = OTHER; note = 2'-deoxy-2'-fluoroguanosine-3'-phosphate
  modified_base 10: mod_base = OTHER; note = 2'-deoxy-2'-fluoroguanosine-3'-phosphate
  modified_base 11: mod_base = OTHER; note = 2'-deoxy-2'-fluoroadenosine-3'-phosphate
  modified_base 12: mod_base = OTHER; note = 2'-O-methyladenosine-3'-phosphate
  modified_base 13: mod_base = OTHER; note = 2'-O-methylguanosine-3'-phosphate
  modified_base 14: mod_base = OTHER; note = 2'-O-methyladenosine-3'-phosphate
  modified_base 15: mod_base = OTHER; note = 2'-O-methyluridine-3'-phosphate
  modified_base 16: mod_base = OTHER; note = 2'-O-methyladenosine-3'-phosphate
  modified_base 17: mod_base = OTHER; note = 2'-O-methyluridine-3'-phosphate
  modified_base 18: mod_base = OTHER; note = 2'-O-methylcytidine-3'-phosphate
  modified_base 19: mod_base = OTHER; note = 2'-O-methyladenosine-3'-phosphate
  modified_base 20: mod_base = OTHER; note = 2'-O-methyladenosine-3'-phosphate
  modified_base 21: mod_base = OTHER; note = 2'-O-methyladenosine-3'-phosphate ((2S,4R)-1-[29-[[2-(acetylamino)-2-deoxy-beta-D-galactopyra nosyl]oxy]-14,14-bis[[3-[[3-[[5-[[2-(acetylamino)-2-deoxy-b eta-D-galactopyranosyl]oxy]-1-oxopentyl]amino]propyl]amino] -3-oxopropoxy]methyl]-1,12,19,25-tetraoxo-16-oxa-13,20,24-t riazanonacos-1-yl]-4-hydroxy-2-pyrrolidinyl)methyl ester
atcagctgggaagatatcaaa

SEQ ID NO: 2439 - RNA, 23 nt, synthetic construct
  source 1..23: mol_type = other RNA
  modified_base 1: mod_base = OTHER; note = 2'-O-methyluridine-3'-phosphorothioate
  modified_base 2: mod_base = OTHER; note = 2'-deoxy-2'-fluorouridine-3'-phosphorothioate
  modified_base 3: mod_base = OTHER; note = 2'-O-methyluridine-3'-phosphate
  modified_base 4: mod_base = OTHER; note = 2'-O-methylguanosine-3'-phosphate
  modified_base 5: mod_base = OTHER; note = 2'-O-methyladenosine-3'-phosphate
  modified_base 6: mod_base = OTHER; note = 2'-deoxy-2'-fluorouridine-3'-phosphate
  modified_base 7: mod_base = OTHER; note = 2'-O-methyladenosine-3'-phosphate
  modified_base 8: mod_base = OTHER; note = 2'-deoxy-2'-fluorouridine-3'-phosphate
  modified_base 9: mod_base = OTHER; note = 2'-deoxy-2'-fluorocytidine-3'-phosphate
  modified_base 10: mod_base = OTHER; note = 2'-O-methyluridine-3'-phosphate
  modified_base 11: mod_base = OTHER; note = 2'-O-methyluridine-3'-phosphate
  modified_base 12: mod_base = OTHER; note = 2'-O-methylcytidine-3'-phosphate
  modified_base 13: mod_base = OTHER; note = 2'-O-methylcytidine-3'-phosphate
  modified_base 14: mod_base = OTHER; note = 2'-deoxy-2'-fluorocytidine-3'-phosphate
  modified_base 15: mod_base = OTHER; note = 2'-O-methyladenosine-3'-phosphate
  modified_base 16: mod_base = OTHER; note = 2'-deoxy-2'-fluoroguanosine-3'-phosphate
  modified_base 17: mod_base = OTHER; note = 2'-O-methylcytidine-3'-phosphate
  modified_base 18: mod_base = OTHER; note = 2'-O-methyluridine-3'-phosphate
  modified_base 19: mod_base = OTHER; note = 2'-O-methylguanosine-3'-phosphate
  modified_base 20: mod_base = OTHER; note = 2'-O-methyladenosine-3'-phosphate
  modified_base 21: mod_base = OTHER; note = 2'-O-methyluridine-3'-phosphorothioate
  modified_base 22: mod_base = OTHER; note = 2'-O-methyladenosine-3'-phosphorothioate
  modified_base 23: mod_base = OTHER; note = 2'-O-methylguanosine
tttgatatcttcccagctgatag

SEQ ID NO: 2440 - RNA, 21 nt, synthetic construct
  source 1..21: mol_type = other RNA
  modified_base 1: mod_base = OTHER; note = 2'-O-methyluridine-3'-phosphorothioate
  modified_base 2: mod_base = OTHER; note = 2'-O-methyladenosine-3'-phosphorothioate
  modified_base 3: mod_base = OTHER; note = 2'-O-methyluridine-3'-phosphate
  modified_base 4: mod_base = OTHER; note = 2'-O-methylcytidine-3'-phosphate
  modified_base 5: mod_base = OTHER; note = 2'-O-methyladenosine-3'-phosphate
  modified_base 6: mod_base = OTHER; note = 2'-O-methylguanosine-3'-phosphate
  modified_base 7: mod_base = OTHER; note = 2'-deoxy-2'-fluorocytidine-3'-phosphate
  modified_base 8: mod_base = OTHER; note = 2'-O-methyluridine-3'-phosphate
  modified_base 9: mod_base = OTHER; note = 2'-deoxy-2'-fluoroguanosine-3'-phosphate
  modified_base 10: mod_base = OTHER; note = 2'-deoxy-2'-fluoroguanosine-3'-phosphate
  modified_base 11: mod_base = OTHER; note = 2'-deoxy-2'-fluoroguanosine-3'-phosphate
  modified_base 12: mod_base = OTHER; note = 2'-O-methyladenosine-3'-phosphate
  modified_base 13: mod_base = OTHER; note = 2'-O-methyladenosine-3'-phosphate
  modified_base 14: mod_base = OTHER; note = 2'-O-methylguanosine-3'-phosphate
  modified_base 15: mod_base = OTHER; note = 2'-O-methyladenosine-3'-phosphate
  modified_base 16: mod_base = OTHER; note = 2'-O-methyluridine-3'-phosphate
  modified_base 17: mod_base = OTHER; note = 2'-O-methyladenosine-3'-phosphate
  modified_base 18: mod_base = OTHER; note = 2'-O-methyluridine-3'-phosphate
  modified_base 19: mod_base = OTHER; note = 2'-O-methylcytidine-3'-phosphate
  modified_base 20: mod_base = OTHER; note = 2'-O-methyladenosine-3'-phosphate
  modified_base 21: mod_base = OTHER; note = 2'-O-methyladenosine-3'-phosphate ((2S,4R)-1-[29-[[2-(acetylamino)-2-deoxy-beta-D-galactopyra nosyl]oxy]-14,14-bis[[3-[[3-[[5-[[2-(acetylamino)-2-deoxy-b eta-D-galactopyranosyl]oxy]-1-oxopentyl]amino]propyl]amino] -3-oxopropoxy]methyl]-1,12,19,25-tetraoxo-16-oxa-13,20,24-t riazanonacos-1-yl]-4-hydroxy-2-pyrrolidinyl)methyl ester
tatcagctgggaagatatcaa

SEQ ID NO: 2441 - RNA, 23 nt, synthetic construct
  source 1..23: mol_type = other RNA
  modified_base 1: mod_base = OTHER; note = 2'-O-methyluridine-3'-phosphorothioate
  modified_base 2: mod_base = OTHER; note = 2'-deoxy-2'-fluorouridine-3'-phosphorothioate
  modified_base 3: mod_base = OTHER; note = 2'-O-methylguanosine-3'-phosphate
  modified_base 4: mod_base = OTHER; note = 2'-O-methyladenosine-3'-phosphate
  modified_base 5: mod_base = OTHER; note = 2'-O-methyluridine-3'-phosphate
  modified_base 6: mod_base = OTHER; note = 2'-deoxy-2'-fluoroadenosine-3'-phosphate
  modified_base 7: mod_base = OTHER; note = 2'-O-methyluridine-3'-phosphate
  modified_base 8: mod_base = OTHER; note = 2'-deoxy-2'-fluorocytidine-3'-phosphate
  modified_base 9: mod_base = OTHER; note = 2'-deoxy-2'-fluorouridine-3'-phosphate
  modified_base 10: mod_base = OTHER; note = 2'-O-methyluridine-3'-phosphate
  modified_base 11: mod_base = OTHER; note = 2'-O-methylcytidine-3'-phosphate
  modified_base 12: mod_base = OTHER; note = 2'-O-methylcytidine-3'-phosphate
  modified_base 13: mod_base = OTHER; note = 2'-O-methylcytidine-3'-phosphate
  modified_base 14: mod_base = OTHER; note = 2'-deoxy-2'-fluoroadenosine-3'-phosphate
  modified_base 15: mod_base = OTHER; note = 2'-O-methylguanosine-3'-phosphate
  modified_base 16: mod_base = OTHER; note = 2'-deoxy-2'-fluorocytidine-3'-phosphate
  modified_base 17: mod_base = OTHER; note = 2'-O-methyluridine-3'-phosphate
  modified_base 18: mod_base = OTHER; note = 2'-O-methylguanosine-3'-phosphate
  modified_base 19: mod_base = OTHER; note = 2'-O-methyladenosine-3'-phosphate
  modified_base 20: mod_base = OTHER; note = 2'-O-methyluridine-3'-phosphate
  modified_base 21: mod_base = OTHER; note = 2'-O-methyladenosine-3'-phosphorothioate
  modified_base 22: mod_base = OTHER; note = 2'-O-methylguanosine-3'-phosphorothioate
  modified_base 23: mod_base = OTHER; note = 2'-O-methyladenosine
ttgatatcttcccagctgataga

SEQ ID NO: 2442 - RNA, 21 nt, synthetic construct
  source 1..21: mol_type = other RNA
  modified_base 1: mod_base = OTHER; note = 2'-O-methyluridine-3'-phosphorothioate
  modified_base 2: mod_base = OTHER; note = 2'-O-methylcytidine-3'-phosphorothioate
  modified_base 3: mod_base = OTHER; note = 2'-O-methyluridine-3'-phosphate
  modified_base 4: mod_base = OTHER; note = 2'-O-methylguanosine-3'-phosphate
  modified_base 5: mod_base = OTHER; note = 2'-O-methyluridine-3'-phosphate
  modified_base 6: mod_base = OTHER; note = 2'-O-methylcytidine-3'-phosphate
  modified_base 7: mod_base = OTHER; note = 2'-deoxy-2'-fluoroguanosine-3'-phosphate
  modified_base 8: mod_base = OTHER; note = 2'-O-methyladenosine-3'-phosphate
  modified_base 9: mod_base = OTHER; note = 2'-deoxy-2'-fluorocytidine-3'-phosphate
  modified_base 10: mod_base = OTHER; note = 2'-deoxy-2'-fluorouridine-3'-phosphate
  modified_base 11: mod_base = OTHER; note = 2'-deoxy-2'-fluorouridine-3'-phosphate
  modified_base 12: mod_base = OTHER; note = 2'-O-methylcytidine-3'-phosphate
  modified_base 13: mod_base = OTHER; note = 2'-O-methyluridine-3'-phosphate
  modified_base 14: mod_base = OTHER; note = 2'-O-methylguanosine-3'-phosphate
  modified_base 15: mod_base = OTHER; note = 2'-O-methyluridine-3'-phosphate
  modified_base 16: mod_base = OTHER; note = 2'-O-methyluridine-3'-phosphate
  modified_base 17: mod_base = OTHER; note = 2'-O-methyluridine-3'-phosphate
  modified_base 18: mod_base = OTHER; note = 2'-O-methyluridine-3'-phosphate
  modified_base 19: mod_base = OTHER; note = 2'-O-methyladenosine-3'-phosphate
  modified_base 20: mod_base = OTHER; note = 2'-O-methylguanosine-3'-phosphate
  modified_base 21: mod_base = OTHER; note = 2'-O-methylguanosine-3'-phosphate ((2S,4R)-1-[29-[[2-(acetylamino)-2-deoxy-beta-D-galactopyra nosyl]oxy]-14,14-bis[[3-[[3-[[5-[[2-(acetylamino)-2-deoxy-b eta-D-galactopyranosyl]oxy]-1-oxopentyl]amino]propyl]amino] -3-oxopropoxy]methyl]-1,12,19,25-tetraoxo-16-oxa-13,20,24-t riazanonacos-1-yl]-4-hydroxy-2-pyrrolidinyl)methyl ester
tctgtcgacttctgttttagg

SEQ ID NO: 2443 - RNA, 23 nt, synthetic construct
  source 1..23: mol_type = other RNA
  modified_base 1: mod_base = OTHER; note = 2'-O-methylcytidine-3'-phosphorothioate
  modified_base 2: mod_base = OTHER; note = 2'-deoxy-2'-fluorocytidine-3'-phosphorothioate
  modified_base 3: mod_base = OTHER; note = 2'-O-methyluridine-3'-phosphate
  modified_base 4: mod_base = OTHER; note = 2'-O-methyladenosine-3'-phosphate
  modified_base 5: mod_base = OTHER; note = 2'-O-methyladenosine-3'-phosphate
  modified_base 6: mod_base = OTHER; note = 2'-deoxy-2'-fluoroadenosine-3'-phosphate
  modified_base 7: mod_base = OTHER; note = 2'-O-methyladenosine-3'-phosphate
  modified_base 8: mod_base = OTHER; note = 2'-deoxy-2'-fluorocytidine-3'-phosphate
  modified_base 9: mod_base = OTHER; note = 2'-deoxy-2'-fluoroadenosine-3'-phosphate
  modified_base 10: mod_base = OTHER; note = 2'-O-methylguanosine-3'-phosphate
  modified_base 11: mod_base = OTHER; note = 2'-O-methyladenosine-3'-phosphate
  modified_base 12: mod_base = OTHER; note = 2'-O-methyladenosine-3'-phosphate
  modified_base 13: mod_base = OTHER; note = 2'-O-methylguanosine-3'-phosphate
  modified_base 14: mod_base = OTHER; note = 2'-deoxy-2'-fluorouridine-3'-phosphate
  modified_base 15: mod_base = OTHER; note = 2'-O-methylcytidine-3'-phosphate
  modified_base 16: mod_base = OTHER; note = 2'-deoxy-2'-fluoroguanosine-3'-phosphate
  modified_base 17: mod_base = OTHER; note = 2'-O-methyladenosine-3'-phosphate
  modified_base 18: mod_base = OTHER; note = 2'-O-methylcytidine-3'-phosphate
  modified_base 19: mod_base = OTHER; note = 2'-O-methyladenosine-3'-phosphate
  modified_base 20: mod_base = OTHER; note = 2'-O-methylguanosine-3'-phosphate
  modified_base 21: mod_base = OTHER; note = 2'-O-methyladenosine-3'-phosphorothioate
  modified_base 22: mod_base = OTHER; note = 2'-O-methyluridine-3'-phosphorothioate
  modified_base 23: mod_base = OTHER; note = 2'-O-methylcytidine
cctaaaacagaagtcgacagatc

SEQ ID NO: 2444 - RNA, 21 nt, synthetic construct
  source 1..21: mol_type = other RNA
  modified_base 1: mod_base = OTHER; note = 2'-O-methylcytidine-3'-phosphorothioate
  modified_base 2: mod_base = OTHER; note = 2'-O-methyluridine-3'-phosphorothioate
  modified_base 3: mod_base = OTHER; note = 2'-O-methylguanosine-3'-phosphate
  modified_base 4: mod_base = OTHER; note = 2'-O-methyluridine-3'-phosphate
  modified_base 5: mod_base = OTHER; note = 2'-O-methylcytidine-3'-phosphate
  modified_base 6: mod_base = OTHER; note = 2'-O-methylguanosine-3'-phosphate
  modified_base 7: mod_base = OTHER; note = 2'-deoxy-2'-fluoroadenosine-3'-phosphate
  modified_base 8: mod_base = OTHER; note = 2'-O-methylcytidine-3'-phosphate
  modified_base 9: mod_base = OTHER; note = 2'-deoxy-2'-fluorouridine-3'-phosphate
  modified_base 10: mod_base = OTHER; note = 2'-deoxy-2'-fluorouridine-3'-phosphate
  modified_base 11: mod_base = OTHER; note = 2'-deoxy-2'-fluorocytidine-3'-phosphate
  modified_base 12: mod_base = OTHER; note = 2'-O-methyluridine-3'-phosphate
  modified_base 13: mod_base = OTHER; note = 2'-O-methylguanosine-3'-phosphate
  modified_base 14: mod_base = OTHER; note = 2'-O-methyluridine-3'-phosphate
  modified_base 15: mod_base = OTHER; note = 2'-O-methyluridine-3'-phosphate
  modified_base 16: mod_base = OTHER; note = 2'-O-methyluridine-3'-phosphate
  modified_base 17: mod_base = OTHER; note = 2'-O-methyluridine-3'-phosphate
  modified_base 18: mod_base = OTHER; note = 2'-O-methyladenosine-3'-phosphate
  modified_base 19: mod_base = OTHER; note = 2'-O-methylguanosine-3'-phosphate
  modified_base 20: mod_base = OTHER; note = 2'-O-methylguanosine-3'-phosphate
  modified_base 21: mod_base = OTHER; note = 2'-O-methyladenosine-3'-phosphate ((2S,4R)-1-[29-[[2-(acetylamino)-2-deoxy-beta-D-galactopyra nosyl]oxy]-14,14-bis[[3-[[3-[[5-[[2-(acetylamino)-2-deoxy-b eta-D-galactopyranosyl]oxy]-1-oxopentyl]amino]propyl]amino] -3-oxopropoxy]methyl]-1,12,19,25-tetraoxo-16-oxa-13,20,24-t riazanonacos-1-yl]-4-hydroxy-2-pyrrolidinyl)methyl ester
ctgtcgacttctgttttagga

SEQ ID NO: 2445 - RNA, 23 nt, synthetic construct
  source 1..23: mol_type = other RNA
  modified_base 1: mod_base = OTHER; note = 2'-O-methyluridine-3'-phosphorothioate
  modified_base 2: mod_base = OTHER; note = 2'-deoxy-2'-fluorocytidine-3'-phosphorothioate
  modified_base 3: mod_base = OTHER; note = 2'-O-methylcytidine-3'-phosphate
  modified_base 4: mod_base = OTHER; note = 2'-O-methyluridine-3'-phosphate
  modified_base 5: mod_base = OTHER; note = 2'-O-methyladenosine-3'-phosphate
  modified_base 6: mod_base = OTHER; note = 2'-deoxy-2'-fluoroadenosine-3'-phosphate
  modified_base 7: mod_base = OTHER; note = 2'-O-methyladenosine-3'-phosphate
  modified_base 8: mod_base = OTHER; note = 2'-deoxy-2'-fluoroadenosine-3'-phosphate
  modified_base 9: mod_base = OTHER; note = 2'-deoxy-2'-fluorocytidine-3'-phosphate
  modified_base 10: mod_base = OTHER; note = 2'-O-methyladenosine-3'-phosphate
  modified_base 11: mod_base = OTHER; note = 2'-O-methylguanosine-3'-phosphate
  modified_base 12: mod_base = OTHER; note = 2'-O-methyladenosine-3'-phosphate
  modified_base 13: mod_base = OTHER; note = 2'-O-methyladenosine-3'-phosphate
  modified_base 14: mod_base = OTHER; note = 2'-deoxy-2'-fluoroguanosine-3'-phosphate
  modified_base 15: mod_base = OTHER; note = 2'-O-methyluridine-3'-phosphate
  modified_base 16: mod_base = OTHER; note = 2'-deoxy-2'-fluorocytidine-3'-phosphate
  modified_base 17: mod_base = OTHER; note = 2'-O-methylguanosine-3'-phosphate
  modified_base 18: mod_base = OTHER; note = 2'-O-methyladenosine-3'-phosphate
  modified_base 19: mod_base = OTHER; note = 2'-O-methylcytidine-3'-phosphate
  modified_base 20: mod_base = OTHER; note = 2'-O-methyladenosine-3'-phosphate
  modified_base 21: mod_base = OTHER; note = 2'-O-methylguanosine-3'-phosphorothioate
  modified_base 22: mod_base = OTHER; note = 2'-O-methyladenosine-3'-phosphorothioate
  modified_base 23: mod_base = OTHER; note = 2'-O-methyluridine
tcctaaaacagaagtcgacagat

SEQ ID NO: 2446 - RNA, 21 nt, synthetic construct
  source 1..21: mol_type = other RNA
  modified_base 1: mod_base = OTHER; note = 2'-O-methylcytidine-3'-phosphorothioate
  modified_base 2: mod_base = OTHER; note = 2'-O-methyladenosine-3'-phosphorothioate
  modified_base 3: mod_base = OTHER; note = 2'-O-methylguanosine-3'-phosphate
  modified_base 4: mod_base = OTHER; note = 2'-O-methyladenosine-3'-phosphate
  modified_base 5: mod_base = OTHER; note = 2'-O-methyluridine-3'-phosphate
  modified_base 6: mod_base = OTHER; note = 2'-O-methylcytidine-3'-phosphate
  modified_base 7: mod_base = OTHER; note = 2'-deoxy-2'-fluorouridine-3'-phosphate
  modified_base 8: mod_base = OTHER; note = 2'-O-methylguanosine-3'-phosphate
  modified_base 9: mod_base = OTHER; note = 2'-deoxy-2'-fluorouridine-3'-phosphate
  modified_base 10: mod_base = OTHER; note = 2'-deoxy-2'-fluorocytidine-3'-phosphate
  modified_base 11: mod_base = OTHER; note = 2'-deoxy-2'-fluoroguanosine-3'-phosphate
  modified_base 12: mod_base = OTHER; note = 2'-O-methyladenosine-3'-phosphate
  modified_base 13: mod_base = OTHER; note = 2'-O-methylcytidine-3'-phosphate
  modified_base 14: mod_base = OTHER; note = 2'-O-methyluridine-3'-phosphate
  modified_base 15: mod_base = OTHER; note = 2'-O-methyluridine-3'-phosphate
  modified_base 16: mod_base = OTHER; note = 2'-O-methylcytidine-3'-phosphate
  modified_base 17: mod_base = OTHER; note = 2'-O-methyluridine-3'-phosphate
  modified_base 18: mod_base = OTHER; note = 2'-O-methylguanosine-3'-phosphate
  modified_base 19: mod_base = OTHER; note = 2'-O-methyluridine-3'-phosphate
  modified_base 20: mod_base = OTHER; note = 2'-O-methyluridine-3'-phosphate
  modified_base 21: mod_base = OTHER; note = 2'-O-methyluridine-3'-phosphate ((2S,4R)-1-[29-[[2-(acetylamino)-2-deoxy-beta-D-galactopyra nosyl]oxy]-14,14-bis[[3-[[3-[[5-[[2-(acetylamino)-2-deoxy-b eta-D-galactopyranosyl]oxy]-1-oxopentyl]amino]propyl]amino] -3-oxopropoxy]methyl]-1,12,19,25-tetraoxo-16-oxa-13,20,24-t riazanonacos-1-yl]-4-hydroxy-2-pyrrolidinyl)methyl ester
cagatctgtcgacttctgttt

SEQ ID NO: 2447 - RNA, 23 nt, synthetic construct
  source 1..23: mol_type = other RNA
  modified_base 1: mod_base = OTHER; note = 2'-O-methyladenosine-3'-phosphorothioate
  modified_base 2: mod_base = OTHER; note = 2'-deoxy-2'-fluoroadenosine-3'-phosphorothioate
  modified_base 3: mod_base = OTHER; note = 2'-O-methyladenosine-3'-phosphate
  modified_base 4: mod_base = OTHER; note = 2'-O-methylcytidine-3'-phosphate
  modified_base 5: mod_base = OTHER; note = 2'-O-methyladenosine-3'-phosphate
  modified_base 6: mod_base = OTHER; note = 2'-deoxy-2'-fluoroguanosine-3'-phosphate
  modified_base 7: mod_base = OTHER; note = 2'-O-methyladenosine-3'-phosphate
  modified_base 8: mod_base = OTHER; note = 2'-deoxy-2'-fluoroadenosine-3'-phosphate
  modified_base 9: mod_base = OTHER; note = 2'-deoxy-2'-fluoroguanosine-3'-phosphate
  modified_base 10: mod_base = OTHER; note = 2'-O-methyluridine-3'-phosphate
  modified_base 11: mod_base = OTHER; note = 2'-O-methylcytidine-3'-phosphate
  modified_base 12: mod_base = OTHER; note = 2'-O-methylguanosine-3'-phosphate
  modified_base 13: mod_base = OTHER; note = 2'-O-methyladenosine-3'-phosphate
  modified_base 14: mod_base = OTHER; note = 2'-deoxy-2'-fluorocytidine-3'-phosphate
  modified_base 15: mod_base = OTHER; note = 2'-O-methyladenosine-3'-phosphate
  modified_base 16: mod_base = OTHER; note = 2'-deoxy-2'-fluoroguanosine-3'-phosphate
  modified_base 17: mod_base = OTHER; note = 2'-O-methyladenosine-3'-phosphate
  modified_base 18: mod_base = OTHER; note = 2'-O-methyluridine-3'-phosphate
  modified_base 19: mod_base = OTHER; note = 2'-O-methylcytidine-3'-phosphate
  modified_base 20: mod_base = OTHER; note = 2'-O-methyluridine-3'-phosphate
  modified_base 21: mod_base = OTHER; note = 2'-O-methylguanosine-3'-phosphorothioate
  modified_base 22: mod_base = OTHER; note = 2'-O-methyluridine-3'-phosphorothioate
  modified_base 23: mod_base = OTHER; note = 2'-O-methyluridine
aaacagaagtcgacagatctgtt

SEQ ID NO: 2448 - RNA, 21 nt, synthetic construct
  source 1..21: mol_type = other RNA
  modified_base 1: mod_base = OTHER; note = 2'-O-methyladenosine-3'-phosphorothioate
  modified_base 2: mod_base = OTHER; note = 2'-O-methylcytidine-3'-phosphorothioate
  modified_base 3: mod_base = OTHER; note = 2'-O-methyladenosine-3'-phosphate
  modified_base 4: mod_base = OTHER; note = 2'-O-methylguanosine-3'-phosphate
  modified_base 5: mod_base = OTHER; note = 2'-O-methyladenosine-3'-phosphate
  modified_base 6: mod_base = OTHER; note = 2'-O-methyluridine-3'-phosphate
  modified_base 7: mod_base = OTHER; note = 2'-deoxy-2'-fluorocytidine-3'-phosphate
  modified_base 8: mod_base = OTHER; note = 2'-O-methyluridine-3'-phosphate
  modified_base 9: mod_base = OTHER; note = 2'-deoxy-2'-fluoroguanosine-3'-phosphate
  modified_base 10: mod_base = OTHER; note = 2'-deoxy-2'-fluorouridine-3'-phosphate
  modified_base 11: mod_base = OTHER; note = 2'-deoxy-2'-fluorocytidine-3'-phosphate
  modified_base 12: mod_base = OTHER; note = 2'-O-methylguanosine-3'-phosphate
  modified_base 13: mod_base = OTHER; note = 2'-O-methyladenosine-3'-phosphate
  modified_base 14: mod_base = OTHER; note = 2'-O-methylcytidine-3'-phosphate
  modified_base 15: mod_base = OTHER; note = 2'-O-methyluridine-3'-phosphate
  modified_base 16: mod_base = OTHER; note = 2'-O-methyluridine-3'-phosphate
  modified_base 17: mod_base = OTHER; note = 2'-O-methylcytidine-3'-phosphate
  modified_base 18: mod_base = OTHER; note = 2'-O-methyluridine-3'-phosphate
  modified_base 19: mod_base = OTHER; note = 2'-O-methylguanosine-3'-phosphate
  modified_base 20: mod_base = OTHER; note = 2'-O-methyluridine-3'-phosphate
  modified_base 21: mod_base = OTHER; note = 2'-O-methyluridine-3'-phosphate ((2S,4R)-1-[29-[[2-(acetylamino)-2-deoxy-beta-D-galactopyra nosyl]oxy]-14,14-bis[[3-[[3-[[5-[[2-(acetylamino)-2-deoxy-b eta-D-galactopyranosyl]oxy]-1-oxopentyl]amino]propyl]amino] -3-oxopropoxy]methyl]-1,12,19,25-tetraoxo-16-oxa-13,20,24-t riazanonacos-1-yl]-4-hydroxy-2-pyrrolidinyl)methyl ester
acagatctgtcgacttctgtt

SEQ ID NO: 2449 - RNA, 23 nt, synthetic construct
  source 1..23: mol_type = other RNA
  modified_base 1: mod_base = OTHER; note = 2'-O-methyladenosine-3'-phosphorothioate
  modified_base 2: mod_base = OTHER; note = 2'-deoxy-2'-fluoroadenosine-3'-phosphorothioate
  modified_base 3: mod_base = OTHER; note = 2'-O-methylcytidine-3'-phosphate
  modified_base 4: mod_base = OTHER; note = 2'-O-methyladenosine-3'-phosphate
  modified_base 5: mod_base = OTHER; note = 2'-O-methylguanosine-3'-phosphate
  modified_base 6: mod_base = OTHER; note = 2'-deoxy-2'-fluoroadenosine-3'-phosphate
  modified_base 7: mod_base = OTHER; note = 2'-O-methyladenosine-3'-phosphate
  modified_base 8: mod_base = OTHER; note = 2'-deoxy-2'-fluoroguanosine-3'-phosphate
  modified_base 9: mod_base = OTHER; note = 2'-deoxy-2'-fluorouridine-3'-phosphate
  modified_base 10: mod_base = OTHER; note = 2'-O-methylcytidine-3'-phosphate
  modified_base 11: mod_base = OTHER; note = 2'-O-methylguanosine-3'-phosphate
  modified_base 12: mod_base = OTHER; note = 2'-O-methyladenosine-3'-phosphate
  modified_base 13: mod_base = OTHER; note = 2'-O-methylcytidine-3'-phosphate
  modified_base 14: mod_base = OTHER; note = 2'-deoxy-2'-fluoroadenosine-3'-phosphate
  modified_base 15: mod_base = OTHER; note = 2'-O-methylguanosine-3'-phosphate
  modified_base 16: mod_base = OTHER; note = 2'-deoxy-2'-fluoroadenosine-3'-phosphate
  modified_base 17: mod_base = OTHER; note = 2'-O-methyluridine-3'-phosphate
  modified_base 18: mod_base = OTHER; note = 2'-O-methylcytidine-3'-phosphate
  modified_base 19: mod_base = OTHER; note = 2'-O-methyluridine-3'-phosphate
  modified_base 20: mod_base = OTHER; note = 2'-O-methylguanosine-3'-phosphate
  modified_base 21: mod_base = OTHER; note = 2'-O-methyluridine-3'-phosphorothioate
  modified_base 22: mod_base = OTHER; note = 2'-O-methyluridine-3'-phosphorothioate
  modified_base 23: mod_base = OTHER; note = 2'-O-methyluridine
aacagaagtcgacagatctgttt

SEQ ID NO: 2450 - RNA, 21 nt, synthetic construct
  source 1..21: mol_type = other RNA
  modified_base 1: mod_base = OTHER; note = 2'-O-methyluridine-3'-phosphorothioate
  modified_base 2: mod_base = OTHER; note = 2'-O-methyladenosine-3'-phosphorothioate
  modified_base 3: mod_base = OTHER; note = 2'-O-methylcytidine-3'-phosphate
  modified_base 4: mod_base = OTHER; note = 2'-O-methyluridine-3'-phosphate
  modified_base 5: mod_base = OTHER; note = 2'-O-methyluridine-3'-phosphate
  modified_base 6: mod_base = OTHER; note = 2'-O-methylcytidine-3'-phosphate
  modified_base 7: mod_base = OTHER; note = 2'-deoxy-2'-fluorouridine-3'-phosphate
  modified_base 8: mod_base = OTHER; note = 2'-O-methyluridine-3'-phosphate
  modified_base 9: mod_base = OTHER; note = 2'-deoxy-2'-fluorouridine-3'-phosphate
  modified_base 10: mod_base = OTHER; note = 2'-deoxy-2'-fluoroguanosine-3'-phosphate
  modified_base 11: mod_base = OTHER; note = 2'-deoxy-2'-fluoroadenosine-3'-phosphate
  modified_base 12: mod_base = OTHER; note = 2'-O-methyladenosine-3'-phosphate
  modified_base 13: mod_base = OTHER; note = 2'-O-methyluridine-3'-phosphate
  modified_base 14: mod_base = OTHER; note = 2'-O-methylguanosine-3'-phosphate
  modified_base 15: mod_base = OTHER; note = 2'-O-methyluridine-3'-phosphate
  modified_base 16: mod_base = OTHER; note = 2'-O-methyladenosine-3'-phosphate
  modified_base 17: mod_base = OTHER; note = 2'-O-methylguanosine-3'-phosphate
  modified_base 18: mod_base = OTHER; note = 2'-O-methyladenosine-3'-phosphate
  modified_base 19: mod_base = OTHER; note = 2'-O-methyluridine-3'-phosphate
  modified_base 20: mod_base = OTHER; note = 2'-O-methyluridine-3'-phosphate
  modified_base 21: mod_base = OTHER; note = 2'-O-methyluridine-3'-phosphate ((2S,4R)-1-[29-[[2-(acetylamino)-2-deoxy-beta-D-galactopyra nosyl]oxy]-14,14-bis[[3-[[3-[[5-[[2-(acetylamino)-2-deoxy-b eta-D-galactopyranosyl]oxy]-1-oxopentyl]amino]propyl]amino] -3-oxopropoxy]methyl]-1,12,19,25-tetraoxo-16-oxa-13,20,24-t riazanonacos-1-yl]-4-hydroxy-2-pyrrolidinyl)methyl ester
tacttctttgaatgtagattt

SEQ ID NO: 2451 - RNA, 23 nt, synthetic construct
  source 1..23: mol_type = other RNA
  modified_base 1: mod_base = OTHER; note = 2'-O-methyladenosine-3'-phosphorothioate
  modified_base 2: mod_base = OTHER; note = 2'-deoxy-2'-fluoroadenosine-3'-phosphorothioate
  modified_base 3: mod_base = OTHER; note = 2'-O-methyladenosine-3'-phosphate
  modified_base 4: mod_base = OTHER; note = 2'-O-methyluridine-3'-phosphate
  modified_base 5: mod_base = OTHER; note = 2'-O-methylcytidine-3'-phosphate
  modified_base 6: mod_base = OTHER; note = 2'-deoxy-2'-fluorouridine-3'-phosphate
  modified_base 7: mod_base = OTHER; note = 2'-O-methyladenosine-3'-phosphate
  modified_base 8: mod_base = OTHER; note = 2'-deoxy-2'-fluorocytidine-3'-phosphate
  modified_base 9: mod_base = OTHER; note = 2'-deoxy-2'-fluoroadenosine-3'-phosphate
  modified_base 10: mod_base = OTHER; note = 2'-O-methyluridine-3'-phosphate
  modified_base 11: mod_base = OTHER; note = 2'-O-methyluridine-3'-phosphate
  modified_base 12: mod_base = OTHER; note = 2'-O-methylcytidine-3'-phosphate
  modified_base 13: mod_base = OTHER; note = 2'-O-methyladenosine-3'-phosphate
  modified_base 14: mod_base = OTHER; note = 2'-deoxy-2'-fluoroadenosine-3'-phosphate
  modified_base 15: mod_base = OTHER; note = 2'-O-methyladenosine-3'-phosphate
  modified_base 16: mod_base = OTHER; note = 2'-deoxy-2'-fluoroguanosine-3'-phosphate
  modified_base 17: mod_base = OTHER; note = 2'-O-methyladenosine-3'-phosphate
  modified_base 18: mod_base = OTHER; note = 2'-O-methyladenosine-3'-phosphate
  modified_base 19: mod_base = OTHER; note = 2'-O-methylguanosine-3'-phosphate
  modified_base 20: mod_base = OTHER; note = 2'-O-methyluridine-3'-phosphate
  modified_base 21: mod_base = OTHER; note = 2'-O-methyladenosine-3'-phosphorothioate
  modified_base 22: mod_base = OTHER; note = 2'-O-methyluridine-3'-phosphorothioate
  modified_base 23: mod_base = OTHER; note = 2'-O-methylcytidine
aaatctacattcaaagaagtatc

SEQ ID NO: 2452 - RNA, 21 nt, synthetic construct
  source 1..21: mol_type = other RNA
  modified_base 1: mod_base = OTHER; note = 2'-O-methyladenosine-3'-phosphorothioate
  modified_base 2: mod_base = OTHER; note = 2'-O-methylcytidine-3'-phosphorothioate
  modified_base 3: mod_base = OTHER; note = 2'-O-methyluridine-3'-phosphate
  modified_base 4: mod_base = OTHER; note = 2'-O-methyluridine-3'-phosphate
  modified_base 5: mod_base = OTHER; note = 2'-O-methylcytidine-3'-phosphate
  modified_base 6: mod_base = OTHER; note = 2'-O-methyluridine-3'-phosphate
  modified_base 7: mod_base = OTHER; note = 2'-deoxy-2'-fluorouridine-3'-phosphate
  modified_base 8: mod_base = OTHER; note = 2'-O-methyluridine-3'-phosphate
  modified_base 9: mod_base = OTHER; note = 2'-deoxy-2'-fluoroguanosine-3'-phosphate
  modified_base 10: mod_base = OTHER; note = 2'-deoxy-2'-fluoroadenosine-3'-phosphate
  modified_base 11: mod_base = OTHER; note = 2'-deoxy-2'-fluoroadenosine-3'-phosphate
  modified_base 12: mod_base = OTHER; note = 2'-O-methyluridine-3'-phosphate
  modified_base 13: mod_base = OTHER; note = 2'-O-methylguanosine-3'-phosphate
  modified_base 14: mod_base = OTHER; note = 2'-O-methyluridine-3'-phosphate
  modified_base 15: mod_base = OTHER; note = 2'-O-methyladenosine-3'-phosphate
  modified_base 16: mod_base = OTHER; note = 2'-O-methylguanosine-3'-phosphate
  modified_base 17: mod_base = OTHER; note = 2'-O-methyladenosine-3'-phosphate
  modified_base 18: mod_base = OTHER; note = 2'-O-methyluridine-3'-phosphate
  modified_base 19: mod_base = OTHER; note = 2'-O-methyluridine-3'-phosphate
  modified_base 20: mod_base = OTHER; note = 2'-O-methyluridine-3'-phosphate
  modified_base 21: mod_base = OTHER; note = 2'-O-methylcytidine-3'-phosphate ((2S,4R)-1-[29-[[2-(acetylamino)-2-deoxy-beta-D-galactopyra nosyl]oxy]-14,14-bis[[3-[[3-[[5-[[2-(acetylamino)-2-deoxy-b eta-D-galactopyranosyl]oxy]-1-oxopentyl]amino]propyl]amino] -3-oxopropoxy]methyl]-1,12,19,25-tetraoxo-16-oxa-13,20,24-t riazanonacos-1-yl]-4-hydroxy-2-pyrrolidinyl)methyl ester
acttctttgaatgtagatttc

SEQ ID NO: 2453 - RNA, 23 nt, synthetic construct
  source 1..23: mol_type = other RNA
  modified_base 1: mod_base = OTHER; note = 2'-O-methylguanosine-3'-phosphorothioate
  modified_base 2: mod_base = OTHER; note = 2'-deoxy-2'-fluoroadenosine-3'-phosphorothioate
  modified_base 3: mod_base = OTHER; note = 2'-O-methyladenosine-3'-phosphate
  modified_base 4: mod_base = OTHER; note = 2'-O-methyladenosine-3'-phosphate
  modified_base 5: mod_base = OTHER; note = 2'-O-methyluridine-3'-phosphate
  modified_base 6: mod_base = OTHER; note = 2'-deoxy-2'-fluorocytidine-3'-phosphate
  modified_base 7: mod_base = OTHER; note = 2'-O-methyluridine-3'-phosphate
  modified_base 8: mod_base = OTHER; note = 2'-deoxy-2'-fluoroadenosine-3'-phosphate
  modified_base 9: mod_base = OTHER; note = 2'-deoxy-2'-fluorocytidine-3'-phosphate
  modified_base 10: mod_base = OTHER; note = 2'-O-methyladenosine-3'-phosphate
  modified_base 11: mod_base = OTHER; note = 2'-O-methyluridine-3'-phosphate
  modified_base 12: mod_base = OTHER; note = 2'-O-methyluridine-3'-phosphate
  modified_base 13: mod_base = OTHER; note = 2'-O-methylcytidine-3'-phosphate
  modified_base 14: mod_base = OTHER; note = 2'-deoxy-2'-fluoroadenosine-3'-phosphate
  modified_base 15: mod_base = OTHER; note = 2'-O-methyladenosine-3'-phosphate
  modified_base 16: mod_base = OTHER; note = 2'-deoxy-2'-fluoroadenosine-3'-phosphate
  modified_base 17: mod_base = OTHER; note = 2'-O-methylguanosine-3'-phosphate
  modified_base 18: mod_base = OTHER; note = 2'-O-methyladenosine-3'-phosphate
  modified_base 19: mod_base = OTHER; note = 2'-O-methyladenosine-3'-phosphate
  modified_base 20: mod_base = OTHER; note = 2'-O-methylguanosine-3'-phosphate
  modified_base 21: mod_base = OTHER; note = 2'-O-methyluridine-3'-phosphorothioate
  modified_base 22: mod_base = OTHER; note = 2'-O-methyladenosine-3'-phosphorothioate
  modified_base 23: mod_base = OTHER; note = 2'-O-methyluridine
gaaatctacattcaaagaagtat

SEQ ID NO: 2454 - RNA, 21 nt, synthetic construct
  source 1..21: mol_type = other RNA
  modified_base 1: mod_base = OTHER; note = 2'-O-methylguanosine-3'-phosphorothioate
  modified_base 2: mod_base = OTHER; note = 2'-O-methyluridine-3'-phosphorothioate
  modified_base 3: mod_base = OTHER; note = 2'-O-methylguanosine-3'-phosphate
  modified_base 4: mod_base = OTHER; note = 2'-O-methyladenosine-3'-phosphate
  modified_base 5: mod_base = OTHER; note = 2'-O-methyluridine-3'-phosphate
  modified_base 6: mod_base = OTHER; note = 2'-O-methyladenosine-3'-phosphate
  modified_base 7: mod_base = OTHER; note = 2'-deoxy-2'-fluorocytidine-3'-phosphate
  modified_base 8: mod_base = OTHER; note = 2'-O-methyluridine-3'-phosphate
  modified_base 9: mod_base = OTHER; note = 2'-deoxy-2'-fluorouridine-3'-phosphate
  modified_base 10: mod_base = OTHER; note = 2'-deoxy-2'-fluorocytidine-3'-phosphate
  modified_base 11: mod_base = OTHER; note = 2'-deoxy-2'-fluorouridine-3'-phosphate
  modified_base 12: mod_base = OTHER; note = 2'-O-methyluridine-3'-phosphate
  modified_base 13: mod_base = OTHER; note = 2'-O-methyluridine-3'-phosphate
  modified_base 14: mod_base = OTHER; note = 2'-O-methylguanosine-3'-phosphate
  modified_base 15: mod_base = OTHER; note = 2'-O-methyladenosine-3'-phosphate
  modified_base 16: mod_base = OTHER; note = 2'-O-methyladenosine-3'-phosphate
  modified_base 17: mod_base = OTHER; note = 2'-O-methyluridine-3'-phosphate
  modified_base 18: mod_base = OTHER; note = 2'-O-methylguanosine-3'-phosphate
  modified_base 19: mod_base = OTHER; note = 2'-O-methyluridine-3'-phosphate
  modified_base 20: mod_base = OTHER; note = 2'-O-methyladenosine-3'-phosphate
  modified_base 21: mod_base = OTHER; note = 2'-O-methylguanosine-3'-phosphate ((2S,4R)-1-[29-[[2-(acetylamino)-2-deoxy-beta-D-galactopyra nosyl]oxy]-14,14-bis[[3-[[3-[[5-[[2-(acetylamino)-2-deoxy-b eta-D-galactopyranosyl]oxy]-1-oxopentyl]amino]propyl]amino] -3-oxopropoxy]methyl]-1,12,19,25-tetraoxo-16-oxa-13,20,24-t riazanonacos-1-yl]-4-hydroxy-2-pyrrolidinyl)methyl ester
gtgatacttctttgaatgtag

SEQ ID NO: 2455 - RNA, 23 nt, synthetic construct
  source 1..23: mol_type = other RNA
  modified_base 1: mod_base = OTHER; note = 2'-O-methylcytidine-3'-phosphorothioate
  modified_base 2: mod_base = OTHER; note = 2'-deoxy-2'-fluorouridine-3'-phosphorothioate
  modified_base 3: mod_base = OTHER; note = 2'-O-methyladenosine-3'-phosphate
  modified_base 4: mod_base = OTHER; note = 2'-O-methylcytidine-3'-phosphate
  modified_base 5: mod_base = OTHER; note = 2'-O-methyladenosine-3'-phosphate
  modified_base 6: mod_base = OTHER; note = 2'-deoxy-2'-fluorouridine-3'-phosphate
  modified_base 7: mod_base = OTHER; note = 2'-O-methyluridine-3'-phosphate
  modified_base 8: mod_base = OTHER; note = 2'-deoxy-2'-fluorocytidine-3'-phosphate
  modified_base 9: mod_base = OTHER; note = 2'-deoxy-2'-fluoroadenosine-3'-phosphate
  modified_base 10: mod_base = OTHER; note = 2'-O-methyladenosine-3'-phosphate
  modified_base 11: mod_base = OTHER; note = 2'-O-methyladenosine-3'-phosphate
  modified_base 12: mod_base = OTHER; note = 2'-O-methylguanosine-3'-phosphate
  modified_base 13: mod_base = OTHER; note = 2'-O-methyladenosine-3'-phosphate
  modified_base 14: mod_base = OTHER; note = 2'-deoxy-2'-fluoroadenosine-3'-phosphate
  modified_base 15: mod_base = OTHER; note = 2'-O-methylguanosine-3'-phosphate
  modified_base 16: mod_base = OTHER; note = 2'-deoxy-2'-fluorouridine-3'-phosphate
  modified_base 17: mod_base = OTHER; note = 2'-O-methyladenosine-3'-phosphate
  modified_base 18: mod_base = OTHER; note = 2'-O-methyluridine-3'-phosphate
  modified_base 19: mod_base = OTHER; note = 2'-O-methylcytidine-3'-phosphate
  modified_base 20: mod_base = OTHER; note = 2'-O-methyladenosine-3'-phosphate
  modified_base 21: mod_base = OTHER; note = 2'-O-methylcytidine-3'-phosphorothioate
  modified_base 22: mod_base = OTHER; note = 2'-O-methylcytidine-3'-phosphorothioate
  modified_base 23: mod_base = OTHER; note = 2'-O-methyladenosine
ctacattcaaagaagtatcacca

SEQ ID NO: 2456 - RNA, 21 nt, synthetic construct
  source 1..21: mol_type = other RNA
  modified_base 1: mod_base = OTHER; note = 2'-O-methylguanosine-3'-phosphorothioate
  modified_base 2: mod_base = OTHER; note = 2'-O-methylguanosine-3'-phosphorothioate
  modified_base 3: mod_base = OTHER; note = 2'-O-methyluridine-3'-phosphate
  modified_base 4: mod_base = OTHER; note = 2'-O-methylguanosine-3'-phosphate
  modified_base 5: mod_base = OTHER; note = 2'-O-methyladenosine-3'-phosphate
  modified_base 6: mod_base = OTHER; note = 2'-O-methyluridine-3'-phosphate
  modified_base 7: mod_base = OTHER; note = 2'-deoxy-2'-fluoroadenosine-3'-phosphate
  modified_base 8: mod_base = OTHER; note = 2'-O-methylcytidine-3'-phosphate
  modified_base 9: mod_base = OTHER; note = 2'-deoxy-2'-fluorouridine-3'-phosphate
  modified_base 10: mod_base = OTHER; note = 2'-deoxy-2'-fluorouridine-3'-phosphate
  modified_base 11: mod_base = OTHER; note = 2'-deoxy-2'-fluorocytidine-3'-phosphate
  modified_base 12: mod_base = OTHER; note = 2'-O-methyluridine-3'-phosphate
  modified_base 13: mod_base = OTHER; note = 2'-O-methyluridine-3'-phosphate
  modified_base 14: mod_base = OTHER; note = 2'-O-methyluridine-3'-phosphate
  modified_base 15: mod_base = OTHER; note = 2'-O-methylguanosine-3'-phosphate
  modified_base 16: mod_base = OTHER; note = 2'-O-methyladenosine-3'-phosphate
  modified_base 17: mod_base = OTHER; note = 2'-O-methyladenosine-3'-phosphate
  modified_base 18: mod_base = OTHER; note = 2'-O-methyluridine-3'-phosphate
  modified_base 19: mod_base = OTHER; note = 2'-O-methylguanosine-3'-phosphate
  modified_base 20: mod_base = OTHER; note = 2'-O-methyluridine-3'-phosphate
  modified_base 21: mod_base = OTHER; note = 2'-O-methyladenosine-3'-phosphate ((2S,4R)-1-[29-[[2-(acetylamino)-2-deoxy-beta-D-galactopyra nosyl]oxy]-14,14-bis[[3-[[3-[[5-[[2-(acetylamino)-2-deoxy-b eta-D-galactopyranosyl]oxy]-1-oxopentyl]amino]propyl]amino] -3-oxopropoxy]methyl]-1,12,19,25-tetraoxo-16-oxa-13,20,24-t riazanonacos-1-yl]-4-hydroxy-2-pyrrolidinyl)methyl ester
ggtgatacttctttgaatgta

SEQ ID NO: 2457 - RNA, 23 nt, synthetic construct
  source 1..23: mol_type = other RNA
  modified_base 1: mod_base = OTHER; note = 2'-O-methyluridine-3'-phosphorothioate
  modified_base 2: mod_base = OTHER; note = 2'-deoxy-2'-fluoroadenosine-3'-phosphorothioate
  modified_base 3: mod_base = OTHER; note = 2'-O-methylcytidine-3'-phosphate
  modified_base 4: mod_base = OTHER; note = 2'-O-methyladenosine-3'-phosphate
  modified_base 5: mod_base = OTHER; note = 2'-O-methyluridine-3'-phosphate
  modified_base 6: mod_base = OTHER; note = 2'-deoxy-2'-fluorouridine-3'-phosphate
  modified_base 7: mod_base = OTHER; note = 2'-O-methylcytidine-3'-phosphate
  modified_base 8: mod_base = OTHER; note = 2'-deoxy-2'-fluoroadenosine-3'-phosphate
  modified_base 9: mod_base = OTHER; note = 2'-deoxy-2'-fluoroadenosine-3'-phosphate
  modified_base 10: mod_base = OTHER; note = 2'-O-methyladenosine-3'-phosphate
  modified_base 11: mod_base = OTHER; note = 2'-O-methylguanosine-3'-phosphate
  modified_base 12: mod_base = OTHER; note = 2'-O-methyladenosine-3'-phosphate
  modified_base 13: mod_base = OTHER; note = 2'-O-methyladenosine-3'-phosphate
  modified_base 14: mod_base = OTHER; note = 2'-deoxy-2'-fluoroguanosine-3'-phosphate
  modified_base 15: mod_base = OTHER; note = 2'-O-methyluridine-3'-phosphate
  modified_base 16: mod_base = OTHER; note = 2'-deoxy-2'-fluoroadenosine-3'-phosphate
  modified_base 17: mod_base = OTHER; note = 2'-O-methyluridine-3'-phosphate
  modified_base 18: mod_base = OTHER; note = 2'-O-methylcytidine-3'-phosphate
  modified_base 19: mod_base = OTHER; note = 2'-O-methyladenosine-3'-phosphate
  modified_base 20: mod_base = OTHER; note = 2'-O-methylcytidine-3'-phosphate
  modified_base 21: mod_base = OTHER; note = 2'-O-methylcytidine-3'-phosphorothioate
  modified_base 22: mod_base = OTHER; note = 2'-O-methyladenosine-3'-phosphorothioate
  modified_base 23: mod_base = OTHER; note = 2'-O-methyladenosine
tacattcaaagaagtatcaccaa

SEQ ID NO: 2458 - RNA, 21 nt, synthetic construct
  source 1..21: mol_type = other RNA
  modified_base 1: mod_base = OTHER; note = 2'-O-methyluridine-3'-phosphorothioate
  modified_base 2: mod_base = OTHER; note = 2'-O-methylguanosine-3'-phosphorothioate
  modified_base 3: mod_base = OTHER; note = 2'-O-methylguanosine-3'-phosphate
  modified_base 4: mod_base = OTHER; note = 2'-O-methylguanosine-3'-phosphate
  modified_base 5: mod_base = OTHER; note = 2'-O-methyladenosine-3'-phosphate
  modified_base 6: mod_base = OTHER; note = 2'-O-methyladenosine-3'-phosphate
  modified_base 7: mod_base = OTHER; note = 2'-deoxy-2'-fluoroguanosine-3'-phosphate
  modified_base 8: mod_base = OTHER; note = 2'-O-methyladenosine-3'-phosphate
  modified_base 9: mod_base = OTHER; note = 2'-deoxy-2'-fluorouridine-3'-phosphate
  modified_base 10: mod_base = OTHER; note = 2'-deoxy-2'-fluoroadenosine-3'-phosphate
  modified_base 11: mod_base = OTHER; note = 2'-deoxy-2'-fluorouridine-3'-phosphate
  modified_base 12: mod_base = OTHER; note = 2'-O-methylcytidine-3'-phosphate
  modified_base 13: mod_base = OTHER; note = 2'-O-methyladenosine-3'-phosphate
  modified_base 14: mod_base = OTHER; note = 2'-O-methyladenosine-3'-phosphate
  modified_base 15: mod_base = OTHER; note = 2'-O-methyladenosine-3'-phosphate
  modified_base 16: mod_base = OTHER; note = 2'-O-methyluridine-3'-phosphate
  modified_base 17: mod_base = OTHER; note = 2'-O-methylguanosine-3'-phosphate
  modified_base 18: mod_base = OTHER; note = 2'-O-methylguanosine-3'-phosphate
  modified_base 19: mod_base = OTHER; note = 2'-O-methylcytidine-3'-phosphate
  modified_base 20: mod_base = OTHER; note = 2'-O-methyluridine-3'-phosphate
  modified_base 21: mod_base = OTHER; note = 2'-O-methylguanosine-3'-phosphate ((2S,4R)-1-[29-[[2-(acetylamino)-2-deoxy-beta-D-galactopyra nosyl]oxy]-14,14-bis[[3-[[3-[[5-[[2-(acetylamino)-2-deoxy-b eta-D-galactopyranosyl]oxy]-1-oxopentyl]amino]propyl]amino] -3-oxopropoxy]methyl]-1,12,19,25-tetraoxo-16-oxa-13,20,24-t riazanonacos-1-yl]-4-hydroxy-2-pyrrolidinyl)methyl ester
tgggaagatatcaaatggctg

SEQ ID NO: 2459 - RNA, 23 nt, synthetic construct
  source 1..23: mol_type = other RNA
  modified_base 1: mod_base = OTHER; note = 2'-O-methylcytidine-3'-phosphorothioate
  modified_base 2: mod_base = OTHER; note = 2'-deoxy-2'-fluoroadenosine-3'-phosphorothioate
  modified_base 3: mod_base = OTHER; note = 2'-O-methylguanosine-3'-phosphate
  modified_base 4: mod_base = OTHER; note = 2'-O-methylcytidine-3'-phosphate
  modified_base 5: mod_base = OTHER; note = 2'-O-methylcytidine-3'-phosphate
  modified_base 6: mod_base = OTHER; note = 2'-deoxy-2'-fluoroadenosine-3'-phosphate
  modified_base 7: mod_base = OTHER; note = 2'-O-methyluridine-3'-phosphate
  modified_base 8: mod_base = OTHER; note = 2'-deoxy-2'-fluorouridine-3'-phosphate
  modified_base 9: mod_base = OTHER; note = 2'-deoxy-2'-fluorouridine-3'-phosphate
  modified_base 10: mod_base = OTHER; note = 2'-O-methylguanosine-3'-phosphate
  modified_base 11: mod_base = OTHER; note = 2'-O-methyladenosine-3'-phosphate
  modified_base 12: mod_base = OTHER; note = 2'-O-methyluridine-3'-phosphate
  modified_base 13: mod_base = OTHER; note = 2'-O-methyladenosine-3'-phosphate
  modified_base 14: mod_base = OTHER; note = 2'-deoxy-2'-fluorouridine-3'-phosphate
  modified_base 15: mod_base = OTHER; note = 2'-O-methylcytidine-3'-phosphate
  modified_base 16: mod_base = OTHER; note = 2'-deoxy-2'-fluorouridine-3'-phosphate
  modified_base 17: mod_base = OTHER; note = 2'-O-methyluridine-3'-phosphate
  modified_base 18: mod_base = OTHER; note = 2'-O-methylcytidine-3'-phosphate
  modified_base 19: mod_base = OTHER; note = 2'-O-methylcytidine-3'-phosphate
  modified_base 20: mod_base = OTHER; note = 2'-O-methylcytidine-3'-phosphate
  modified_base 21: mod_base = OTHER; note = 2'-O-methyladenosine-3'-phosphorothioate
  modified_base 22: mod_base = OTHER; note = 2'-O-methylguanosine-3'-phosphorothioate
  modified_base 23: mod_base = OTHER; note = 2'-O-methylcytidine
cagccatttgatatcttcccagc

SEQ ID NO: 2460 - RNA, 21 nt, synthetic construct
  source 1..21: mol_type = other RNA
  modified_base 1: mod_base = OTHER; note = 2'-O-methylguanosine-3'-phosphorothioate
  modified_base 2: mod_base = OTHER; note = 2'-O-methylguanosine-3'-phosphorothioate
  modified_base 3: mod_base = OTHER; note = 2'-O-methylguanosine-3'-phosphate
  modified_base 4: mod_base = OTHER; note = 2'-O-methyladenosine-3'-phosphate
  modified_base 5: mod_base = OTHER; note = 2'-O-methyladenosine-3'-phosphate
  modified_base 6: mod_base = OTHER; note = 2'-O-methylguanosine-3'-phosphate
  modified_base 7: mod_base = OTHER; note = 2'-deoxy-2'-fluoroadenosine-3'-phosphate
  modified_base 8: mod_base = OTHER; note = 2'-O-methyluridine-3'-phosphate
  modified_base 9: mod_base = OTHER; note = 2'-deoxy-2'-fluoroadenosine-3'-phosphate
  modified_base 10: mod_base = OTHER; note = 2'-deoxy-2'-fluorouridine-3'-phosphate
  modified_base 11: mod_base = OTHER; note = 2'-deoxy-2'-fluorocytidine-3'-phosphate
  modified_base 12: mod_base = OTHER; note = 2'-O-methyladenosine-3'-phosphate
  modified_base 13: mod_base = OTHER; note = 2'-O-methyladenosine-3'-phosphate
  modified_base 14: mod_base = OTHER; note = 2'-O-methyladenosine-3'-phosphate
  modified_base 15: mod_base = OTHER; note = 2'-O-methyluridine-3'-phosphate
  modified_base 16: mod_base = OTHER; note = 2'-O-methylguanosine-3'-phosphate
  modified_base 17: mod_base = OTHER; note = 2'-O-methylguanosine-3'-phosphate
  modified_base 18: mod_base = OTHER; note = 2'-O-methylcytidine-3'-phosphate
  modified_base 19: mod_base = OTHER; note = 2'-O-methyluridine-3'-phosphate
  modified_base 20: mod_base = OTHER; note = 2'-O-methylguanosine-3'-phosphate
  modified_base 21: mod_base = OTHER; note = 2'-O-methyladenosine-3'-phosphate ((2S,4R)-1-[29-[[2-(acetylamino)-2-deoxy-beta-D-galactopyra nosyl]oxy]-14,14-bis[[3-[[3-[[5-[[2-(acetylamino)-2-deoxy-b eta-D-galactopyranosyl]oxy]-1-oxopentyl]amino]propyl]amino] -3-oxopropoxy]methyl]-1,12,19,25-tetraoxo-16-oxa-13,20,24-t riazanonacos-1-yl]-4-hydroxy-2-pyrrolidinyl)methyl ester
gggaagatatcaaatggctga

SEQ ID NO: 2461 - RNA, 23 nt, synthetic construct
  source 1..23: mol_type = other RNA
  modified_base 1: mod_base = OTHER; note = 2'-O-methyluridine-3'-phosphorothioate
  modified_base 2: mod_base = OTHER; note = 2'-deoxy-2'-fluorocytidine-3'-phosphorothioate
  modified_base 3: mod_base = OTHER; note = 2'-O-methyladenosine-3'-phosphate
  modified_base 4: mod_base = OTHER; note = 2'-O-methylguanosine-3'-phosphate
  modified_base 5: mod_base = OTHER; note = 2'-O-methylcytidine-3'-phosphate
  modified_base 6: mod_base = OTHER; note = 2'-deoxy-2'-fluorocytidine-3'-phosphate
  modified_base 7: mod_base = OTHER; note = 2'-O-methyladenosine-3'-phosphate
  modified_base 8: mod_base = OTHER; note = 2'-deoxy-2'-fluorouridine-3'-phosphate
  modified_base 9: mod_base = OTHER; note = 2'-deoxy-2'-fluorouridine-3'-phosphate
  modified_base 10: mod_base = OTHER; note = 2'-O-methyluridine-3'-phosphate
  modified_base 11: mod_base = OTHER; note = 2'-O-methylguanosine-3'-phosphate
  modified_base 12: mod_base = OTHER; note = 2'-O-methyladenosine-3'-phosphate
  modified_base 13: mod_base = OTHER; note = 2'-O-methyluridine-3'-phosphate
  modified_base 14: mod_base = OTHER; note = 2'-deoxy-2'-fluoroadenosine-3'-phosphate
  modified_base 15: mod_base = OTHER; note = 2'-O-methyluridine-3'-phosphate
  modified_base 16: mod_base = OTHER; note = 2'-deoxy-2'-fluorocytidine-3'-phosphate
  modified_base 17: mod_base = OTHER; note = 2'-O-methyluridine-3'-phosphate
  modified_base 18: mod_base = OTHER; note = 2'-O-methyluridine-3'-phosphate
  modified_base 19: mod_base = OTHER; note = 2'-O-methylcytidine-3'-phosphate
  modified_base 20: mod_base = OTHER; note = 2'-O-methylcytidine-3'-phosphate
  modified_base 21: mod_base = OTHER; note = 2'-O-methylcytidine-3'-phosphorothioate
  modified_base 22: mod_base = OTHER; note = 2'-O-methyladenosine-3'-phosphorothioate
  modified_base 23: mod_base = OTHER; note = 2'-O-methylguanosine
tcagccatttgatatcttcccag

SEQ ID NO: 2462 - RNA, 21 nt, synthetic construct
  source 1..21: mol_type = other RNA
  modified_base 1: mod_base = OTHER; note = 2'-O-methylcytidine-3'-phosphorothioate
  modified_base 2: mod_base = OTHER; note = 2'-O-methyladenosine-3'-phosphorothioate
  modified_base 3: mod_base = OTHER; note = 2'-O-methylguanosine-3'-phosphate
  modified_base 4: mod_base = OTHER; note = 2'-O-methylcytidine-3'-phosphate
  modified_base 5: mod_base = OTHER; note = 2'-O-methyluridine-3'-phosphate
  modified_base 6: mod_base = OTHER; note = 2'-O-methylguanosine-3'-phosphate
  modified_base 7: mod_base = OTHER; note = 2'-deoxy-2'-fluoroguanosine-3'-phosphate
  modified_base 8: mod_base = OTHER; note = 2'-O-methylguanosine-3'-phosphate
  modified_base 9: mod_base = OTHER; note = 2'-deoxy-2'-fluoroadenosine-3'-phosphate
  modified_base 10: mod_base = OTHER; note = 2'-deoxy-2'-fluoroadenosine-3'-phosphate
  modified_base 11: mod_base = OTHER; note = 2'-deoxy-2'-fluoroguanosine-3'-phosphate
  modified_base 12: mod_base = OTHER; note = 2'-O-methyladenosine-3'-phosphate
  modified_base 13: mod_base = OTHER; note = 2'-O-methyluridine-3'-phosphate
  modified_base 14: mod_base = OTHER; note = 2'-O-methyladenosine-3'-phosphate
  modified_base 15: mod_base = OTHER; note = 2'-O-methyluridine-3'-phosphate
  modified_base 16: mod_base = OTHER; note = 2'-O-methylcytidine-3'-phosphate
  modified_base 17: mod_base = OTHER; note = 2'-O-methyladenosine-3'-phosphate
  modified_base 18: mod_base = OTHER; note = 2'-O-methyladenosine-3'-phosphate
  modified_base 19: mod_base = OTHER; note = 2'-O-methyladenosine-3'-phosphate
  modified_base 20: mod_base = OTHER; note = 2'-O-methyluridine-3'-phosphate
  modified_base 21: mod_base = OTHER; note = 2'-O-methylguanosine-3'-phosphate ((2S,4R)-1-[29-[[2-(acetylamino)-2-deoxy-beta-D-galactopyra nosyl]oxy]-14,14-bis[[3-[[3-[[5-[[2-(acetylamino)-2-deoxy-b eta-D-galactopyranosyl]oxy]-1-oxopentyl]amino]propyl]amino] -3-oxopropoxy]methyl]-1,12,19,25-tetraoxo-16-oxa-13,20,24-t riazanonacos-1-yl]-4-hydroxy-2-pyrrolidinyl)methyl ester
cagctgggaagatatcaaatg

SEQ ID NO: 2463 - RNA, 23 nt, synthetic construct
  source 1..23: mol_type = other RNA
  modified_base 1: mod_base = OTHER; note = 2'-O-methylcytidine-3'-phosphorothioate
  modified_base 2: mod_base = OTHER; note = 2'-deoxy-2'-fluoroadenosine-3'-phosphorothioate
  modified_base 3: mod_base = OTHER; note = 2'-O-methyluridine-3'-phosphate
  modified_base 4: mod_base = OTHER; note = 2'-O-methyluridine-3'-phosphate
  modified_base 5: mod_base = OTHER; note = 2'-O-methyluridine-3'-phosphate
  modified_base 6: mod_base = OTHER; note = 2'-deoxy-2'-fluoroguanosine-3'-phosphate
  modified_base 7: mod_base = OTHER; note = 2'-O-methyladenosine-3'-phosphate
  modified_base 8: mod_base = OTHER; note = 2'-deoxy-2'-fluorouridine-3'-phosphate
  modified_base 9: mod_base = OTHER; note = 2'-deoxy-2'-fluoroadenosine-3'-phosphate
  modified_base 10: mod_base = OTHER; note = 2'-O-methyluridine-3'-phosphate
  modified_base 11: mod_base = OTHER; note = 2'-O-methylcytidine-3'-phosphate
  modified_base 12: mod_base = OTHER; note = 2'-O-methyluridine-3'-phosphate
  modified_base 13: mod_base = OTHER; note = 2'-O-methyluridine-3'-phosphate
  modified_base 14: mod_base = OTHER; note = 2'-deoxy-2'-fluorocytidine-3'-phosphate
  modified_base 15: mod_base = OTHER; note = 2'-O-methylcytidine-3'-phosphate
  modified_base 16: mod_base = OTHER; note = 2'-deoxy-2'-fluorocytidine-3'-phosphate
  modified_base 17: mod_base = OTHER; note = 2'-O-methyladenosine-3'-phosphate
  modified_base 18: mod_base = OTHER; note = 2'-O-methylguanosine-3'-phosphate
  modified_base 19: mod_base = OTHER; note = 2'-O-methylcytidine-3'-phosphate
  modified_base 20: mod_base = OTHER; note = 2'-O-methyluridine-3'-phosphate
  modified_base 21: mod_base = OTHER; note = 2'-O-methylguanosine-3'-phosphorothioate
  modified_base 22: mod_base = OTHER; note = 2'-O-methyladenosine-3'-phosphorothioate
  modified_base 23: mod_base = OTHER; note = 2'-O-methyluridine
catttgatatcttcccagctgat

SEQ ID NO: 2464 - RNA, 21 nt, synthetic construct
  source 1..21: mol_type = other RNA
  modified_base 1: mod_base = OTHER; note = 2'-O-methyluridine-3'-phosphorothioate
  modified_base 2: mod_base = OTHER; note = 2'-O-methylcytidine-3'-phosphorothioate
  modified_base 3: mod_base = OTHER; note = 2'-O-methyladenosine-3'-phosphate
  modified_base 4: mod_base = OTHER; note = 2'-O-methylguanosine-3'-phosphate
  modified_base 5: mod_base = OTHER; note = 2'-O-methylcytidine-3'-phosphate
  modified_base 6: mod_base = OTHER; note = 2'-O-methyluridine-3'-phosphate
  modified_base 7: mod_base = OTHER; note = 2'-deoxy-2'-fluoroguanosine-3'-phosphate
  modified_base 8: mod_base = OTHER; note = 2'-O-methylguanosine-3'-phosphate
  modified_base 9: mod_base = OTHER; note = 2'-deoxy-2'-fluoroguanosine-3'-phosphate
  modified_base 10: mod_base = OTHER; note = 2'-deoxy-2'-fluoroadenosine-3'-phosphate
  modified_base 11: mod_base = OTHER; note = 2'-deoxy-2'-fluoroadenosine-3'-phosphate
  modified_base 12: mod_base = OTHER; note = 2'-O-methylguanosine-3'-phosphate
  modified_base 13: mod_base = OTHER; note = 2'-O-methyladenosine-3'-phosphate
  modified_base 14: mod_base = OTHER; note = 2'-O-methyluridine-3'-phosphate
  modified_base 15: mod_base = OTHER; note = 2'-O-methyladenosine-3'-phosphate
  modified_base 16: mod_base = OTHER; note = 2'-O-methyluridine-3'-phosphate
  modified_base 17: mod_base = OTHER; note = 2'-O-methylcytidine-3'-phosphate
  modified_base 18: mod_base = OTHER; note = 2'-O-methyladenosine-3'-phosphate
  modified_base 19: mod_base = OTHER; note = 2'-O-methyladenosine-3'-phosphate
  modified_base 20: mod_base = OTHER; note = 2'-O-methyladenosine-3'-phosphate
  modified_base 21: mod_base = OTHER; note = 2'-O-methyluridine-3'-phosphate ((2S,4R)-1-[29-[[2-(acetylamino)-2-deoxy-beta-D-galactopyra nosyl]oxy]-14,14-bis[[3-[[3-[[5-[[2-(acetylamino)-2-deoxy-b eta-D-galactopyranosyl]oxy]-1-oxopentyl]amino]propyl]amino] -3-oxopropoxy]methyl]-1,12,19,25-tetraoxo-16-oxa-13,20,24-t riazanonacos-1-yl]-4-hydroxy-2-pyrrolidinyl)methyl ester
tcagctgggaagatatcaaat

SEQ ID NO: 2465 - RNA, 23 nt, synthetic construct
  source 1..23: mol_type = other RNA
  modified_base 1: mod_base = OTHER; note = 2'-O-methyladenosine-3'-phosphorothioate
  modified_base 2: mod_base = OTHER; note = 2'-deoxy-2'-fluorouridine-3'-phosphorothioate
  modified_base 3: mod_base = OTHER; note = 2'-O-methyluridine-3'-phosphate
  modified_base 4: mod_base = OTHER; note = 2'-O-methyluridine-3'-phosphate
  modified_base 5: mod_base = OTHER; note = 2'-O-methylguanosine-3'-phosphate
  modified_base 6: mod_base = OTHER; note = 2'-deoxy-2'-fluoroadenosine-3'-phosphate
  modified_base 7: mod_base = OTHER; note = 2'-O-methyluridine-3'-phosphate
  modified_base 8: mod_base = OTHER; note = 2'-deoxy-2'-fluoroadenosine-3'-phosphate
  modified_base 9: mod_base = OTHER; note = 2'-deoxy-2'-fluorouridine-3'-phosphate
  modified_base 10: mod_base = OTHER; note = 2'-O-methylcytidine-3'-phosphate
  modified_base 11: mod_base = OTHER; note = 2'-O-methyluridine-3'-phosphate
  modified_base 12: mod_base = OTHER; note = 2'-O-methyluridine-3'-phosphate
  modified_base 13: mod_base = OTHER; note = 2'-O-methylcytidine-3'-phosphate
  modified_base 14: mod_base = OTHER; note = 2'-deoxy-2'-fluorocytidine-3'-phosphate
  modified_base 15: mod_base = OTHER; note = 2'-O-methylcytidine-3'-phosphate
  modified_base 16: mod_base = OTHER; note = 2'-deoxy-2'-fluoroadenosine-3'-phosphate
  modified_base 17: mod_base = OTHER; note = 2'-O-methylguanosine-3'-phosphate
  modified_base 18: mod_base = OTHER; note = 2'-O-methylcytidine-3'-phosphate
  modified_base 19: mod_base = OTHER; note = 2'-O-methyluridine-3'-phosphate
  modified_base 20: mod_base = OTHER; note = 2'-O-methylguanosine-3'-phosphate
  modified_base 21: mod_base = OTHER; note = 2'-O-methyladenosine-3'-phosphorothioate
  modified_base 22: mod_base = OTHER; note = 2'-O-methyluridine-3'-phosphorothioate
  modified_base 23: mod_base = OTHER; note = 2'-O-methyladenosine
atttgatatcttcccagctgata

SEQ ID NO: 2466 - RNA, 21 nt, synthetic construct
  source 1..21: mol_type = other RNA
  modified_base 1: mod_base = OTHER; note = 2'-O-methyluridine-3'-phosphorothioate
  modified_base 2: mod_base = OTHER; note = 2'-O-methylcytidine-3'-phosphorothioate
  modified_base 3: mod_base = OTHER; note = 2'-O-methylcytidine-3'-phosphate
  modified_base 4: mod_base = OTHER; note = 2'-O-methyladenosine-3'-phosphate
  modified_base 5: mod_base = OTHER; note = 2'-O-methyladenosine-3'-phosphate
  modified_base 6: mod_base = OTHER; note = 2'-O-methyladenosine-3'-phosphate
  modified_base 7: mod_base = OTHER; note = 2'-deoxy-2'-fluoroguanosine-3'-phosphate
  modified_base 8: mod_base = OTHER; note = 2'-O-methyluridine-3'-phosphate
  modified_base 9: mod_base = OTHER; note = 2'-deoxy-2'-fluorocytidine-3'-phosphate
  modified_base 10: mod_base = OTHER; note = 2'-deoxy-2'-fluorouridine-3'-phosphate
  modified_base 11: mod_base = OTHER; note = 2'-deoxy-2'-fluoroadenosine-3'-phosphate
  modified_base 12: mod_base = OTHER; note = 2'-O-methyluridine-3'-phosphate
  modified_base 13: mod_base = OTHER; note = 2'-O-methyladenosine-3'-phosphate
  modified_base 14: mod_base = OTHER; note = 2'-O-methyluridine-3'-phosphate
  modified_base 15: mod_base = OTHER; note = 2'-O-methyladenosine-3'-phosphate
  modified_base 16: mod_base = OTHER; note = 2'-O-methyluridine-3'-phosphate
  modified_base 17: mod_base = OTHER; note = 2'-O-methylguanosine-3'-phosphate
  modified_base 18: mod_base = OTHER; note = 2'-O-methyladenosine-3'-phosphate
  modified_base 19: mod_base = OTHER; note = 2'-O-methylcytidine-3'-phosphate
  modified_base 20: mod_base = OTHER; note = 2'-O-methyluridine-3'-phosphate
  modified_base 21: mod_base = OTHER; note = 2'-O-methyladenosine-3'-phosphate ((2S,4R)-1-[29-[[2-(acetylamino)-2-deoxy-beta-D-galactopyra nosyl]oxy]-14,14-bis[[3-[[3-[[5-[[2-(acetylamino)-2-deoxy-b eta-D-galactopyranosyl]oxy]-1-oxopentyl]amino]propyl]amino] -3-oxopropoxy]methyl]-1,12,19,25-tetraoxo-16-oxa-13,20,24-t riazanonacos-1-yl]-4-hydroxy-2-pyrrolidinyl)methyl ester
tccaaagtctatatatgacta

SEQ ID NO: 2467 - RNA, 23 nt, synthetic construct
  source 1..23: mol_type = other RNA
  modified_base 1: mod_base = OTHER; note = 2'-O-methyluridine-3'-phosphorothioate
  modified_base 2: mod_base = OTHER; note = 2'-deoxy-2'-fluoroadenosine-3'-phosphorothioate
  modified_base 3: mod_base = OTHER; note = 2'-O-methylguanosine-3'-phosphate
  modified_base 4: mod_base = OTHER; note = 2'-O-methyluridine-3'-phosphate
  modified_base 5: mod_base = OTHER; note = 2'-O-methylcytidine-3'-phosphate
  modified_base 6: mod_base = OTHER; note = 2'-deoxy-2'-fluoroadenosine-3'-phosphate
  modified_base 7: mod_base = OTHER; note = 2'-O-methyluridine-3'-phosphate
  modified_base 8: mod_base = OTHER; note = 2'-deoxy-2'-fluoroadenosine-3'-phosphate
  modified_base 9: mod_base = OTHER; note = 2'-deoxy-2'-fluorouridine-3'-phosphate
  modified_base 10: mod_base = OTHER; note = 2'-O-methyladenosine-3'-phosphate
  modified_base 11: mod_base = OTHER; note = 2'-O-methyluridine-3'-phosphate
  modified_base 12: mod_base = OTHER; note = 2'-O-methyladenosine-3'-phosphate
  modified_base 13: mod_base = OTHER; note = 2'-O-methylguanosine-3'-phosphate
  modified_base 14: mod_base = OTHER; note = 2'-deoxy-2'-fluoroadenosine-3'-phosphate
  modified_base 15: mod_base = OTHER; note = 2'-O-methylcytidine-3'-phosphate
  modified_base 16: mod_base = OTHER; note = 2'-deoxy-2'-fluorouridine-3'-phosphate
  modified_base 17: mod_base = OTHER; note = 2'-O-methyluridine-3'-phosphate
  modified_base 18: mod_base = OTHER; note = 2'-O-methyluridine-3'-phosphate
  modified_base 19: mod_base = OTHER; note = 2'-O-methylguanosine-3'-phosphate
  modified_base 20: mod_base = OTHER; note = 2'-O-methylguanosine-3'-phosphate
  modified_base 21: mod_base = OTHER; note = 2'-O-methyladenosine-3'-phosphorothioate
  modified_base 22: mod_base = OTHER; note = 2'-O-methyladenosine-3'-phosphorothioate
  modified_base 23: mod_base = OTHER; note = 2'-O-methylguanosine
tagtcatatatagactttggaag

SEQ ID NO: 2468 - RNA, 21 nt, synthetic construct
  source 1..21: mol_type = other RNA
  modified_base 1: mod_base = OTHER; note = 2'-O-methylcytidine-3'-phosphorothioate
  modified_base 2: mod_base = OTHER; note = 2'-O-methylcytidine-3'-phosphorothioate
  modified_base 3: mod_base = OTHER; note = 2'-O-methyladenosine-3'-phosphate
  modified_base 4: mod_base = OTHER; note = 2'-O-methyladenosine-3'-phosphate
  modified_base 5: mod_base = OTHER; note = 2'-O-methyladenosine-3'-phosphate
  modified_base 6: mod_base = OTHER; note = 2'-O-methylguanosine-3'-phosphate
  modified_base 7: mod_base = OTHER; note = 2'-deoxy-2'-fluorouridine-3'-phosphate
  modified_base 8: mod_base = OTHER; note = 2'-O-methylcytidine-3'-phosphate
  modified_base 9: mod_base = OTHER; note = 2'-deoxy-2'-fluorouridine-3'-phosphate
  modified_base 10: mod_base = OTHER; note = 2'-deoxy-2'-fluoroadenosine-3'-phosphate
  modified_base 11: mod_base = OTHER; note = 2'-deoxy-2'-fluorouridine-3'-phosphate
  modified_base 12: mod_base = OTHER; note = 2'-O-methyladenosine-3'-phosphate
  modified_base 13: mod_base = OTHER; note = 2'-O-methyluridine-3'-phosphate
  modified_base 14: mod_base = OTHER; note = 2'-O-methyladenosine-3'-phosphate
  modified_base 15: mod_base = OTHER; note = 2'-O-methyluridine-3'-phosphate
  modified_base 16: mod_base = OTHER; note = 2'-O-methylguanosine-3'-phosphate
  modified_base 17: mod_base = OTHER; note = 2'-O-methyladenosine-3'-phosphate
  modified_base 18: mod_base = OTHER; note = 2'-O-methylcytidine-3'-phosphate
  modified_base 19: mod_base = OTHER; note = 2'-O-methyluridine-3'-phosphate
  modified_base 20: mod_base = OTHER; note = 2'-O-methyladenosine-3'-phosphate
  modified_base 21: mod_base = OTHER; note = 2'-O-methyluridine-3'-phosphate ((2S,4R)-1-[29-[[2-(acetylamino)-2-deoxy-beta-D-galactopyra nosyl]oxy]-14,14-bis[[3-[[3-[[5-[[2-(acetylamino)-2-deoxy-b eta-D-galactopyranosyl]oxy]-1-oxopentyl]amino]propyl]amino] -3-oxopropoxy]methyl]-1,12,19,25-tetraoxo-16-oxa-13,20,24-t riazanonacos-1-yl]-4-hydroxy-2-pyrrolidinyl)methyl ester
ccaaagtctatatatgactat

SEQ ID NO: 2469 - RNA, 23 nt, synthetic construct
  source 1..23: mol_type = other RNA
  modified_base 1: mod_base = OTHER; note = 2'-O-methyladenosine-3'-phosphorothioate
  modified_base 2: mod_base = OTHER; note = 2'-deoxy-2'-fluorouridine-3'-phosphorothioate
  modified_base 3: mod_base = OTHER; note = 2'-O-methyladenosine-3'-phosphate
  modified_base 4: mod_base = OTHER; note = 2'-O-methylguanosine-3'-phosphate
  modified_base 5: mod_base = OTHER; note = 2'-O-methyluridine-3'-phosphate
  modified_base 6: mod_base = OTHER; note = 2'-deoxy-2'-fluorocytidine-3'-phosphate
  modified_base 7: mod_base = OTHER; note = 2'-O-methyladenosine-3'-phosphate
  modified_base 8: mod_base = OTHER; note = 2'-deoxy-2'-fluorouridine-3'-phosphate
  modified_base 9: mod_base = OTHER; note = 2'-deoxy-2'-fluoroadenosine-3'-phosphate
  modified_base 10: mod_base = OTHER; note = 2'-O-methyluridine-3'-phosphate
  modified_base 11: mod_base = OTHER; note = 2'-O-methyladenosine-3'-phosphate
  modified_base 12: mod_base = OTHER; note = 2'-O-methyluridine-3'-phosphate
  modified_base 13: mod_base = OTHER; note = 2'-O-methyladenosine-3'-phosphate
  modified_base 14: mod_base = OTHER; note = 2'-deoxy-2'-fluoroguanosine-3'-phosphate
  modified_base 15: mod_base = OTHER; note = 2'-O-methyladenosine-3'-phosphate
  modified_base 16: mod_base = OTHER; note = 2'-deoxy-2'-fluorocytidine-3'-phosphate
  modified_base 17: mod_base = OTHER; note = 2'-O-methyluridine-3'-phosphate
  modified_base 18: mod_base = OTHER; note = 2'-O-methyluridine-3'-phosphate
  modified_base 19: mod_base = OTHER; note = 2'-O-methyluridine-3'-phosphate
  modified_base 20: mod_base = OTHER; note = 2'-O-methylguanosine-3'-phosphate
  modified_base 21: mod_base = OTHER; note = 2'-O-methylguanosine-3'-phosphorothioate
  modified_base 22: mod_base = OTHER; note = 2'-O-methyladenosine-3'-phosphorothioate
  modified_base 23: mod_base = OTHER; note = 2'-O-methyladenosine
atagtcatatatagactttggaa

SEQ ID NO: 2470 - RNA, 21 nt, synthetic construct
  source 1..21: mol_type = other RNA
  modified_base 1: mod_base = OTHER; note = 2'-O-methyluridine-3'-phosphorothioate
  modified_base 2: mod_base = OTHER; note = 2'-O-methyladenosine-3'-phosphorothioate
  modified_base 3: mod_base = OTHER; note = 2'-O-methylcytidine-3'-phosphate
  modified_base 4: mod_base = OTHER; note = 2'-O-methyluridine-3'-phosphate
  modified_base 5: mod_base = OTHER; note = 2'-O-methyluridine-3'-phosphate
  modified_base 6: mod_base = OTHER; note = 2'-O-methylcytidine-3'-phosphate
  modified_base 7: mod_base = OTHER; note = 2'-deoxy-2'-fluorocytidine-3'-phosphate
  modified_base 8: mod_base = OTHER; note = 2'-O-methyladenosine-3'-phosphate
  modified_base 9: mod_base = OTHER; note = 2'-deoxy-2'-fluoroadenosine-3'-phosphate
  modified_base 10: mod_base = OTHER; note = 2'-deoxy-2'-fluoroadenosine-3'-phosphate
  modified_base 11: mod_base = OTHER; note = 2'-deoxy-2'-fluoroguanosine-3'-phosphate
  modified_base 12: mod_base = OTHER; note = 2'-O-methyluridine-3'-phosphate
  modified_base 13: mod_base = OTHER; note = 2'-O-methylcytidine-3'-phosphate
  modified_base 14: mod_base = OTHER; note = 2'-O-methyluridine-3'-phosphate
  modified_base 15: mod_base = OTHER; note = 2'-O-methyladenosine-3'-phosphate
  modified_base 16: mod_base = OTHER; note = 2'-O-methyluridine-3'-phosphate
  modified_base 17: mod_base = OTHER; note = 2'-O-methyladenosine-3'-phosphate
  modified_base 18: mod_base = OTHER; note = 2'-O-methyluridine-3'-phosphate
  modified_base 19: mod_base = OTHER; note = 2'-O-methyladenosine-3'-phosphate
  modified_base 20: mod_base = OTHER; note = 2'-O-methyluridine-3'-phosphate
  modified_base 21: mod_base = OTHER; note = 2'-O-methylguanosine-3'-phosphate ((2S,4R)-1-[29-[[2-(acetylamino)-2-deoxy-beta-D-galactopyra nosyl]oxy]-14,14-bis[[3-[[3-[[5-[[2-(acetylamino)-2-deoxy-b eta-D-galactopyranosyl]oxy]-1-oxopentyl]amino]propyl]amino] -3-oxopropoxy]methyl]-1,12,19,25-tetraoxo-16-oxa-13,20,24-t riazanonacos-1-yl]-4-hydroxy-2-pyrrolidinyl)methyl ester
tacttccaaagtctatatatg

SEQ ID NO: 2471 - RNA, 23 nt, synthetic construct
  source 1..23: mol_type = other RNA
  modified_base 1: mod_base = OTHER; note = 2'-O-methylcytidine-3'-phosphorothioate
  modified_base 2: mod_base = OTHER; note = 2'-deoxy-2'-fluoroadenosine-3'-phosphorothioate
  modified_base 3: mod_base = OTHER; note = 2'-O-methyluridine-3'-phosphate
  modified_base 4: mod_base = OTHER; note = 2'-O-methyladenosine-3'-phosphate
  modified_base 5: mod_base = OTHER; note = 2'-O-methyluridine-3'-phosphate
  modified_base 6: mod_base = OTHER; note = 2'-deoxy-2'-fluoroadenosine-3'-phosphate
  modified_base 7: mod_base = OTHER; note = 2'-O-methyluridine-3'-phosphate
  modified_base 8: mod_base = OTHER; note = 2'-deoxy-2'-fluoroadenosine-3'-phosphate
  modified_base 9: mod_base = OTHER; note = 2'-deoxy-2'-fluoroguanosine-3'-phosphate
  modified_base 10: mod_base = OTHER; note = 2'-O-methyladenosine-3'-phosphate
  modified_base 11: mod_base = OTHER; note = 2'-O-methylcytidine-3'-phosphate
  modified_base 12: mod_base = OTHER; note = 2'-O-methyluridine-3'-phosphate
  modified_base 13: mod_base = OTHER; note = 2'-O-methyluridine-3'-phosphate
  modified_base 14: mod_base = OTHER; note = 2'-deoxy-2'-fluorouridine-3'-phosphate
  modified_base 15: mod_base = OTHER; note = 2'-O-methylguanosine-3'-phosphate
  modified_base 16: mod_base = OTHER; note = 2'-deoxy-2'-fluoroguanosine-3'-phosphate
  modified_base 17: mod_base = OTHER; note = 2'-O-methyladenosine-3'-phosphate
  modified_base 18: mod_base = OTHER; note = 2'-O-methyladenosine-3'-phosphate
  modified_base 19: mod_base = OTHER; note = 2'-O-methylguanosine-3'-phosphate
  modified_base 20: mod_base = OTHER; note = 2'-O-methyluridine-3'-phosphate
  modified_base 21: mod_base = OTHER; note = 2'-O-methyladenosine-3'-phosphorothioate
  modified_base 22: mod_base = OTHER; note = 2'-O-methylcytidine-3'-phosphorothioate
  modified_base 23: mod_base = OTHER; note = 2'-O-methyluridine
catatatagactttggaagtact

SEQ ID NO: 2472 - RNA, 21 nt, synthetic construct
  source 1..21: mol_type = other RNA
  modified_base 1: mod_base = OTHER; note = 2'-O-methylguanosine-3'-phosphorothioate
  modified_base 2: mod_base = OTHER; note = 2'-O-methyluridine-3'-phosphorothioate
  modified_base 3: mod_base = OTHER; note = 2'-O-methyladenosine-3'-phosphate
  modified_base 4: mod_base = OTHER; note = 2'-O-methylcytidine-3'-phosphate
  modified_base 5: mod_base = OTHER; note = 2'-O-methyluridine-3'-phosphate
  modified_base 6: mod_base = OTHER; note = 2'-O-methyluridine-3'-phosphate
  modified_base 7: mod_base = OTHER; note = 2'-deoxy-2'-fluorocytidine-3'-phosphate
  modified_base 8: mod_base = OTHER; note = 2'-O-methylcytidine-3'-phosphate
  modified_base 9: mod_base = OTHER; note = 2'-deoxy-2'-fluoroadenosine-3'-phosphate
  modified_base 10: mod_base = OTHER; note = 2'-deoxy-2'-fluoroadenosine-3'-phosphate
  modified_base 11: mod_base = OTHER; note = 2'-deoxy-2'-fluoroadenosine-3'-phosphate
  modified_base 12: mod_base = OTHER; note = 2'-O-methylguanosine-3'-phosphate
  modified_base 13: mod_base = OTHER; note = 2'-O-methyluridine-3'-phosphate
  modified_base 14: mod_base = OTHER; note = 2'-O-methylcytidine-3'-phosphate
  modified_base 15: mod_base = OTHER; note = 2'-O-methyluridine-3'-phosphate
  modified_base 16: mod_base = OTHER; note = 2'-O-methyladenosine-3'-phosphate
  modified_base 17: mod_base = OTHER; note = 2'-O-methyluridine-3'-phosphate
  modified_base 18: mod_base = OTHER; note = 2'-O-methyladenosine-3'-phosphate
  modified_base 19: mod_base = OTHER; note = 2'-O-methyluridine-3'-phosphate
  modified_base 20: mod_base = OTHER; note = 2'-O-methyladenosine-3'-phosphate
  modified_base 21: mod_base = OTHER; note = 2'-O-methyluridine-3'-phosphate ((2S,4R)-1-[29-[[2-(acetylamino)-2-deoxy-beta-D-galactopyra nosyl]oxy]-14,14-bis[[3-[[3-[[5-[[2-(acetylamino)-2-deoxy-b eta-D-galactopyranosyl]oxy]-1-oxopentyl]amino]propyl]amino] -3-oxopropoxy]methyl]-1,12,19,25-tetraoxo-16-oxa-13,20,24-t riazanonacos-1-yl]-4-hydroxy-2-pyrrolidinyl)methyl ester
gtacttccaaagtctatatat

SEQ ID NO: 2473 - RNA, 23 nt, synthetic construct
  source 1..23: mol_type = other RNA
  modified_base 1: mod_base = OTHER; note = 2'-O-methyladenosine-3'-phosphorothioate
  modified_base 2: mod_base = OTHER; note = 2'-deoxy-2'-fluorouridine-3'-phosphorothioate
  modified_base 3: mod_base = OTHER; note = 2'-O-methyladenosine-3'-phosphate
  modified_base 4: mod_base = OTHER; note = 2'-O-methyluridine-3'-phosphate
  modified_base 5: mod_base = OTHER; note = 2'-O-methyladenosine-3'-phosphate
  modified_base 6: mod_base = OTHER; note = 2'-deoxy-2'-fluorouridine-3'-phosphate
  modified_base 7: mod_base = OTHER; note = 2'-O-methyladenosine-3'-phosphate
  modified_base 8: mod_base = OTHER; note = 2'-deoxy-2'-fluoroguanosine-3'-phosphate
  modified_base 9: mod_base = OTHER; note = 2'-deoxy-2'-fluoroadenosine-3'-phosphate
  modified_base 10: mod_base = OTHER; note = 2'-O-methylcytidine-3'-phosphate
  modified_base 11: mod_base = OTHER; note = 2'-O-methyluridine-3'-phosphate
  modified_base 12: mod_base = OTHER; note = 2'-O-methyluridine-3'-phosphate
  modified_base 13: mod_base = OTHER; note = 2'-O-methyluridine-3'-phosphate
  modified_base 14: mod_base = OTHER; note = 2'-deoxy-2'-fluoroguanosine-3'-phosphate
  modified_base 15: mod_base = OTHER; note = 2'-O-methylguanosine-3'-phosphate
  modified_base 16: mod_base = OTHER; note = 2'-deoxy-2'-fluoroadenosine-3'-phosphate
  modified_base 17: mod_base = OTHER; note = 2'-O-methyladenosine-3'-phosphate
  modified_base 18: mod_base = OTHER; note = 2'-O-methylguanosine-3'-phosphate
  modified_base 19: mod_base = OTHER; note = 2'-O-methyluridine-3'-phosphate
  modified_base 20: mod_base = OTHER; note = 2'-O-methyladenosine-3'-phosphate
  modified_base 21: mod_base = OTHER; note = 2'-O-methylcytidine-3'-phosphorothioate
  modified_base 22: mod_base = OTHER; note = 2'-O-methyluridine-3'-phosphorothioate
  modified_base 23: mod_base = OTHER; note = 2'-O-methylguanosine
atatatagactttggaagtactg

SEQ ID NO: 2474 - RNA, 21 nt, synthetic construct
  source 1..21: mol_type = other RNA
  modified_base 1: mod_base = OTHER; note = 2'-O-methyluridine-3'-phosphorothioate
  modified_base 2: mod_base = OTHER; note = 2'-O-methyluridine-3'-phosphorothioate
  modified_base 3: mod_base = OTHER; note = 2'-O-methyladenosine-3'-phosphate
  modified_base 4: mod_base = OTHER; note = 2'-O-methyluridine-3'-phosphate
  modified_base 5: mod_base = OTHER; note = 2'-O-methylguanosine-3'-phosphate
  modified_base 6: mod_base = OTHER; note = 2'-O-methyladenosine-3'-phosphate
  modified_base 7: mod_base = OTHER; note = 2'-deoxy-2'-fluoroadenosine-3'-phosphate
  modified_base 8: mod_base = OTHER; note = 2'-O-methylcytidine-3'-phosphate
  modified_base 9: mod_base = OTHER; note = 2'-deoxy-2'-fluoroadenosine-3'-phosphate
  modified_base 10: mod_base = OTHER; note = 2'-deoxy-2'-fluoroadenosine-3'-phosphate
  modified_base 11: mod_base = OTHER; note = 2'-deoxy-2'-fluorocytidine-3'-phosphate
  modified_base 12: mod_base = OTHER; note = 2'-O-methyladenosine-3'-phosphate
  modified_base 13: mod_base = OTHER; note = 2'-O-methyluridine-3'-phosphate
  modified_base 14: mod_base = OTHER; note = 2'-O-methylguanosine-3'-phosphate
  modified_base 15: mod_base = OTHER; note = 2'-O-methylcytidine-3'-phosphate
  modified_base 16: mod_base = OTHER; note = 2'-O-methyluridine-3'-phosphate
  modified_base 17: mod_base = OTHER; note = 2'-O-methyladenosine-3'-phosphate
  modified_base 18: mod_base = OTHER; note = 2'-O-methyladenosine-3'-phosphate
  modified_base 19: mod_base = OTHER; note = 2'-O-methyladenosine-3'-phosphate
  modified_base 20: mod_base = OTHER; note = 2'-O-methyluridine-3'-phosphate
  modified_base 21: mod_base = OTHER; note = 2'-O-methylcytidine-3'-phosphate ((2S,4R)-1-[29-[[2-(acetylamino)-2-deoxy-beta-D-galactopyra nosyl]oxy]-14,14-bis[[3-[[3-[[5-[[2-(acetylamino)-2-deoxy-b eta-D-galactopyranosyl]oxy]-1-oxopentyl]amino]propyl]amino] -3-oxopropoxy]methyl]-1,12,19,25-tetraoxo-16-oxa-13,20,24-t riazanonacos-1-yl]-4-hydroxy-2-pyrrolidinyl)methyl ester
ttatgaacaacatgctaaatc

SEQ ID NO: 2475 - RNA, 23 nt, synthetic construct
  source 1..23: mol_type = other RNA
  modified_base 1: mod_base = OTHER; note = 2'-O-methylguanosine-3'-phosphorothioate
  modified_base 2: mod_base = OTHER; note = 2'-deoxy-2'-fluoroadenosine-3'-phosphorothioate
  modified_base 3: mod_base = OTHER; note = 2'-O-methyluridine-3'-phosphate
  modified_base 4: mod_base = OTHER; note = 2'-O-methyluridine-3'-phosphate
  modified_base 5: mod_base = OTHER; note = 2'-O-methyluridine-3'-phosphate
  modified_base 6: mod_base = OTHER; note = 2'-deoxy-2'-fluoroadenosine-3'-phosphate
  modified_base 7: mod_base = OTHER; note = 2'-O-methylguanosine-3'-phosphate
  modified_base 8: mod_base = OTHER; note = 2'-deoxy-2'-fluorocytidine-3'-phosphate
  modified_base 9: mod_base = OTHER; note = 2'-deoxy-2'-fluoroadenosine-3'-phosphate
  modified_base 10: mod_base = OTHER; note = 2'-O-methyluridine-3'-phosphate
  modified_base 11: mod_base = OTHER; note = 2'-O-methylguanosine-3'-phosphate
  modified_base 12: mod_base = OTHER; note = 2'-O-methyluridine-3'-phosphate
  modified_base 13: mod_base = OTHER; note = 2'-O-methyluridine-3'-phosphate
  modified_base 14: mod_base = OTHER; note = 2'-deoxy-2'-fluoroguanosine-3'-phosphate
  modified_base 15: mod_base = OTHER; note = 2'-O-methyluridine-3'-phosphate
  modified_base 16: mod_base = OTHER; note = 2'-deoxy-2'-fluorouridine-3'-phosphate
  modified_base 17: mod_base = OTHER; note = 2'-O-methylcytidine-3'-phosphate
  modified_base 18: mod_base = OTHER; note = 2'-O-methyladenosine-3'-phosphate
  modified_base 19: mod_base = OTHER; note = 2'-O-methyluridine-3'-phosphate
  modified_base 20: mod_base = OTHER; note = 2'-O-methyladenosine-3'-phosphate
  modified_base 21: mod_base = OTHER; note = 2'-O-methyladenosine-3'-phosphorothioate
  modified_base 22: mod_base = OTHER; note = 2'-O-methyluridine-3'-phosphorothioate
  modified_base 23: mod_base = OTHER; note = 2'-O-methylcytidine
gatttagcatgttgttcataatc

SEQ ID NO: 2476 - RNA, 21 nt, synthetic construct
  source 1..21: mol_type = other RNA
  modified_base 1: mod_base = OTHER; note = 2'-O-methyluridine-3'-phosphorothioate
  modified_base 2: mod_base = OTHER; note = 2'-O-methyladenosine-3'-phosphorothioate
  modified_base 3: mod_base = OTHER; note = 2'-O-methyluridine-3'-phosphate
  modified_base 4: mod_base = OTHER; note = 2'-O-methylguanosine-3'-phosphate
  modified_base 5: mod_base = OTHER; note = 2'-O-methyladenosine-3'-phosphate
  modified_base 6: mod_base = OTHER; note = 2'-O-methyladenosine-3'-phosphate
  modified_base 7: mod_base = OTHER; note = 2'-deoxy-2'-fluorocytidine-3'-phosphate
  modified_base 8: mod_base = OTHER; note = 2'-O-methyladenosine-3'-phosphate
  modified_base 9: mod_base = OTHER; note = 2'-deoxy-2'-fluoroadenosine-3'-phosphate
  modified_base 10: mod_base = OTHER; note = 2'-deoxy-2'-fluorocytidine-3'-phosphate
  modified_base 11: mod_base = OTHER; note = 2'-deoxy-2'-fluoroadenosine-3'-phosphate
  modified_base 12: mod_base = OTHER; note = 2'-O-methyluridine-3'-phosphate
  modified_base 13: mod_base = OTHER; note = 2'-O-methylguanosine-3'-phosphate
  modified_base 14: mod_base = OTHER; note = 2'-O-methylcytidine-3'-phosphate
  modified_base 15: mod_base = OTHER; note = 2'-O-methyluridine-3'-phosphate
  modified_base 16: mod_base = OTHER; note = 2'-O-methyladenosine-3'-phosphate
  modified_base 17: mod_base = OTHER; note = 2'-O-methyladenosine-3'-phosphate
  modified_base 18: mod_base = OTHER; note = 2'-O-methyladenosine-3'-phosphate
  modified_base 19: mod_base = OTHER; note = 2'-O-methyluridine-3'-phosphate
  modified_base 20: mod_base = OTHER; note = 2'-O-methylcytidine-3'-phosphate
  modified_base 21: mod_base = OTHER; note = 2'-O-methyladenosine-3'-phosphate ((2S,4R)-1-[29-[[2-(acetylamino)-2-deoxy-beta-D-galactopyra nosyl]oxy]-14,14-bis[[3-[[3-[[5-[[2-(acetylamino)-2-deoxy-b eta-D-galactopyranosyl]oxy]-1-oxopentyl]amino]propyl]amino] -3-oxopropoxy]methyl]-1,12,19,25-tetraoxo-16-oxa-13,20,24-t riazanonacos-1-yl]-4-hydroxy-2-pyrrolidinyl)methyl ester
tatgaacaacatgctaaatca

SEQ ID NO: 2477 - RNA, 23 nt, synthetic construct
  source 1..23: mol_type = other RNA
  modified_base 1: mod_base = OTHER; note = 2'-O-methyluridine-3'-phosphorothioate
  modified_base 2: mod_base = OTHER; note = 2'-deoxy-2'-fluoroguanosine-3'-phosphorothioate
  modified_base 3: mod_base = OTHER; note = 2'-O-methyladenosine-3'-phosphate
  modified_base 4: mod_base = OTHER; note = 2'-O-methyluridine-3'-phosphate
  modified_base 5: mod_base = OTHER; note = 2'-O-methyluridine-3'-phosphate
  modified_base 6: mod_base = OTHER; note = 2'-deoxy-2'-fluorouridine-3'-phosphate
  modified_base 7: mod_base = OTHER; note = 2'-O-methyladenosine-3'-phosphate
  modified_base 8: mod_base = OTHER; note = 2'-deoxy-2'-fluoroguanosine-3'-phosphate
  modified_base 9: mod_base = OTHER; note = 2'-deoxy-2'-fluorocytidine-3'-phosphate
  modified_base 10: mod_base = OTHER; note = 2'-O-methyladenosine-3'-phosphate
  modified_base 11: mod_base = OTHER; note = 2'-O-methyluridine-3'-phosphate
  modified_base 12: mod_base = OTHER; note = 2'-O-methylguanosine-3'-phosphate
  modified_base 13: mod_base = OTHER; note = 2'-O-methyluridine-3'-phosphate
  modified_base 14: mod_base = OTHER; note = 2'-deoxy-2'-fluorouridine-3'-phosphate
  modified_base 15: mod_base = OTHER; note = 2'-O-methylguanosine-3'-phosphate
  modified_base 16: mod_base = OTHER; note = 2'-deoxy-2'-fluorouridine-3'-phosphate
  modified_base 17: mod_base = OTHER; note = 2'-O-methyluridine-3'-phosphate
  modified_base 18: mod_base = OTHER; note = 2'-O-methylcytidine-3'-phosphate
  modified_base 19: mod_base = OTHER; note = 2'-O-methyladenosine-3'-phosphate
  modified_base 20: mod_base = OTHER; note = 2'-O-methyluridine-3'-phosphate
  modified_base 21: mod_base = OTHER; note = 2'-O-methyladenosine-3'-phosphorothioate
  modified_base 22: mod_base = OTHER; note = 2'-O-methyladenosine-3'-phosphorothioate
  modified_base 23: mod_base = OTHER; note = 2'-O-methyluridine
tgatttagcatgttgttcataat

SEQ ID NO: 2478 - RNA, 21 nt, synthetic construct
  source 1..21: mol_type = other RNA
  modified_base 1: mod_base = OTHER; note = 2'-O-methyladenosine-3'-phosphorothioate
  modified_base 2: mod_base = OTHER; note = 2'-O-methyluridine-3'-phosphorothioate
  modified_base 3: mod_base = OTHER; note = 2'-O-methylguanosine-3'-phosphate
  modified_base 4: mod_base = OTHER; note = 2'-O-methyladenosine-3'-phosphate
  modified_base 5: mod_base = OTHER; note = 2'-O-methyluridine-3'-phosphate
  modified_base 6: mod_base = OTHER; note = 2'-O-methyluridine-3'-phosphate
  modified_base 7: mod_base = OTHER; note = 2'-deoxy-2'-fluoroadenosine-3'-phosphate
  modified_base 8: mod_base = OTHER; note = 2'-O-methyluridine-3'-phosphate
  modified_base 9: mod_base = OTHER; note = 2'-deoxy-2'-fluoroguanosine-3'-phosphate
  modified_base 10: mod_base = OTHER; note = 2'-deoxy-2'-fluoroadenosine-3'-phosphate
  modified_base 11: mod_base = OTHER; note = 2'-deoxy-2'-fluoroadenosine-3'-phosphate
  modified_base 12: mod_base = OTHER; note = 2'-O-methylcytidine-3'-phosphate
  modified_base 13: mod_base = OTHER; note = 2'-O-methyladenosine-3'-phosphate
  modified_base 14: mod_base = OTHER; note = 2'-O-methyladenosine-3'-phosphate
  modified_base 15: mod_base = OTHER; note = 2'-O-methylcytidine-3'-phosphate
  modified_base 16: mod_base = OTHER; note = 2'-O-methyladenosine-3'-phosphate
  modified_base 17: mod_base = OTHER; note = 2'-O-methyluridine-3'-phosphate
  modified_base 18: mod_base = OTHER; note = 2'-O-methylguanosine-3'-phosphate
  modified_base 19: mod_base = OTHER; note = 2'-O-methylcytidine-3'-phosphate
  modified_base 20: mod_base = OTHER; note = 2'-O-methyluridine-3'-phosphate
  modified_base 21: mod_base = OTHER; note = 2'-O-methyladenosine-3'-phosphate ((2S,4R)-1-[29-[[2-(acetylamino)-2-deoxy-beta-D-galactopyra nosyl]oxy]-14,14-bis[[3-[[3-[[5-[[2-(acetylamino)-2-deoxy-b eta-D-galactopyranosyl]oxy]-1-oxopentyl]amino]propyl]amino] -3-oxopropoxy]methyl]-1,12,19,25-tetraoxo-16-oxa-13,20,24-t riazanonacos-1-yl]-4-hydroxy-2-pyrrolidinyl)methyl ester
atgattatgaacaacatgcta

SEQ ID NO: 2479 - RNA, 23 nt, synthetic construct
  source 1..23: mol_type = other RNA
  modified_base 1: mod_base = OTHER; note = 2'-O-methyluridine-3'-phosphorothioate
  modified_base 2: mod_base = OTHER; note = 2'-deoxy-2'-fluoroadenosine-3'-phosphorothioate
  modified_base 3: mod_base = OTHER; note = 2'-O-methylguanosine-3'-phosphate
  modified_base 4: mod_base = OTHER; note = 2'-O-methylcytidine-3'-phosphate
  modified_base 5: mod_base = OTHER; note = 2'-O-methyladenosine-3'-phosphate
  modified_base 6: mod_base = OTHER; note = 2'-deoxy-2'-fluorouridine-3'-phosphate
  modified_base 7: mod_base = OTHER; note = 2'-O-methylguanosine-3'-phosphate
  modified_base 8: mod_base = OTHER; note = 2'-deoxy-2'-fluorouridine-3'-phosphate
  modified_base 9: mod_base = OTHER; note = 2'-deoxy-2'-fluorouridine-3'-phosphate
  modified_base 10: mod_base = OTHER; note = 2'-O-methylguanosine-3'-phosphate
  modified_base 11: mod_base = OTHER; note = 2'-O-methyluridine-3'-phosphate
  modified_base 12: mod_base = OTHER; note = 2'-O-methyluridine-3'-phosphate
  modified_base 13: mod_base = OTHER; note = 2'-O-methylcytidine-3'-phosphate
  modified_base 14: mod_base = OTHER; note = 2'-deoxy-2'-fluoroadenosine-3'-phosphate
  modified_base 15: mod_base = OTHER; note = 2'-O-methyluridine-3'-phosphate
  modified_base 16: mod_base = OTHER; note = 2'-deoxy-2'-fluoroadenosine-3'-phosphate
  modified_base 17: mod_base = OTHER; note = 2'-O-methyladenosine-3'-phosphate
  modified_base 18: mod_base = OTHER; note = 2'-O-methyluridine-3'-phosphate
  modified_base 19: mod_base = OTHER; note = 2'-O-methylcytidine-3'-phosphate
  modified_base 20: mod_base = OTHER; note = 2'-O-methyladenosine-3'-phosphate
  modified_base 21: mod_base = OTHER; note = 2'-O-methyluridine-3'-phosphorothioate
  modified_base 22: mod_base = OTHER; note = 2'-O-methyluridine-3'-phosphorothioate
  modified_base 23: mod_base = OTHER; note = 2'-O-methylguanosine
tagcatgttgttcataatcattg

SEQ ID NO: 2480 - RNA, 21 nt, synthetic construct
  source 1..21: mol_type = other RNA
  modified_base 1: mod_base = OTHER; note = 2'-O-methyladenosine-3'-phosphorothioate
  modified_base 2: mod_base = OTHER; note = 2'-O-methyladenosine-3'-phosphorothioate
  modified_base 3: mod_base = OTHER; note = 2'-O-methyluridine-3'-phosphate
  modified_base 4: mod_base = OTHER; note = 2'-O-methylguanosine-3'-phosphate
  modified_base 5: mod_base = OTHER; note = 2'-O-methyladenosine-3'-phosphate
  modified_base 6: mod_base = OTHER; note = 2'-O-methyluridine-3'-phosphate
  modified_base 7: mod_base = OTHER; note = 2'-deoxy-2'-fluorouridine-3'-phosphate
  modified_base 8: mod_base = OTHER; note = 2'-O-methyladenosine-3'-phosphate
  modified_base 9: mod_base = OTHER; note = 2'-deoxy-2'-fluorouridine-3'-phosphate
  modified_base 10: mod_base = OTHER; note = 2'-deoxy-2'-fluoroguanosine-3'-phosphate
  modified_base 11: mod_base = OTHER; note = 2'-deoxy-2'-fluoroadenosine-3'-phosphate
  modified_base 12: mod_base = OTHER; note = 2'-O-methyladenosine-3'-phosphate
  modified_base 13: mod_base = OTHER; note = 2'-O-methylcytidine-3'-phosphate
  modified_base 14: mod_base = OTHER; note = 2'-O-methyladenosine-3'-phosphate
  modified_base 15: mod_base = OTHER; note = 2'-O-methyladenosine-3'-phosphate
  modified_base 16: mod_base = OTHER; note = 2'-O-methylcytidine-3'-phosphate
  modified_base 17: mod_base = OTHER; note = 2'-O-methyladenosine-3'-phosphate
  modified_base 18: mod_base = OTHER; note = 2'-O-methyluridine-3'-phosphate
  modified_base 19: mod_base = OTHER; note = 2'-O-methylguanosine-3'-phosphate
  modified_base 20: mod_base = OTHER; note = 2'-O-methylcytidine-3'-phosphate
  modified_base 21: mod_base = OTHER; note = 2'-O-methyluridine-3'-phosphate ((2S,4R)-1-[29-[[2-(acetylamino)-2-deoxy-beta-D-galactopyra nosyl]oxy]-14,14-bis[[3-[[3-[[5-[[2-(acetylamino)-2-deoxy-b eta-D-galactopyranosyl]oxy]-1-oxopentyl]amino]propyl]amino] -3-oxopropoxy]methyl]-1,12,19,25-tetraoxo-16-oxa-13,20,24-t riazanonacos-1-yl]-4-hydroxy-2-pyrrolidinyl)methyl ester
aatgattatgaacaacatgct

SEQ ID NO: 2481 - RNA, 23 nt, synthetic construct
  source 1..23: mol_type = other RNA
  modified_base 1: mod_base = OTHER; note = 2'-O-methyladenosine-3'-phosphorothioate
  modified_base 2: mod_base = OTHER; note = 2'-deoxy-2'-fluoroguanosine-3'-phosphorothioate
  modified_base 3: mod_base = OTHER; note = 2'-O-methylcytidine-3'-phosphate
  modified_base 4: mod_base = OTHER; note = 2'-O-methyladenosine-3'-phosphate
  modified_base 5: mod_base = OTHER; note = 2'-O-methyluridine-3'-phosphate
  modified_base 6: mod_base = OTHER; note = 2'-deoxy-2'-fluoroguanosine-3'-phosphate
  modified_base 7: mod_base = OTHER; note = 2'-O-methyluridine-3'-phosphate
  modified_base 8: mod_base = OTHER; note = 2'-deoxy-2'-fluorouridine-3'-phosphate
  modified_base 9: mod_base = OTHER; note = 2'-deoxy-2'-fluoroguanosine-3'-phosphate
  modified_base 10: mod_base = OTHER; note = 2'-O-methyluridine-3'-phosphate
  modified_base 11: mod_base = OTHER; note = 2'-O-methyluridine-3'-phosphate
  modified_base 12: mod_base = OTHER; note = 2'-O-methylcytidine-3'-phosphate
  modified_base 13: mod_base = OTHER; note = 2'-O-methyladenosine-3'-phosphate
  modified_base 14: mod_base = OTHER; note = 2'-deoxy-2'-fluorouridine-3'-phosphate
  modified_base 15: mod_base = OTHER; note = 2'-O-methyladenosine-3'-phosphate
  modified_base 16: mod_base = OTHER; note = 2'-deoxy-2'-fluoroadenosine-3'-phosphate
  modified_base 17: mod_base = OTHER; note = 2'-O-methyluridine-3'-phosphate
  modified_base 18: mod_base = OTHER; note = 2'-O-methylcytidine-3'-phosphate
  modified_base 19: mod_base = OTHER; note = 2'-O-methyladenosine-3'-phosphate
  modified_base 20: mod_base = OTHER; note = 2'-O-methyluridine-3'-phosphate
  modified_base 21: mod_base = OTHER; note = 2'-O-methyluridine-3'-phosphorothioate
  modified_base 22: mod_base = OTHER; note = 2'-O-methylguanosine-3'-phosphorothioate
  modified_base 23: mod_base = OTHER; note = 2'-O-methyladenosine
agcatgttgttcataatcattga

SEQ ID NO: 2482 - RNA, 21 nt, synthetic construct
  source 1..21: mol_type = other RNA
  modified_base 1: mod_base = OTHER; note = 2'-O-methyladenosine-3'-phosphorothioate
  modified_base 2: mod_base = OTHER; note = 2'-O-methyladenosine-3'-phosphorothioate
  modified_base 3: mod_base = OTHER; note = 2'-O-methyluridine-3'-phosphate
  modified_base 4: mod_base = OTHER; note = 2'-O-methyluridine-3'-phosphate
  modified_base 5: mod_base = OTHER; note = 2'-O-methylcytidine-3'-phosphate
  modified_base 6: mod_base = OTHER; note = 2'-O-methylcytidine-3'-phosphate
  modified_base 7: mod_base = OTHER; note = 2'-deoxy-2'-fluorocytidine-3'-phosphate
  modified_base 8: mod_base = OTHER; note = 2'-O-methylcytidine-3'-phosphate
  modified_base 9: mod_base = OTHER; note = 2'-deoxy-2'-fluoroadenosine-3'-phosphate
  modified_base 10: mod_base = OTHER; note = 2'-deoxy-2'-fluorocytidine-3'-phosphate
  modified_base 11: mod_base = OTHER; note = 2'-deoxy-2'-fluorouridine-3'-phosphate
  modified_base 12: mod_base = OTHER; note = 2'-O-methyluridine-3'-phosphate
  modified_base 13: mod_base = OTHER; note = 2'-O-methylcytidine-3'-phosphate
  modified_base 14: mod_base = OTHER; note = 2'-O-methyladenosine-3'-phosphate
  modified_base 15: mod_base = OTHER; note = 2'-O-methyladenosine-3'-phosphate
  modified_base 16: mod_base = OTHER; note = 2'-O-methyluridine-3'-phosphate
  modified_base 17: mod_base = OTHER; note = 2'-O-methyladenosine-3'-phosphate
  modified_base 18: mod_base = OTHER; note = 2'-O-methylcytidine-3'-phosphate
  modified_base 19: mod_base = OTHER; note = 2'-O-methyladenosine-3'-phosphate
  modified_base 20: mod_base = OTHER; note = 2'-O-methyladenosine-3'-phosphate
  modified_base 21: mod_base = OTHER; note = 2'-O-methyladenosine-3'-phosphate ((2S,4R)-1-[29-[[2-(acetylamino)-2-deoxy-beta-D-galactopyra nosyl]oxy]-14,14-bis[[3-[[3-[[5-[[2-(acetylamino)-2-deoxy-b eta-D-galactopyranosyl]oxy]-1-oxopentyl]amino]propyl]amino] -3-oxopropoxy]methyl]-1,12,19,25-tetraoxo-16-oxa-13,20,24-t riazanonacos-1-yl]-4-hydroxy-2-pyrrolidinyl)methyl ester
aattccccacttcaatacaaa

SEQ ID NO: 2483 - RNA, 23 nt, synthetic construct
  source 1..23: mol_type = other RNA
  modified_base 1: mod_base = OTHER; note = 2'-O-methyluridine-3'-phosphorothioate
  modified_base 2: mod_base = OTHER; note = 2'-deoxy-2'-fluorouridine-3'-phosphorothioate
  modified_base 3: mod_base = OTHER; note = 2'-O-methyluridine-3'-phosphate
  modified_base 4: mod_base = OTHER; note = 2'-O-methylguanosine-3'-phosphate
  modified_base 5: mod_base = OTHER; note = 2'-O-methyluridine-3'-phosphate
  modified_base 6: mod_base = OTHER; note = 2'-deoxy-2'-fluoroadenosine-3'-phosphate
  modified_base 7: mod_base = OTHER; note = 2'-O-methyluridine-3'-phosphate
  modified_base 8: mod_base = OTHER; note = 2'-deoxy-2'-fluorouridine-3'-phosphate
  modified_base 9: mod_base = OTHER; note = 2'-deoxy-2'-fluoroguanosine-3'-phosphate
  modified_base 10: mod_base = OTHER; note = 2'-O-methyladenosine-3'-phosphate
  modified_base 11: mod_base = OTHER; note = 2'-O-methyladenosine-3'-phosphate
  modified_base 12: mod_base = OTHER; note = 2'-O-methylguanosine-3'-phosphate
  modified_base 13: mod_base = OTHER; note = 2'-O-methyluridine-3'-phosphate
  modified_base 14: mod_base = OTHER; note = 2'-deoxy-2'-fluoroguanosine-3'-phosphate
  modified_base 15: mod_base = OTHER; note = 2'-O-methylguanosine-3'-phosphate
  modified_base 16: mod_base = OTHER; note = 2'-deoxy-2'-fluoroguanosine-3'-phosphate
  modified_base 17: mod_base = OTHER; note = 2'-O-methylguanosine-3'-phosphate
  modified_base 18: mod_base = OTHER; note = 2'-O-methyladenosine-3'-phosphate
  modified_base 19: mod_base = OTHER; note = 2'-O-methyladenosine-3'-phosphate
  modified_base 20: mod_base = OTHER; note = 2'-O-methyluridine-3'-phosphate
  modified_base 21: mod_base = OTHER; note = 2'-O-methyluridine-3'-phosphorothioate
  modified_base 22: mod_base = OTHER; note = 2'-O-methyladenosine-3'-phosphorothioate
  modified_base 23: mod_base = OTHER; note = 2'-O-methylcytidine
tttgtattgaagtggggaattac

SEQ ID NO: 2484 - RNA, 21 nt, synthetic construct
  source 1..21: mol_type = other RNA
  modified_base 1: mod_base = OTHER; note = 2'-O-methyladenosine-3'-phosphorothioate
  modified_base 2: mod_base = OTHER; note = 2'-O-methyluridine-3'-phosphorothioate
  modified_base 3: mod_base = OTHER; note = 2'-O-methyluridine-3'-phosphate
  modified_base 4: mod_base = OTHER; note = 2'-O-methylcytidine-3'-phosphate
  modified_base 5: mod_base = OTHER; note = 2'-O-methylcytidine-3'-phosphate
  modified_base 6: mod_base = OTHER; note = 2'-O-methylcytidine-3'-phosphate
  modified_base 7: mod_base = OTHER; note = 2'-deoxy-2'-fluorocytidine-3'-phosphate
  modified_base 8: mod_base = OTHER; note = 2'-O-methyladenosine-3'-phosphate
  modified_base 9: mod_base = OTHER; note = 2'-deoxy-2'-fluorocytidine-3'-phosphate
  modified_base 10: mod_base = OTHER; note = 2'-deoxy-2'-fluorouridine-3'-phosphate
  modified_base 11: mod_base = OTHER; note = 2'-deoxy-2'-fluorouridine-3'-phosphate
  modified_base 12: mod_base = OTHER; note = 2'-O-methylcytidine-3'-phosphate
  modified_base 13: mod_base = OTHER; note = 2'-O-methyladenosine-3'-phosphate
  modified_base 14: mod_base = OTHER; note = 2'-O-methyladenosine-3'-phosphate
  modified_base 15: mod_base = OTHER; note = 2'-O-methyluridine-3'-phosphate
  modified_base 16: mod_base = OTHER; note = 2'-O-methyladenosine-3'-phosphate
  modified_base 17: mod_base = OTHER; note = 2'-O-methylcytidine-3'-phosphate
  modified_base 18: mod_base = OTHER; note = 2'-O-methyladenosine-3'-phosphate
  modified_base 19: mod_base = OTHER; note = 2'-O-methyladenosine-3'-phosphate
  modified_base 20: mod_base = OTHER; note = 2'-O-methyladenosine-3'-phosphate
  modified_base 21: mod_base = OTHER; note = 2'-O-methylguanosine-3'-phosphate ((2S,4R)-1-[29-[[2-(acetylamino)-2-deoxy-beta-D-galactopyra nosyl]oxy]-14,14-bis[[3-[[3-[[5-[[2-(acetylamino)-2-deoxy-b eta-D-galactopyranosyl]oxy]-1-oxopentyl]amino]propyl]amino] -3-oxopropoxy]methyl]-1,12,19,25-tetraoxo-16-oxa-13,20,24-t riazanonacos-1-yl]-4-hydroxy-2-pyrrolidinyl)methyl ester
attccccacttcaatacaaag

SEQ ID NO: 2485 - RNA, 23 nt, synthetic construct
  source 1..23: mol_type = other RNA
  modified_base 1: mod_base = OTHER; note = 2'-O-methylcytidine-3'-phosphorothioate
  modified_base 2: mod_base = OTHER; note = 2'-deoxy-2'-fluorouridine-3'-phosphorothioate
  modified_base 3: mod_base = OTHER; note = 2'-O-methyluridine-3'-phosphate
  modified_base 4: mod_base = OTHER; note = 2'-O-methyluridine-3'-phosphate
  modified_base 5: mod_base = OTHER; note = 2'-O-methylguanosine-3'-phosphate
  modified_base 6: mod_base = OTHER; note = 2'-deoxy-2'-fluorouridine-3'-phosphate
  modified_base 7: mod_base = OTHER; note = 2'-O-methyladenosine-3'-phosphate
  modified_base 8: mod_base = OTHER; note = 2'-deoxy-2'-fluorouridine-3'-phosphate
  modified_base 9: mod_base = OTHER; note = 2'-deoxy-2'-fluorouridine-3'-phosphate
  modified_base 10: mod_base = OTHER; note = 2'-O-methylguanosine-3'-phosphate
  modified_base 11: mod_base = OTHER; note = 2'-O-methyladenosine-3'-phosphate
  modified_base 12: mod_base = OTHER; note = 2'-O-methyladenosine-3'-phosphate
  modified_base 13: mod_base = OTHER; note = 2'-O-methylguanosine-3'-phosphate
  modified_base 14: mod_base = OTHER; note = 2'-deoxy-2'-fluorouridine-3'-phosphate
  modified_base 15: mod_base = OTHER; note = 2'-O-methylguanosine-3'-phosphate
  modified_base 16: mod_base = OTHER; note = 2'-deoxy-2'-fluoroguanosine-3'-phosphate
  modified_base 17: mod_base = OTHER; note = 2'-O-methylguanosine-3'-phosphate
  modified_base 18: mod_base = OTHER; note = 2'-O-methylguanosine-3'-phosphate
  modified_base 19: mod_base = OTHER; note = 2'-O-methyladenosine-3'-phosphate
  modified_base 20: mod_base = OTHER; note = 2'-O-methyladenosine-3'-phosphate
  modified_base 21: mod_base = OTHER; note = 2'-O-methyluridine-3'-phosphorothioate
  modified_base 22: mod_base = OTHER; note = 2'-O-methyluridine-3'-phosphorothioate
  modified_base 23: mod_base = OTHER; note = 2'-O-methyladenosine
ctttgtattgaagtggggaatta

SEQ ID NO: 2486 - RNA, 21 nt, synthetic construct
  source 1..21: mol_type = other RNA
  modified_base 1: mod_base = OTHER; note = 2'-O-methylcytidine-3'-phosphorothioate
  modified_base 2: mod_base = OTHER; note = 2'-O-methyluridine-3'-phosphorothioate
  modified_base 3: mod_base = OTHER; note = 2'-O-methylguanosine-3'-phosphate
  modified_base 4: mod_base = OTHER; note = 2'-O-methyluridine-3'-phosphate
  modified_base 5: mod_base = OTHER; note = 2'-O-methyladenosine-3'-phosphate
  modified_base 6: mod_base = OTHER; note = 2'-O-methyladenosine-3'-phosphate
  modified_base 7: mod_base = OTHER; note = 2'-deoxy-2'-fluorouridine-3'-phosphate
  modified_base 8: mod_base = OTHER; note = 2'-O-methyluridine-3'-phosphate
  modified_base 9: mod_base = OTHER; note = 2'-deoxy-2'-fluorocytidine-3'-phosphate
  modified_base 10: mod_base = OTHER; note = 2'-deoxy-2'-fluorocytidine-3'-phosphate
  modified_base 11: mod_base = OTHER; note = 2'-deoxy-2'-fluorocytidine-3'-phosphate
  modified_base 12: mod_base = OTHER; note = 2'-O-methylcytidine-3'-phosphate
  modified_base 13: mod_base = OTHER; note = 2'-O-methyladenosine-3'-phosphate
  modified_base 14: mod_base = OTHER; note = 2'-O-methylcytidine-3'-phosphate
  modified_base 15: mod_base = OTHER; note = 2'-O-methyluridine-3'-phosphate
  modified_base 16: mod_base = OTHER; note = 2'-O-methyluridine-3'-phosphate
  modified_base 17: mod_base = OTHER; note = 2'-O-methylcytidine-3'-phosphate
  modified_base 18: mod_base = OTHER; note = 2'-O-methyladenosine-3'-phosphate
  modified_base 19: mod_base = OTHER; note = 2'-O-methyladenosine-3'-phosphate
  modified_base 20: mod_base = OTHER; note = 2'-O-methyluridine-3'-phosphate
  modified_base 21: mod_base = OTHER; note = 2'-O-methyladenosine-3'-phosphate ((2S,4R)-1-[29-[[2-(acetylamino)-2-deoxy-beta-D-galactopyra nosyl]oxy]-14,14-bis[[3-[[3-[[5-[[2-(acetylamino)-2-deoxy-b eta-D-galactopyranosyl]oxy]-1-oxopentyl]amino]propyl]amino] -3-oxopropoxy]methyl]-1,12,19,25-tetraoxo-16-oxa-13,20,24-t riazanonacos-1-yl]-4-hydroxy-2-pyrrolidinyl)methyl ester
ctgtaattccccacttcaata

SEQ ID NO: 2487 - RNA, 23 nt, synthetic construct
  source 1..23: mol_type = other RNA
  modified_base 1: mod_base = OTHER; note = 2'-O-methyluridine-3'-phosphorothioate
  modified_base 2: mod_base = OTHER; note = 2'-deoxy-2'-fluoroadenosine-3'-phosphorothioate
  modified_base 3: mod_base = OTHER; note = 2'-O-methyluridine-3'-phosphate
  modified_base 4: mod_base = OTHER; note = 2'-O-methyluridine-3'-phosphate
  modified_base 5: mod_base = OTHER; note = 2'-O-methylguanosine-3'-phosphate
  modified_base 6: mod_base = OTHER; note = 2'-deoxy-2'-fluoroadenosine-3'-phosphate
  modified_base 7: mod_base = OTHER; note = 2'-O-methyladenosine-3'-phosphate
  modified_base 8: mod_base = OTHER; note = 2'-deoxy-2'-fluoroguanosine-3'-phosphate
  modified_base 9: mod_base = OTHER; note = 2'-deoxy-2'-fluorouridine-3'-phosphate
  modified_base 10: mod_base = OTHER; note = 2'-O-methylguanosine-3'-phosphate
  modified_base 11: mod_base = OTHER; note = 2'-O-methylguanosine-3'-phosphate
  modified_base 12: mod_base = OTHER; note = 2'-O-methylguanosine-3'-phosphate
  modified_base 13: mod_base = OTHER; note = 2'-O-methylguanosine-3'-phosphate
  modified_base 14: mod_base = OTHER; note = 2'-deoxy-2'-fluoroadenosine-3'-phosphate
  modified_base 15: mod_base = OTHER; note = 2'-O-methyladenosine-3'-phosphate
  modified_base 16: mod_base = OTHER; note = 2'-deoxy-2'-fluorouridine-3'-phosphate
  modified_base 17: mod_base = OTHER; note = 2'-O-methyluridine-3'-phosphate
  modified_base 18: mod_base = OTHER; note = 2'-O-methyladenosine-3'-phosphate
  modified_base 19: mod_base = OTHER; note = 2'-O-methylcytidine-3'-phosphate
  modified_base 20: mod_base = OTHER; note = 2'-O-methyladenosine-3'-phosphate
  modified_base 21: mod_base = OTHER; note = 2'-O-methylguanosine-3'-phosphorothioate
  modified_base 22: mod_base = OTHER; note = 2'-O-methyladenosine-3'-phosphorothioate
  modified_base 23: mod_base = OTHER; note = 2'-O-methylcytidine
tattgaagtggggaattacagac

SEQ ID NO: 2488 - RNA, 21 nt, synthetic construct
  source 1..21: mol_type = other RNA
  modified_base 1: mod_base = OTHER; note = 2'-O-methyluridine-3'-phosphorothioate
  modified_base 2: mod_base = OTHER; note = 2'-O-methylcytidine-3'-phosphorothioate
  modified_base 3: mod_base = OTHER; note = 2'-O-methyluridine-3'-phosphate
  modified_base 4: mod_base = OTHER; note = 2'-O-methylguanosine-3'-phosphate
  modified_base 5: mod_base = OTHER; note = 2'-O-methyluridine-3'-phosphate
  modified_base 6: mod_base = OTHER; note = 2'-O-methyladenosine-3'-phosphate
  modified_base 7: mod_base = OTHER; note = 2'-deoxy-2'-fluoroadenosine-3'-phosphate
  modified_base 8: mod_base = OTHER; note = 2'-O-methyluridine-3'-phosphate
  modified_base 9: mod_base = OTHER; note = 2'-deoxy-2'-fluorouridine-3'-phosphate
  modified_base 10: mod_base = OTHER; note = 2'-deoxy-2'-fluorocytidine-3'-phosphate
  modified_base 11: mod_base = OTHER; note = 2'-deoxy-2'-fluorocytidine-3'-phosphate
  modified_base 12: mod_base = OTHER; note = 2'-O-methylcytidine-3'-phosphate
  modified_base 13: mod_base = OTHER; note = 2'-O-methylcytidine-3'-phosphate
  modified_base 14: mod_base = OTHER; note = 2'-O-methyladenosine-3'-phosphate
  modified_base 15: mod_base = OTHER; note = 2'-O-methylcytidine-3'-phosphate
  modified_base 16: mod_base = OTHER; note = 2'-O-methyluridine-3'-phosphate
  modified_base 17: mod_base = OTHER; note = 2'-O-methyluridine-3'-phosphate
  modified_base 18: mod_base = OTHER; note = 2'-O-methylcytidine-3'-phosphate
  modified_base 19: mod_base = OTHER; note = 2'-O-methyladenosine-3'-phosphate
  modified_base 20: mod_base = OTHER; note = 2'-O-methyladenosine-3'-phosphate
  modified_base 21: mod_base = OTHER; note = 2'-O-methyluridine-3'-phosphate ((2S,4R)-1-[29-[[2-(acetylamino)-2-deoxy-beta-D-galactopyra nosyl]oxy]-14,14-bis[[3-[[3-[[5-[[2-(acetylamino)-2-deoxy-b eta-D-galactopyranosyl]oxy]-1-oxopentyl]amino]propyl]amino] -3-oxopropoxy]methyl]-1,12,19,25-tetraoxo-16-oxa-13,20,24-t riazanonacos-1-yl]-4-hydroxy-2-pyrrolidinyl)methyl ester
tctgtaattccccacttcaat

SEQ ID NO: 2489 - RNA, 23 nt, synthetic construct
  source 1..23: mol_type = other RNA
  modified_base 1: mod_base = OTHER; note = 2'-O-methyladenosine-3'-phosphorothioate
  modified_base 2: mod_base = OTHER; note = 2'-deoxy-2'-fluorouridine-3'-phosphorothioate
  modified_base 3: mod_base = OTHER; note = 2'-O-methyluridine-3'-phosphate
  modified_base 4: mod_base = OTHER; note = 2'-O-methylguanosine-3'-phosphate
  modified_base 5: mod_base = OTHER; note = 2'-O-methyladenosine-3'-phosphate
  modified_base 6: mod_base = OTHER; note = 2'-deoxy-2'-fluoroadenosine-3'-phosphate
  modified_base 7: mod_base = OTHER; note = 2'-O-methylguanosine-3'-phosphate
  modified_base 8: mod_base = OTHER; note = 2'-deoxy-2'-fluorouridine-3'-phosphate
  modified_base 9: mod_base = OTHER; note = 2'-deoxy-2'-fluoroguanosine-3'-phosphate
  modified_base 10: mod_base = OTHER; note = 2'-O-methylguanosine-3'-phosphate
  modified_base 11: mod_base = OTHER; note = 2'-O-methylguanosine-3'-phosphate
  modified_base 12: mod_base = OTHER; note = 2'-O-methylguanosine-3'-phosphate
  modified_base 13: mod_base = OTHER; note = 2'-O-methyladenosine-3'-phosphate
  modified_base 14: mod_base = OTHER; note = 2'-deoxy-2'-fluoroadenosine-3'-phosphate
  modified_base 15: mod_base = OTHER; note = 2'-O-methyluridine-3'-phosphate
  modified_base 16: mod_base = OTHER; note = 2'-deoxy-2'-fluorouridine-3'-phosphate
  modified_base 17: mod_base = OTHER; note = 2'-O-methyladenosine-3'-phosphate
  modified_base 18: mod_base = OTHER; note = 2'-O-methylcytidine-3'-phosphate
  modified_base 19: mod_base = OTHER; note = 2'-O-methyladenosine-3'-phosphate
  modified_base 20: mod_base = OTHER; note = 2'-O-methylguanosine-3'-phosphate
  modified_base 21: mod_base = OTHER; note = 2'-O-methyladenosine-3'-phosphorothioate
  modified_base 22: mod_base = OTHER; note = 2'-O-methylcytidine-3'-phosphorothioate
  modified_base 23: mod_base = OTHER; note = 2'-O-methyluridine
attgaagtggggaattacagact

SEQ ID NO: 2490 - RNA, 21 nt, synthetic construct
  source 1..21: mol_type = other RNA
  modified_base 1: mod_base = OTHER; note = 2'-O-methyluridine-3'-phosphorothioate
  modified_base 2: mod_base = OTHER; note = 2'-O-methylguanosine-3'-phosphorothioate
  modified_base 3: mod_base = OTHER; note = 2'-O-methyladenosine-3'-phosphate
  modified_base 4: mod_base = OTHER; note = 2'-O-methyluridine-3'-phosphate
  modified_base 5: mod_base = OTHER; note = 2'-O-methylguanosine-3'-phosphate
  modified_base 6: mod_base = OTHER; note = 2'-O-methyluridine-3'-phosphate
  modified_base 7: mod_base = OTHER; note = 2'-deoxy-2'-fluoroguanosine-3'-phosphate
  modified_base 8: mod_base = OTHER; note = 2'-O-methylcytidine-3'-phosphate
  modified_base 9: mod_base = OTHER; note = 2'-deoxy-2'-fluoroguanosine-3'-phosphate
  modified_base 10: mod_base = OTHER; note = 2'-deoxy-2'-fluorouridine-3'-phosphate
  modified_base 11: mod_base = OTHER; note = 2'-deoxy-2'-fluoroadenosine-3'-phosphate
  modified_base 12: mod_base = OTHER; note = 2'-O-methyladenosine-3'-phosphate
  modified_base 13: mod_base = OTHER; note = 2'-O-methylcytidine-3'-phosphate
  modified_base 14: mod_base = OTHER; note = 2'-O-methyladenosine-3'-phosphate
  modified_base 15: mod_base = OTHER; note = 2'-O-methylguanosine-3'-phosphate
  modified_base 16: mod_base = OTHER; note = 2'-O-methyladenosine-3'-phosphate
  modified_base 17: mod_base = OTHER; note = 2'-O-methyluridine-3'-phosphate
  modified_base 18: mod_base = OTHER; note = 2'-O-methyluridine-3'-phosphate
  modified_base 19: mod_base = OTHER; note = 2'-O-methylcytidine-3'-phosphate
  modified_base 20: mod_base = OTHER; note = 2'-O-methyladenosine-3'-phosphate
  modified_base 21: mod_base = OTHER; note = 2'-O-methyladenosine-3'-phosphate ((2S,4R)-1-[29-[[2-(acetylamino)-2-deoxy-beta-D-galactopyra nosyl]oxy]-14,14-bis[[3-[[3-[[5-[[2-(acetylamino)-2-deoxy-b eta-D-galactopyranosyl]oxy]-1-oxopentyl]amino]propyl]amino] -3-oxopropoxy]methyl]-1,12,19,25-tetraoxo-16-oxa-13,20,24-t riazanonacos-1-yl]-4-hydroxy-2-pyrrolidinyl)methyl ester
tgatgtgcgtaacagattcaa

SEQ ID NO: 2491 - RNA, 23 nt, synthetic construct
  source 1..23: mol_type = other RNA
  modified_base 1: mod_base = OTHER; note = 2'-O-methyluridine-3'-phosphorothioate
  modified_base 2: mod_base = OTHER; note = 2'-deoxy-2'-fluorouridine-3'-phosphorothioate
  modified_base 3: mod_base = OTHER; note = 2'-O-methylguanosine-3'-phosphate
  modified_base 4: mod_base = OTHER; note = 2'-O-methyladenosine-3'-phosphate
  modified_base 5: mod_base = OTHER; note = 2'-O-methyladenosine-3'-phosphate
  modified_base 6: mod_base = OTHER; note = 2'-deoxy-2'-fluorouridine-3'-phosphate
  modified_base 7: mod_base = OTHER; note = 2'-O-methylcytidine-3'-phosphate
  modified_base 8: mod_base = OTHER; note = 2'-deoxy-2'-fluorouridine-3'-phosphate
  modified_base 9: mod_base = OTHER; note = 2'-deoxy-2'-fluoroguanosine-3'-phosphate
  modified_base 10: mod_base = OTHER; note = 2'-O-methyluridine-3'-phosphate
  modified_base 11: mod_base = OTHER; note = 2'-O-methyluridine-3'-phosphate
  modified_base 12: mod_base = OTHER; note = 2'-O-methyladenosine-3'-phosphate
  modified_base 13: mod_base = OTHER; note = 2'-O-methylcytidine-3'-phosphate
  modified_base 14: mod_base = OTHER; note = 2'-deoxy-2'-fluoroguanosine-3'-phosphate
  modified_base 15: mod_base = OTHER; note = 2'-O-methylcytidine-3'-phosphate
  modified_base 16: mod_base = OTHER; note = 2'-deoxy-2'-fluoroadenosine-3'-phosphate
  modified_base 17: mod_base = OTHER; note = 2'-O-methylcytidine-3'-phosphate
  modified_base 18: mod_base = OTHER; note = 2'-O-methyladenosine-3'-phosphate
  modified_base 19: mod_base = OTHER; note = 2'-O-methyluridine-3'-phosphate
  modified_base 20: mod_base = OTHER; note = 2'-O-methylcytidine-3'-phosphate
  modified_base 21: mod_base = OTHER; note = 2'-O-methyladenosine-3'-phosphorothioate
  modified_base 22: mod_base = OTHER; note = 2'-O-methyluridine-3'-phosphorothioate
  modified_base 23: mod_base = OTHER; note = 2'-O-methylcytidine
ttgaatctgttacgcacatcatc

SEQ ID NO: 2492 - RNA, 21 nt, synthetic construct
  source 1..21: mol_type = other RNA
  modified_base 1: mod_base = OTHER; note = 2'-O-methylguanosine-3'-phosphorothioate
  modified_base 2: mod_base = OTHER; note = 2'-O-methyladenosine-3'-phosphorothioate
  modified_base 3: mod_base = OTHER; note = 2'-O-methyluridine-3'-phosphate
  modified_base 4: mod_base = OTHER; note = 2'-O-methylguanosine-3'-phosphate
  modified_base 5: mod_base = OTHER; note = 2'-O-methyluridine-3'-phosphate
  modified_base 6: mod_base = OTHER; note = 2'-O-methylguanosine-3'-phosphate
  modified_base 7: mod_base = OTHER; note = 2'-deoxy-2'-fluorocytidine-3'-phosphate
  modified_base 8: mod_base = OTHER; note = 2'-O-methylguanosine-3'-phosphate
  modified_base 9: mod_base = OTHER; note = 2'-deoxy-2'-fluorouridine-3'-phosphate
  modified_base 10: mod_base = OTHER; note = 2'-deoxy-2'-fluoroadenosine-3'-phosphate
  modified_base 11: mod_base = OTHER; note = 2'-deoxy-2'-fluoroadenosine-3'-phosphate
  modified_base 12: mod_base = OTHER; note = 2'-O-methylcytidine-3'-phosphate
  modified_base 13: mod_base = OTHER; note = 2'-O-methyladenosine-3'-phosphate
  modified_base 14: mod_base = OTHER; note = 2'-O-methylguanosine-3'-phosphate
  modified_base 15: mod_base = OTHER; note = 2'-O-methyladenosine-3'-phosphate
  modified_base 16: mod_base = OTHER; note = 2'-O-methyluridine-3'-phosphate
  modified_base 17: mod_base = OTHER; note = 2'-O-methyluridine-3'-phosphate
  modified_base 18: mod_base = OTHER; note = 2'-O-methylcytidine-3'-phosphate
  modified_base 19: mod_base = OTHER; note = 2'-O-methyladenosine-3'-phosphate
  modified_base 20: mod_base = OTHER; note = 2'-O-methyladenosine-3'-phosphate
  modified_base 21: mod_base = OTHER; note = 2'-O-methyladenosine-3'-phosphate ((2S,4R)-1-[29-[[2-(acetylamino)-2-deoxy-beta-D-galactopyra nosyl]oxy]-14,14-bis[[3-[[3-[[5-[[2-(acetylamino)-2-deoxy-b eta-D-galactopyranosyl]oxy]-1-oxopentyl]amino]propyl]amino] -3-oxopropoxy]methyl]-1,12,19,25-tetraoxo-16-oxa-13,20,24-t riazanonacos-1-yl]-4-hydroxy-2-pyrrolidinyl)methyl ester
gatgtgcgtaacagattcaaa

SEQ ID NO: 2493 - RNA, 23 nt, synthetic construct
  source 1..23: mol_type = other RNA
  modified_base 1: mod_base = OTHER; note = 2'-O-methyluridine-3'-phosphorothioate
  modified_base 2: mod_base = OTHER; note = 2'-deoxy-2'-fluorouridine-3'-phosphorothioate
  modified_base 3: mod_base = OTHER; note = 2'-O-methyluridine-3'-phosphate
  modified_base 4: mod_base = OTHER; note = 2'-O-methylguanosine-3'-phosphate
  modified_base 5: mod_base = OTHER; note = 2'-O-methyladenosine-3'-phosphate
  modified_base 6: mod_base = OTHER; note = 2'-deoxy-2'-fluoroadenosine-3'-phosphate
  modified_base 7: mod_base = OTHER; note = 2'-O-methyluridine-3'-phosphate
  modified_base 8: mod_base = OTHER; note = 2'-deoxy-2'-fluorocytidine-3'-phosphate
  modified_base 9: mod_base = OTHER; note = 2'-deoxy-2'-fluorouridine-3'-phosphate
  modified_base 10: mod_base = OTHER; note = 2'-O-methylguanosine-3'-phosphate
  modified_base 11: mod_base = OTHER; note = 2'-O-methyluridine-3'-phosphate
  modified_base 12: mod_base = OTHER; note = 2'-O-methyluridine-3'-phosphate
  modified_base 13: mod_base = OTHER; note = 2'-O-methyladenosine-3'-phosphate
  modified_base 14: mod_base = OTHER; note = 2'-deoxy-2'-fluorocytidine-3'-phosphate
  modified_base 15: mod_base = OTHER; note = 2'-O-methylguanosine-3'-phosphate
  modified_base 16: mod_base = OTHER; note = 2'-deoxy-2'-fluorocytidine-3'-phosphate
  modified_base 17: mod_base = OTHER; note = 2'-O-methyladenosine-3'-phosphate
  modified_base 18: mod_base = OTHER; note = 2'-O-methylcytidine-3'-phosphate
  modified_base 19: mod_base = OTHER; note = 2'-O-methyladenosine-3'-phosphate
  modified_base 20: mod_base = OTHER; note = 2'-O-methyluridine-3'-phosphate
  modified_base 21: mod_base = OTHER; note = 2'-O-methylcytidine-3'-phosphorothioate
  modified_base 22: mod_base = OTHER; note = 2'-O-methyladenosine-3'-phosphorothioate
  modified_base 23: mod_base = OTHER; note = 2'-O-methyluridine
tttgaatctgttacgcacatcat

SEQ ID NO: 2494 - RNA, 21 nt, synthetic construct
  source 1..21: mol_type = other RNA
  modified_base 1: mod_base = OTHER; note = 2'-O-methyluridine-3'-phosphorothioate
  modified_base 2: mod_base = OTHER; note = 2'-O-methylguanosine-3'-phosphorothioate
  modified_base 3: mod_base = OTHER; note = 2'-O-methylguanosine-3'-phosphate
  modified_base 4: mod_base = OTHER; note = 2'-O-methyladenosine-3'-phosphate
  modified_base 5: mod_base = OTHER; note = 2'-O-methyluridine-3'-phosphate
  modified_base 6: mod_base = OTHER; note = 2'-O-methylguanosine-3'-phosphate
  modified_base 7: mod_base = OTHER; note = 2'-deoxy-2'-fluoroadenosine-3'-phosphate
  modified_base 8: mod_base = OTHER; note = 2'-O-methyluridine-3'-phosphate
  modified_base 9: mod_base = OTHER; note = 2'-deoxy-2'-fluoroguanosine-3'-phosphate
  modified_base 10: mod_base = OTHER; note = 2'-deoxy-2'-fluorouridine-3'-phosphate
  modified_base 11: mod_base = OTHER; note = 2'-deoxy-2'-fluoroguanosine-3'-phosphate
  modified_base 12: mod_base = OTHER; note = 2'-O-methylcytidine-3'-phosphate
  modified_base 13: mod_base = OTHER; note = 2'-O-methylguanosine-3'-phosphate
  modified_base 14: mod_base = OTHER; note = 2'-O-methyluridine-3'-phosphate
  modified_base 15: mod_base = OTHER; note = 2'-O-methyladenosine-3'-phosphate
  modified_base 16: mod_base = OTHER; note = 2'-O-methyladenosine-3'-phosphate
  modified_base 17: mod_base = OTHER; note = 2'-O-methylcytidine-3'-phosphate
  modified_base 18: mod_base = OTHER; note = 2'-O-methyladenosine-3'-phosphate
  modified_base 19: mod_base = OTHER; note = 2'-O-methylguanosine-3'-phosphate
  modified_base 20: mod_base = OTHER; note = 2'-O-methyladenosine-3'-phosphate
  modified_base 21: mod_base = OTHER; note = 2'-O-methyluridine-3'-phosphate ((2S,4R)-1-[29-[[2-(acetylamino)-2-deoxy-beta-D-galactopyra nosyl]oxy]-14,14-bis[[3-[[3-[[5-[[2-(acetylamino)-2-deoxy-b eta-D-galactopyranosyl]oxy]-1-oxopentyl]amino]propyl]amino] -3-oxopropoxy]methyl]-1,12,19,25-tetraoxo-16-oxa-13,20,24-t riazanonacos-1-yl]-4-hydroxy-2-pyrrolidinyl)methyl ester
tggatgatgtgcgtaacagat

SEQ ID NO: 2495 - RNA, 23 nt, synthetic construct
  source 1..23: mol_type = other RNA
  modified_base 1: mod_base = OTHER; note = 2'-O-methyladenosine-3'-phosphorothioate
  modified_base 2: mod_base = OTHER; note = 2'-deoxy-2'-fluorouridine-3'-phosphorothioate
  modified_base 3: mod_base = OTHER; note = 2'-O-methylcytidine-3'-phosphate
  modified_base 4: mod_base = OTHER; note = 2'-O-methyluridine-3'-phosphate
  modified_base 5: mod_base = OTHER; note = 2'-O-methylguanosine-3'-phosphate
  modified_base 6: mod_base = OTHER; note = 2'-deoxy-2'-fluorouridine-3'-phosphate
  modified_base 7: mod_base = OTHER; note = 2'-O-methyluridine-3'-phosphate
  modified_base 8: mod_base = OTHER; note = 2'-deoxy-2'-fluoroadenosine-3'-phosphate
  modified_base 9: mod_base = OTHER; note = 2'-deoxy-2'-fluorocytidine-3'-phosphate
  modified_base 10: mod_base = OTHER; note = 2'-O-methylguanosine-3'-phosphate
  modified_base 11: mod_base = OTHER; note = 2'-O-methylcytidine-3'-phosphate
  modified_base 12: mod_base = OTHER; note = 2'-O-methyladenosine-3'-phosphate
  modified_base 13: mod_base = OTHER; note = 2'-O-methylcytidine-3'-phosphate
  modified_base 14: mod_base = OTHER; note = 2'-deoxy-2'-fluoroadenosine-3'-phosphate
  modified_base 15: mod_base = OTHER; note = 2'-O-methyluridine-3'-phosphate
  modified_base 16: mod_base = OTHER; note = 2'-deoxy-2'-fluorocytidine-3'-phosphate
  modified_base 17: mod_base = OTHER; note = 2'-O-methyladenosine-3'-phosphate
  modified_base 18: mod_base = OTHER; note = 2'-O-methyluridine-3'-phosphate
  modified_base 19: mod_base = OTHER; note = 2'-O-methylcytidine-3'-phosphate
  modified_base 20: mod_base = OTHER; note = 2'-O-methylcytidine-3'-phosphate
  modified_base 21: mod_base = OTHER; note = 2'-O-methyladenosine-3'-phosphorothioate
  modified_base 22: mod_base = OTHER; note = 2'-O-methylguanosine-3'-phosphorothioate
  modified_base 23: mod_base = OTHER; note = 2'-O-methyladenosine
atctgttacgcacatcatccaga

SEQ ID NO: 2496 - RNA, 21 nt, synthetic construct
  source 1..21: mol_type = other RNA
  modified_base 1: mod_base = OTHER; note = 2'-O-methylcytidine-3'-phosphorothioate
  modified_base 2: mod_base = OTHER; note = 2'-O-methyluridine-3'-phosphorothioate
  modified_base 3: mod_base = OTHER; note = 2'-O-methylguanosine-3'-phosphate
  modified_base 4: mod_base = OTHER; note = 2'-O-methylguanosine-3'-phosphate
  modified_base 5: mod_base = OTHER; note = 2'-O-methyladenosine-3'-phosphate
  modified_base 6: mod_base = OTHER; note = 2'-O-methyluridine-3'-phosphate
  modified_base 7: mod_base = OTHER; note = 2'-deoxy-2'-fluoroguanosine-3'-phosphate
  modified_base 8: mod_base = OTHER; note = 2'-O-methyladenosine-3'-phosphate
  modified_base 9: mod_base = OTHER; note = 2'-deoxy-2'-fluorouridine-3'-phosphate
  modified_base 10: mod_base = OTHER; note = 2'-deoxy-2'-fluoroguanosine-3'-phosphate
  modified_base 11: mod_base = OTHER; note = 2'-deoxy-2'-fluorouridine-3'-phosphate
  modified_base 12: mod_base = OTHER; note = 2'-O-methylguanosine-3'-phosphate
  modified_base 13: mod_base = OTHER; note = 2'-O-methylcytidine-3'-phosphate
  modified_base 14: mod_base = OTHER; note = 2'-O-methylguanosine-3'-phosphate
  modified_base 15: mod_base = OTHER; note = 2'-O-methyluridine-3'-phosphate
  modified_base 16: mod_base = OTHER; note = 2'-O-methyladenosine-3'-phosphate
  modified_base 17: mod_base = OTHER; note = 2'-O-methyladenosine-3'-phosphate
  modified_base 18: mod_base = OTHER; note = 2'-O-methylcytidine-3'-phosphate
  modified_base 19: mod_base = OTHER; note = 2'-O-methyladenosine-3'-phosphate
  modified_base 20: mod_base = OTHER; note = 2'-O-methylguanosine-3'-phosphate
  modified_base 21: mod_base = OTHER; note = 2'-O-methyladenosine-3'-phosphate ((2S,4R)-1-[29-[[2-(acetylamino)-2-deoxy-beta-D-galactopyra nosyl]oxy]-14,14-bis[[3-[[3-[[5-[[2-(acetylamino)-2-deoxy-b eta-D-galactopyranosyl]oxy]-1-oxopentyl]amino]propyl]amino] -3-oxopropoxy]methyl]-1,12,19,25-tetraoxo-16-oxa-13,20,24-t riazanonacos-1-yl]-4-hydroxy-2-pyrrolidinyl)methyl ester
ctggatgatgtgcgtaacaga

SEQ ID NO: 2497 - RNA, 23 nt, synthetic construct
  source 1..23: mol_type = other RNA
  modified_base 1: mod_base = OTHER; note = 2'-O-methyluridine-3'-phosphorothioate
  modified_base 2: mod_base = OTHER; note = 2'-deoxy-2'-fluorocytidine-3'-phosphorothioate
  modified_base 3: mod_base = OTHER; note = 2'-O-methyluridine-3'-phosphate
  modified_base 4: mod_base = OTHER; note = 2'-O-methylguanosine-3'-phosphate
  modified_base 5: mod_base = OTHER; note = 2'-O-methyluridine-3'-phosphate
  modified_base 6: mod_base = OTHER; note = 2'-deoxy-2'-fluorouridine-3'-phosphate
  modified_base 7: mod_base = OTHER; note = 2'-O-methyladenosine-3'-phosphate
  modified_base 8: mod_base = OTHER; note = 2'-deoxy-2'-fluorocytidine-3'-phosphate
  modified_base 9: mod_base = OTHER; note = 2'-deoxy-2'-fluoroguanosine-3'-phosphate
  modified_base 10: mod_base = OTHER; note = 2'-O-methylcytidine-3'-phosphate
  modified_base 11: mod_base = OTHER; note = 2'-O-methyladenosine-3'-phosphate
  modified_base 12: mod_base = OTHER; note = 2'-O-methylcytidine-3'-phosphate
  modified_base 13: mod_base = OTHER; note = 2'-O-methyladenosine-3'-phosphate
  modified_base 14: mod_base = OTHER; note = 2'-deoxy-2'-fluorouridine-3'-phosphate
  modified_base 15: mod_base = OTHER; note = 2'-O-methylcytidine-3'-phosphate
  modified_base 16: mod_base = OTHER; note = 2'-deoxy-2'-fluoroadenosine-3'-phosphate
  modified_base 17: mod_base = OTHER; note = 2'-O-methyluridine-3'-phosphate
  modified_base 18: mod_base = OTHER; note = 2'-O-methylcytidine-3'-phosphate
  modified_base 19: mod_base = OTHER; note = 2'-O-methylcytidine-3'-phosphate
  modified_base 20: mod_base = OTHER; note = 2'-O-methyladenosine-3'-phosphate
  modified_base 21: mod_base = OTHER; note = 2'-O-methylguanosine-3'-phosphorothioate
  modified_base 22: mod_base = OTHER; note = 2'-O-methyladenosine-3'-phosphorothioate
  modified_base 23: mod_base = OTHER; note = 2'-O-methylcytidine
tctgttacgcacatcatccagac

SEQ ID NO: 2498 - RNA, 21 nt, synthetic construct
  source 1..21: mol_type = other RNA
  modified_base 1: mod_base = OTHER; note = 2'-O-methylguanosine-3'-phosphorothioate
  modified_base 2: mod_base = OTHER; note = 2'-O-methyladenosine-3'-phosphorothioate
  modified_base 3: mod_base = OTHER; note = 2'-O-methyladenosine-3'-phosphate
  modified_base 4: mod_base = OTHER; note = 2'-O-methyluridine-3'-phosphate
  modified_base 5: mod_base = OTHER; note = 2'-O-methylguanosine-3'-phosphate
  modified_base 6: mod_base = OTHER; note = 2'-O-methylguanosine-3'-phosphate
  modified_base 7: mod_base = OTHER; note = 2'-deoxy-2'-fluoroguanosine-3'-phosphate
  modified_base 8: mod_base = OTHER; note = 2'-O-methyluridine-3'-phosphate
  modified_base 9: mod_base = OTHER; note = 2'-deoxy-2'-fluoroguanosine-3'-phosphate
  modified_base 10: mod_base = OTHER; note = 2'-deoxy-2'-fluoroguanosine-3'-phosphate
  modified_base 11: mod_base = OTHER; note = 2'-deoxy-2'-fluorocytidine-3'-phosphate
  modified_base 12: mod_base = OTHER; note = 2'-O-methylguanosine-3'-phosphate
  modified_base 13: mod_base = OTHER; note = 2'-O-methylguanosine-3'-phosphate
  modified_base 14: mod_base = OTHER; note = 2'-O-methyluridine-3'-phosphate
  modified_base 15: mod_base = OTHER; note = 2'-O-methyladenosine-3'-phosphate
  modified_base 16: mod_base = OTHER; note = 2'-O-methyladenosine-3'-phosphate
  modified_base 17: mod_base = OTHER; note = 2'-O-methyluridine-3'-phosphate
  modified_base 18: mod_base = OTHER; note = 2'-O-methyluridine-3'-phosphate
  modified_base 19: mod_base = OTHER; note = 2'-O-methylguanosine-3'-phosphate
  modified_base 20: mod_base = OTHER; note = 2'-O-methylguanosine-3'-phosphate
  modified_base 21: mod_base = OTHER; note = 2'-O-methyluridine-3'-phosphate ((2S,4R)-1-[29-[[2-(acetylamino)-2-deoxy-beta-D-galactopyra nosyl]oxy]-14,14-bis[[3-[[3-[[5-[[2-(acetylamino)-2-deoxy-b eta-D-galactopyranosyl]oxy]-1-oxopentyl]amino]propyl]amino] -3-oxopropoxy]methyl]-1,12,19,25-tetraoxo-16-oxa-13,20,24-t riazanonacos-1-yl]-4-hydroxy-2-pyrrolidinyl)methyl ester
gaatgggtggcggtaattggt

SEQ ID NO: 2499 - RNA, 23 nt, synthetic construct
  source 1..23: mol_type = other RNA
  modified_base 1: mod_base = OTHER; note = 2'-O-methyladenosine-3'-phosphorothioate
  modified_base 2: mod_base = OTHER; note = 2'-deoxy-2'-fluorocytidine-3'-phosphorothioate
  modified_base 3: mod_base = OTHER; note = 2'-O-methylcytidine-3'-phosphate
  modified_base 4: mod_base = OTHER; note = 2'-O-methyladenosine-3'-phosphate
  modified_base 5: mod_base = OTHER; note = 2'-O-methyladenosine-3'-phosphate
  modified_base 6: mod_base = OTHER; note = 2'-deoxy-2'-fluorouridine-3'-phosphate
  modified_base 7: mod_base = OTHER; note = 2'-O-methyluridine-3'-phosphate
  modified_base 8: mod_base = OTHER; note = 2'-deoxy-2'-fluoroadenosine-3'-phosphate
  modified_base 9: mod_base = OTHER; note = 2'-deoxy-2'-fluorocytidine-3'-phosphate
  modified_base 10: mod_base = OTHER; note = 2'-O-methylcytidine-3'-phosphate
  modified_base 11: mod_base = OTHER; note = 2'-O-methylguanosine-3'-phosphate
  modified_base 12: mod_base = OTHER; note = 2'-O-methylcytidine-3'-phosphate
  modified_base 13: mod_base = OTHER; note = 2'-O-methylcytidine-3'-phosphate
  modified_base 14: mod_base = OTHER; note = 2'-deoxy-2'-fluoroadenosine-3'-phosphate
  modified_base 15: mod_base = OTHER; note = 2'-O-methylcytidine-3'-phosphate
  modified_base 16: mod_base = OTHER; note = 2'-deoxy-2'-fluorocytidine-3'-phosphate
  modified_base 17: mod_base = OTHER; note = 2'-O-methylcytidine-3'-phosphate
  modified_base 18: mod_base = OTHER; note = 2'-O-methyladenosine-3'-phosphate
  modified_base 19: mod_base = OTHER; note = 2'-O-methyluridine-3'-phosphate
  modified_base 20: mod_base = OTHER; note = 2'-O-methyluridine-3'-phosphate
  modified_base 21: mod_base = OTHER; note = 2'-O-methylcytidine-3'-phosphorothioate
  modified_base 22: mod_base = OTHER; note = 2'-O-methylcytidine-3'-phosphorothioate
  modified_base 23: mod_base = OTHER; note = 2'-O-methyladenosine
accaattaccgccacccattcca

SEQ ID NO: 2500 - RNA, 21 nt, synthetic construct
  source 1..21: mol_type = other RNA
  modified_base 1: mod_base = OTHER; note = 2'-O-methyladenosine-3'-phosphorothioate
  modified_base 2: mod_base = OTHER; note = 2'-O-methyladenosine-3'-phosphorothioate
  modified_base 3: mod_base = OTHER; note = 2'-O-methyluridine-3'-phosphate
  modified_base 4: mod_base = OTHER; note = 2'-O-methylguanosine-3'-phosphate
  modified_base 5: mod_base = OTHER; note = 2'-O-methylguanosine-3'-phosphate
  modified_base 6: mod_base = OTHER; note = 2'-O-methylguanosine-3'-phosphate
  modified_base 7: mod_base = OTHER; note = 2'-deoxy-2'-fluorouridine-3'-phosphate
  modified_base 8: mod_base = OTHER; note = 2'-O-methylguanosine-3'-phosphate
  modified_base 9: mod_base = OTHER; note = 2'-deoxy-2'-fluoroguanosine-3'-phosphate
  modified_base 10: mod_base = OTHER; note = 2'-deoxy-2'-fluorocytidine-3'-phosphate
  modified_base 11: mod_base = OTHER; note = 2'-deoxy-2'-fluoroguanosine-3'-phosphate
  modified_base 12: mod_base = OTHER; note = 2'-O-methylguanosine-3'-phosphate
  modified_base 13: mod_base = OTHER; note = 2'-O-methyluridine-3'-phosphate
  modified_base 14: mod_base = OTHER; note = 2'-O-methyladenosine-3'-phosphate
  modified_base 15: mod_base = OTHER; note = 2'-O-methyladenosine-3'-phosphate
  modified_base 16: mod_base = OTHER; note = 2'-O-methyluridine-3'-phosphate
  modified_base 17: mod_base = OTHER; note = 2'-O-methyluridine-3'-phosphate
  modified_base 18: mod_base = OTHER; note = 2'-O-methylguanosine-3'-phosphate
  modified_base 19: mod_base = OTHER; note = 2'-O-methylguanosine-3'-phosphate
  modified_base 20: mod_base = OTHER; note = 2'-O-methyluridine-3'-phosphate
  modified_base 21: mod_base = OTHER; note = 2'-O-methylguanosine-3'-phosphate ((2S,4R)-1-[29-[[2-(acetylamino)-2-deoxy-beta-D-galactopyra nosyl]oxy]-14,14-bis[[3-[[3-[[5-[[2-(acetylamino)-2-deoxy-b eta-D-galactopyranosyl]oxy]-1-oxopentyl]amino]propyl]amino] -3-oxopropoxy]methyl]-1,12,19,25-tetraoxo-16-oxa-13,20,24-t riazanonacos-1-yl]-4-hydroxy-2-pyrrolidinyl)methyl ester
aatgggtggcggtaattggtg

SEQ ID NO: 2501 - RNA, 23 nt, synthetic construct
  source 1..23: mol_type = other RNA
  modified_base 1: mod_base = OTHER; note = 2'-O-methylcytidine-3'-phosphorothioate
  modified_base 2: mod_base = OTHER; note = 2'-deoxy-2'-fluoroadenosine-3'-phosphorothioate
  modified_base 3: mod_base = OTHER; note = 2'-O-methylcytidine-3'-phosphate
  modified_base 4: mod_base = OTHER; note = 2'-O-methylcytidine-3'-phosphate
  modified_base 5: mod_base = OTHER; note = 2'-O-methyladenosine-3'-phosphate
  modified_base 6: mod_base = OTHER; note = 2'-deoxy-2'-fluoroadenosine-3'-phosphate
  modified_base 7: mod_base = OTHER; note = 2'-O-methyluridine-3'-phosphate
  modified_base 8: mod_base = OTHER; note = 2'-deoxy-2'-fluorouridine-3'-phosphate
  modified_base 9: mod_base = OTHER; note = 2'-deoxy-2'-fluoroadenosine-3'-phosphate
  modified_base 10: mod_base = OTHER; note = 2'-O-methylcytidine-3'-phosphate
  modified_base 11: mod_base = OTHER; note = 2'-O-methylcytidine-3'-phosphate
  modified_base 12: mod_base = OTHER; note = 2'-O-methylguanosine-3'-phosphate
  modified_base 13: mod_base = OTHER; note = 2'-O-methylcytidine-3'-phosphate
  modified_base 14: mod_base = OTHER; note = 2'-deoxy-2'-fluorocytidine-3'-phosphate
  modified_base 15: mod_base = OTHER; note = 2'-O-methyladenosine-3'-phosphate
  modified_base 16: mod_base = OTHER; note = 2'-deoxy-2'-fluorocytidine-3'-phosphate
  modified_base 17: mod_base = OTHER; note = 2'-O-methylcytidine-3'-phosphate
  modified_base 18: mod_base = OTHER; note = 2'-O-methylcytidine-3'-phosphate
  modified_base 19: mod_base = OTHER; note = 2'-O-methyladenosine-3'-phosphate
  modified_base 20: mod_base = OTHER; note = 2'-O-methyluridine-3'-phosphate
  modified_base 21: mod_base = OTHER; note = 2'-O-methyluridine-3'-phosphorothioate
  modified_base 22: mod_base = OTHER; note = 2'-O-methylcytidine-3'-phosphorothioate
  modified_base 23: mod_base = OTHER; note = 2'-O-methylcytidine
caccaattaccgccacccattcc

SEQ ID NO: 2502 - RNA, 21 nt, synthetic construct
  source 1..21: mol_type = other RNA
  modified_base 1: mod_base = OTHER; note = 2'-O-methyladenosine-3'-phosphorothioate
  modified_base 2: mod_base = OTHER; note = 2'-O-methyluridine-3'-phosphorothioate
  modified_base 3: mod_base = OTHER; note = 2'-O-methyluridine-3'-phosphate
  modified_base 4: mod_base = OTHER; note = 2'-O-methylguanosine-3'-phosphate
  modified_base 5: mod_base = OTHER; note = 2'-O-methylguanosine-3'-phosphate
  modified_base 6: mod_base = OTHER; note = 2'-O-methyladenosine-3'-phosphate
  modified_base 7: mod_base = OTHER; note = 2'-deoxy-2'-fluoroadenosine-3'-phosphate
  modified_base 8: mod_base = OTHER; note = 2'-O-methyluridine-3'-phosphate
  modified_base 9: mod_base = OTHER; note = 2'-deoxy-2'-fluoroguanosine-3'-phosphate
  modified_base 10: mod_base = OTHER; note = 2'-deoxy-2'-fluoroguanosine-3'-phosphate
  modified_base 11: mod_base = OTHER; note = 2'-deoxy-2'-fluoroguanosine-3'-phosphate
  modified_base 12: mod_base = OTHER; note = 2'-O-methyluridine-3'-phosphate
  modified_base 13: mod_base = OTHER; note = 2'-O-methylguanosine-3'-phosphate
  modified_base 14: mod_base = OTHER; note = 2'-O-methylguanosine-3'-phosphate
  modified_base 15: mod_base = OTHER; note = 2'-O-methylcytidine-3'-phosphate
  modified_base 16: mod_base = OTHER; note = 2'-O-methylguanosine-3'-phosphate
  modified_base 17: mod_base = OTHER; note = 2'-O-methylguanosine-3'-phosphate
  modified_base 18: mod_base = OTHER; note = 2'-O-methyluridine-3'-phosphate
  modified_base 19: mod_base = OTHER; note = 2'-O-methyladenosine-3'-phosphate
  modified_base 20: mod_base = OTHER; note = 2'-O-methyladenosine-3'-phosphate
  modified_base 21: mod_base = OTHER; note = 2'-O-methyluridine-3'-phosphate ((2S,4R)-1-[29-[[2-(acetylamino)-2-deoxy-beta-D-galactopyra nosyl]oxy]-14,14-bis[[3-[[3-[[5-[[2-(acetylamino)-2-deoxy-b eta-D-galactopyranosyl]oxy]-1-oxopentyl]amino]propyl]amino] -3-oxopropoxy]methyl]-1,12,19,25-tetraoxo-16-oxa-13,20,24-t riazanonacos-1-yl]-4-hydroxy-2-pyrrolidinyl)methyl ester
attggaatgggtggcggtaat

SEQ ID NO: 2503 - RNA, 23 nt, synthetic construct
  source 1..23: mol_type = other RNA
  modified_base 1: mod_base = OTHER; note = 2'-O-methyladenosine-3'-phosphorothioate
  modified_base 2: mod_base = OTHER; note = 2'-deoxy-2'-fluorouridine-3'-phosphorothioate
  modified_base 3: mod_base = OTHER; note = 2'-O-methyluridine-3'-phosphate
  modified_base 4: mod_base = OTHER; note = 2'-O-methyladenosine-3'-phosphate
  modified_base 5: mod_base = OTHER; note = 2'-O-methylcytidine-3'-phosphate
  modified_base 6: mod_base = OTHER; note = 2'-deoxy-2'-fluorocytidine-3'-phosphate
  modified_base 7: mod_base = OTHER; note = 2'-O-methylguanosine-3'-phosphate
  modified_base 8: mod_base = OTHER; note = 2'-deoxy-2'-fluorocytidine-3'-phosphate
  modified_base 9: mod_base = OTHER; note = 2'-deoxy-2'-fluorocytidine-3'-phosphate
  modified_base 10: mod_base = OTHER; note = 2'-O-methyladenosine-3'-phosphate
  modified_base 11: mod_base = OTHER; note = 2'-O-methylcytidine-3'-phosphate
  modified_base 12: mod_base = OTHER; note = 2'-O-methylcytidine-3'-phosphate
  modified_base 13: mod_base = OTHER; note = 2'-O-methylcytidine-3'-phosphate
  modified_base 14: mod_base = OTHER; note = 2'-deoxy-2'-fluoroadenosine-3'-phosphate
  modified_base 15: mod_base = OTHER; note = 2'-O-methyluridine-3'-phosphate
  modified_base 16: mod_base = OTHER; note = 2'-deoxy-2'-fluorouridine-3'-phosphate
  modified_base 17: mod_base = OTHER; note = 2'-O-methylcytidine-3'-phosphate
  modified_base 18: mod_base = OTHER; note = 2'-O-methylcytidine-3'-phosphate
  modified_base 19: mod_base = OTHER; note = 2'-O-methyladenosine-3'-phosphate
  modified_base 20: mod_base = OTHER; note = 2'-O-methyladenosine-3'-phosphate
  modified_base 21: mod_base = OTHER; note = 2'-O-methyluridine-3'-phosphorothioate
  modified_base 22: mod_base = OTHER; note = 2'-O-methyluridine-3'-phosphorothioate
  modified_base 23: mod_base = OTHER; note = 2'-O-methylcytidine
attaccgccacccattccaattc

SEQ ID NO: 2504 - RNA, 21 nt, synthetic construct
  source 1..21: mol_type = other RNA
  modified_base 1: mod_base = OTHER; note = 2'-O-methyladenosine-3'-phosphorothioate
  modified_base 2: mod_base = OTHER; note = 2'-O-methyladenosine-3'-phosphorothioate
  modified_base 3: mod_base = OTHER; note = 2'-O-methyluridine-3'-phosphate
  modified_base 4: mod_base = OTHER; note = 2'-O-methyluridine-3'-phosphate
  modified_base 5: mod_base = OTHER; note = 2'-O-methylguanosine-3'-phosphate
  modified_base 6: mod_base = OTHER; note = 2'-O-methylguanosine-3'-phosphate
  modified_base 7: mod_base = OTHER; note = 2'-deoxy-2'-fluoroadenosine-3'-phosphate
  modified_base 8: mod_base = OTHER; note = 2'-O-methyladenosine-3'-phosphate
  modified_base 9: mod_base = OTHER; note = 2'-deoxy-2'-fluorouridine-3'-phosphate
  modified_base 10: mod_base = OTHER; note = 2'-deoxy-2'-fluoroguanosine-3'-phosphate
  modified_base 11: mod_base = OTHER; note = 2'-deoxy-2'-fluoroguanosine-3'-phosphate
  modified_base 12: mod_base = OTHER; note = 2'-O-methylguanosine-3'-phosphate
  modified_base 13: mod_base = OTHER; note = 2'-O-methyluridine-3'-phosphate
  modified_base 14: mod_base = OTHER; note = 2'-O-methylguanosine-3'-phosphate
  modified_base 15: mod_base = OTHER; note = 2'-O-methylguanosine-3'-phosphate
  modified_base 16: mod_base = OTHER; note = 2'-O-methylcytidine-3'-phosphate
  modified_base 17: mod_base = OTHER; note = 2'-O-methylguanosine-3'-phosphate
  modified_base 18: mod_base = OTHER; note = 2'-O-methylguanosine-3'-phosphate
  modified_base 19: mod_base = OTHER; note = 2'-O-methyluridine-3'-phosphate
  modified_base 20: mod_base = OTHER; note = 2'-O-methyladenosine-3'-phosphate
  modified_base 21: mod_base = OTHER; note = 2'-O-methyladenosine-3'-phosphate ((2S,4R)-1-[29-[[2-(acetylamino)-2-deoxy-beta-D-galactopyra nosyl]oxy]-14,14-bis[[3-[[3-[[5-[[2-(acetylamino)-2-deoxy-b eta-D-galactopyranosyl]oxy]-1-oxopentyl]amino]propyl]amino] -3-oxopropoxy]methyl]-1,12,19,25-tetraoxo-16-oxa-13,20,24-t riazanonacos-1-yl]-4-hydroxy-2-pyrrolidinyl)methyl ester
aattggaatgggtggcggtaa

SEQ ID NO: 2505 - RNA, 23 nt, synthetic construct
  source 1..23: mol_type = other RNA
  modified_base 1: mod_base = OTHER; note = 2'-O-methyluridine-3'-phosphorothioate
  modified_base 2: mod_base = OTHER; note = 2'-deoxy-2'-fluorouridine-3'-phosphorothioate
  modified_base 3: mod_base = OTHER; note = 2'-O-methyladenosine-3'-phosphate
  modified_base 4: mod_base = OTHER; note = 2'-O-methylcytidine-3'-phosphate
  modified_base 5: mod_base = OTHER; note = 2'-O-methylcytidine-3'-phosphate
  modified_base 6: mod_base = OTHER; note = 2'-deoxy-2'-fluoroguanosine-3'-phosphate
  modified_base 7: mod_base = OTHER; note = 2'-O-methylcytidine-3'-phosphate
  modified_base 8: mod_base = OTHER; note = 2'-deoxy-2'-fluorocytidine-3'-phosphate
  modified_base 9: mod_base = OTHER; note = 2'-deoxy-2'-fluoroadenosine-3'-phosphate
  modified_base 10: mod_base = OTHER; note = 2'-O-methylcytidine-3'-phosphate
  modified_base 11: mod_base = OTHER; note = 2'-O-methylcytidine-3'-phosphate
  modified_base 12: mod_base = OTHER; note = 2'-O-methylcytidine-3'-phosphate
  modified_base 13: mod_base = OTHER; note = 2'-O-methyladenosine-3'-phosphate
  modified_base 14: mod_base = OTHER; note = 2'-deoxy-2'-fluorouridine-3'-phosphate
  modified_base 15: mod_base = OTHER; note = 2'-O-methyluridine-3'-phosphate
  modified_base 16: mod_base = OTHER; note = 2'-deoxy-2'-fluorocytidine-3'-phosphate
  modified_base 17: mod_base = OTHER; note = 2'-O-methylcytidine-3'-phosphate
  modified_base 18: mod_base = OTHER; note = 2'-O-methyladenosine-3'-phosphate
  modified_base 19: mod_base = OTHER; note = 2'-O-methyladenosine-3'-phosphate
  modified_base 20: mod_base = OTHER; note = 2'-O-methyluridine-3'-phosphate
  modified_base 21: mod_base = OTHER; note = 2'-O-methyluridine-3'-phosphorothioate
  modified_base 22: mod_base = OTHER; note = 2'-O-methylcytidine-3'-phosphorothioate
  modified_base 23: mod_base = OTHER; note = 2'-O-methyluridine
ttaccgccacccattccaattct

SEQ ID NO: 2506 - RNA, 21 nt, synthetic construct
  source 1..21: mol_type = other RNA
  modified_base 1: mod_base = OTHER; note = 2'-O-methyluridine-3'-phosphorothioate
  modified_base 2: mod_base = OTHER; note = 2'-O-methylcytidine-3'-phosphorothioate
  modified_base 3: mod_base = OTHER; note = 2'-O-methylcytidine-3'-phosphate
  modified_base 4: mod_base = OTHER; note = 2'-O-methylguanosine-3'-phosphate
  modified_base 5: mod_base = OTHER; note = 2'-O-methylguanosine-3'-phosphate
  modified_base 6: mod_base = OTHER; note = 2'-O-methyladenosine-3'-phosphate
  modified_base 7: mod_base = OTHER; note = 2'-deoxy-2'-fluoroadenosine-3'-phosphate
  modified_base 8: mod_base = OTHER; note = 2'-O-methyluridine-3'-phosphate
  modified_base 9: mod_base = OTHER; note = 2'-deoxy-2'-fluoroguanosine-3'-phosphate
  modified_base 10: mod_base = OTHER; note = 2'-deoxy-2'-fluorouridine-3'-phosphate
  modified_base 11: mod_base = OTHER; note = 2'-deoxy-2'-fluorouridine-3'-phosphate
  modified_base 12: mod_base = OTHER; note = 2'-O-methylguanosine-3'-phosphate
  modified_base 13: mod_base = OTHER; note = 2'-O-methylcytidine-3'-phosphate
  modified_base 14: mod_base = OTHER; note = 2'-O-methyluridine-3'-phosphate
  modified_base 15: mod_base = OTHER; note = 2'-O-methylguanosine-3'-phosphate
  modified_base 16: mod_base = OTHER; note = 2'-O-methyladenosine-3'-phosphate
  modified_base 17: mod_base = OTHER; note = 2'-O-methyladenosine-3'-phosphate
  modified_base 18: mod_base = OTHER; note = 2'-O-methyladenosine-3'-phosphate
  modified_base 19: mod_base = OTHER; note = 2'-O-methylcytidine-3'-phosphate
  modified_base 20: mod_base = OTHER; note = 2'-O-methyladenosine-3'-phosphate
  modified_base 21: mod_base = OTHER; note = 2'-O-methylguanosine-3'-phosphate ((2S,4R)-1-[29-[[2-(acetylamino)-2-deoxy-beta-D-galactopyra nosyl]oxy]-14,14-bis[[3-[[3-[[5-[[2-(acetylamino)-2-deoxy-b eta-D-galactopyranosyl]oxy]-1-oxopentyl]amino]propyl]amino] -3-oxopropoxy]methyl]-1,12,19,25-tetraoxo-16-oxa-13,20,24-t riazanonacos-1-yl]-4-hydroxy-2-pyrrolidinyl)methyl ester
tccggaatgttgctgaaacag

SEQ ID NO: 2507 - RNA, 23 nt, synthetic construct
  source 1..23: mol_type = other RNA
  modified_base 1: mod_base = OTHER; note = 2'-O-methylcytidine-3'-phosphorothioate
  modified_base 2: mod_base = OTHER; note = 2'-deoxy-2'-fluorouridine-3'-phosphorothioate
  modified_base 3: mod_base = OTHER; note = 2'-O-methylguanosine-3'-phosphate
  modified_base 4: mod_base = OTHER; note = 2'-O-methyluridine-3'-phosphate
  modified_base 5: mod_base = OTHER; note = 2'-O-methyluridine-3'-phosphate
  modified_base 6: mod_base = OTHER; note = 2'-deoxy-2'-fluorouridine-3'-phosphate
  modified_base 7: mod_base = OTHER; note = 2'-O-methylcytidine-3'-phosphate
  modified_base 8: mod_base = OTHER; note = 2'-deoxy-2'-fluoroadenosine-3'-phosphate
  modified_base 9: mod_base = OTHER; note = 2'-deoxy-2'-fluoroguanosine-3'-phosphate
  modified_base 10: mod_base = OTHER; note = 2'-O-methylcytidine-3'-phosphate
  modified_base 11: mod_base = OTHER; note = 2'-O-methyladenosine-3'-phosphate
  modified_base 12: mod_base = OTHER; note = 2'-O-methyladenosine-3'-phosphate
  modified_base 13: mod_base = OTHER; note = 2'-O-methylcytidine-3'-phosphate
  modified_base 14: mod_base = OTHER; note = 2'-deoxy-2'-fluoroadenosine-3'-phosphate
  modified_base 15: mod_base = OTHER; note = 2'-O-methyluridine-3'-phosphate
  modified_base 16: mod_base = OTHER; note = 2'-deoxy-2'-fluorouridine-3'-phosphate
  modified_base 17: mod_base = OTHER; note = 2'-O-methylcytidine-3'-phosphate
  modified_base 18: mod_base = OTHER; note = 2'-O-methylcytidine-3'-phosphate
  modified_base 19: mod_base = OTHER; note = 2'-O-methylguanosine-3'-phosphate
  modified_base 20: mod_base = OTHER; note = 2'-O-methylguanosine-3'-phosphate
  modified_base 21: mod_base = OTHER; note = 2'-O-methyladenosine-3'-phosphorothioate
  modified_base 22: mod_base = OTHER; note = 2'-O-methylguanosine-3'-phosphorothioate
  modified_base 23: mod_base = OTHER; note = 2'-O-methylcytidine
ctgtttcagcaacattccggagc

SEQ ID NO: 2508 - RNA, 21 nt, synthetic construct
  source 1..21: mol_type = other RNA
  modified_base 1: mod_base = OTHER; note = 2'-O-methylcytidine-3'-phosphorothioate
  modified_base 2: mod_base = OTHER; note = 2'-O-methylcytidine-3'-phosphorothioate
  modified_base 3: mod_base = OTHER; note = 2'-O-methylguanosine-3'-phosphate
  modified_base 4: mod_base = OTHER; note = 2'-O-methylguanosine-3'-phosphate
  modified_base 5: mod_base = OTHER; note = 2'-O-methyladenosine-3'-phosphate
  modified_base 6: mod_base = OTHER; note = 2'-O-methyladenosine-3'-phosphate
  modified_base 7: mod_base = OTHER; note = 2'-deoxy-2'-fluorouridine-3'-phosphate
  modified_base 8: mod_base = OTHER; note = 2'-O-methylguanosine-3'-phosphate
  modified_base 9: mod_base = OTHER; note = 2'-deoxy-2'-fluorouridine-3'-phosphate
  modified_base 10: mod_base = OTHER; note = 2'-deoxy-2'-fluorouridine-3'-phosphate
  modified_base 11: mod_base = OTHER; note = 2'-deoxy-2'-fluoroguanosine-3'-phosphate
  modified_base 12: mod_base = OTHER; note = 2'-O-methylcytidine-3'-phosphate
  modified_base 13: mod_base = OTHER; note = 2'-O-methyluridine-3'-phosphate
  modified_base 14: mod_base = OTHER; note = 2'-O-methylguanosine-3'-phosphate
  modified_base 15: mod_base = OTHER; note = 2'-O-methyladenosine-3'-phosphate
  modified_base 16: mod_base = OTHER; note = 2'-O-methyladenosine-3'-phosphate
  modified_base 17: mod_base = OTHER; note = 2'-O-methyladenosine-3'-phosphate
  modified_base 18: mod_base = OTHER; note = 2'-O-methylcytidine-3'-phosphate
  modified_base 19: mod_base = OTHER; note = 2'-O-methyladenosine-3'-phosphate
  modified_base 20: mod_base = OTHER; note = 2'-O-methylguanosine-3'-phosphate
  modified_base 21: mod_base = OTHER; note = 2'-O-methyladenosine-3'-phosphate ((2S,4R)-1-[29-[[2-(acetylamino)-2-deoxy-beta-D-galactopyra nosyl]oxy]-14,14-bis[[3-[[3-[[5-[[2-(acetylamino)-2-deoxy-b eta-D-galactopyranosyl]oxy]-1-oxopentyl]amino]propyl]amino] -3-oxopropoxy]methyl]-1,12,19,25-tetraoxo-16-oxa-13,20,24-t riazanonacos-1-yl]-4-hydroxy-2-pyrrolidinyl)methyl ester
ccggaatgttgctgaaacaga

SEQ ID NO: 2509 - RNA, 23 nt, synthetic construct
  source 1..23: mol_type = other RNA
  modified_base 1: mod_base = OTHER; note = 2'-O-methyluridine-3'-phosphorothioate
  modified_base 2: mod_base = OTHER; note = 2'-deoxy-2'-fluorocytidine-3'-phosphorothioate
  modified_base 3: mod_base = OTHER; note = 2'-O-methyluridine-3'-phosphate
  modified_base 4: mod_base = OTHER; note = 2'-O-methylguanosine-3'-phosphate
  modified_base 5: mod_base = OTHER; note = 2'-O-methyluridine-3'-phosphate
  modified_base 6: mod_base = OTHER; note = 2'-deoxy-2'-fluorouridine-3'-phosphate
  modified_base 7: mod_base = OTHER; note = 2'-O-methyluridine-3'-phosphate
  modified_base 8: mod_base = OTHER; note = 2'-deoxy-2'-fluorocytidine-3'-phosphate
  modified_base 9: mod_base = OTHER; note = 2'-deoxy-2'-fluoroadenosine-3'-phosphate
  modified_base 10: mod_base = OTHER; note = 2'-O-methylguanosine-3'-phosphate
  modified_base 11: mod_base = OTHER; note = 2'-O-methylcytidine-3'-phosphate
  modified_base 12: mod_base = OTHER; note = 2'-O-methyladenosine-3'-phosphate
  modified_base 13: mod_base = OTHER; note = 2'-O-methyladenosine-3'-phosphate
  modified_base 14: mod_base = OTHER; note = 2'-deoxy-2'-fluorocytidine-3'-phosphate
  modified_base 15: mod_base = OTHER; note = 2'-O-methyladenosine-3'-phosphate
  modified_base 16: mod_base = OTHER; note = 2'-deoxy-2'-fluorouridine-3'-phosphate
  modified_base 17: mod_base = OTHER; note = 2'-O-methyluridine-3'-phosphate
  modified_base 18: mod_base = OTHER; note = 2'-O-methylcytidine-3'-phosphate
  modified_base 19: mod_base = OTHER; note = 2'-O-methylcytidine-3'-phosphate
  modified_base 20: mod_base = OTHER; note = 2'-O-methylguanosine-3'-phosphate
  modified_base 21: mod_base = OTHER; note = 2'-O-methylguanosine-3'-phosphorothioate
  modified_base 22: mod_base = OTHER; note = 2'-O-methyladenosine-3'-phosphorothioate
  modified_base 23: mod_base = OTHER; note = 2'-O-methylguanosine
tctgtttcagcaacattccggag

SEQ ID NO: 2510 - RNA, 21 nt, synthetic construct
  source 1..21: mol_type = other RNA
  modified_base 1: mod_base = OTHER; note = 2'-O-methyladenosine-3'-phosphorothioate
  modified_base 2: mod_base = OTHER; note = 2'-O-methyluridine-3'-phosphorothioate
  modified_base 3: mod_base = OTHER; note = 2'-O-methylguanosine-3'-phosphate
  modified_base 4: mod_base = OTHER; note = 2'-O-methylcytidine-3'-phosphate
  modified_base 5: mod_base = OTHER; note = 2'-O-methyluridine-3'-phosphate
  modified_base 6: mod_base = OTHER; note = 2'-O-methylcytidine-3'-phosphate
  modified_base 7: mod_base = OTHER; note = 2'-deoxy-2'-fluorocytidine-3'-phosphate
  modified_base 8: mod_base = OTHER; note = 2'-O-methylguanosine-3'-phosphate
  modified_base 9: mod_base = OTHER; note = 2'-deoxy-2'-fluoroguanosine-3'-phosphate
  modified_base 10: mod_base = OTHER; note = 2'-deoxy-2'-fluoroadenosine-3'-phosphate
  modified_base 11: mod_base = OTHER; note = 2'-deoxy-2'-fluoroadenosine-3'-phosphate
  modified_base 12: mod_base = OTHER; note = 2'-O-methyluridine-3'-phosphate
  modified_base 13: mod_base = OTHER; note = 2'-O-methylguanosine-3'-phosphate
  modified_base 14: mod_base = OTHER; note = 2'-O-methyluridine-3'-phosphate
  modified_base 15: mod_base = OTHER; note = 2'-O-methyluridine-3'-phosphate
  modified_base 16: mod_base = OTHER; note = 2'-O-methylguanosine-3'-phosphate
  modified_base 17: mod_base = OTHER; note = 2'-O-methylcytidine-3'-phosphate
  modified_base 18: mod_base = OTHER; note = 2'-O-methyluridine-3'-phosphate
  modified_base 19: mod_base = OTHER; note = 2'-O-methylguanosine-3'-phosphate
  modified_base 20: mod_base = OTHER; note = 2'-O-methyladenosine-3'-phosphate
  modified_base 21: mod_base = OTHER; note = 2'-O-methyladenosine-3'-phosphate ((2S,4R)-1-[29-[[2-(acetylamino)-2-deoxy-beta-D-galactopyra nosyl]oxy]-14,14-bis[[3-[[3-[[5-[[2-(acetylamino)-2-deoxy-b eta-D-galactopyranosyl]oxy]-1-oxopentyl]amino]propyl]amino] -3-oxopropoxy]methyl]-1,12,19,25-tetraoxo-16-oxa-13,20,24-t riazanonacos-1-yl]-4-hydroxy-2-pyrrolidinyl)methyl ester
atgctccggaatgttgctgaa

SEQ ID NO: 2511 - RNA, 23 nt, synthetic construct
  source 1..23: mol_type = other RNA
  modified_base 1: mod_base = OTHER; note = 2'-O-methyluridine-3'-phosphorothioate
  modified_base 2: mod_base = OTHER; note = 2'-deoxy-2'-fluorouridine-3'-phosphorothioate
  modified_base 3: mod_base = OTHER; note = 2'-O-methylcytidine-3'-phosphate
  modified_base 4: mod_base = OTHER; note = 2'-O-methyladenosine-3'-phosphate
  modified_base 5: mod_base = OTHER; note = 2'-O-methylguanosine-3'-phosphate
  modified_base 6: mod_base = OTHER; note = 2'-deoxy-2'-fluorocytidine-3'-phosphate
  modified_base 7: mod_base = OTHER; note = 2'-O-methyladenosine-3'-phosphate
  modified_base 8: mod_base = OTHER; note = 2'-deoxy-2'-fluoroadenosine-3'-phosphate
  modified_base 9: mod_base = OTHER; note = 2'-deoxy-2'-fluorocytidine-3'-phosphate
  modified_base 10: mod_base = OTHER; note = 2'-O-methyladenosine-3'-phosphate
  modified_base 11: mod_base = OTHER; note = 2'-O-methyluridine-3'-phosphate
  modified_base 12: mod_base = OTHER; note = 2'-O-methyluridine-3'-phosphate
  modified_base 13: mod_base = OTHER; note = 2'-O-methylcytidine-3'-phosphate
  modified_base 14: mod_base = OTHER; note = 2'-deoxy-2'-fluorocytidine-3'-phosphate
  modified_base 15: mod_base = OTHER; note = 2'-O-methylguanosine-3'-phosphate
  modified_base 16: mod_base = OTHER; note = 2'-deoxy-2'-fluoroguanosine-3'-phosphate
  modified_base 17: mod_base = OTHER; note = 2'-O-methyladenosine-3'-phosphate
  modified_base 18: mod_base = OTHER; note = 2'-O-methylguanosine-3'-phosphate
  modified_base 19: mod_base = OTHER; note = 2'-O-methylcytidine-3'-phosphate
  modified_base 20: mod_base = OTHER; note = 2'-O-methyladenosine-3'-phosphate
  modified_base 21: mod_base = OTHER; note = 2'-O-methyluridine-3'-phosphorothioate
  modified_base 22: mod_base = OTHER; note = 2'-O-methylcytidine-3'-phosphorothioate
  modified_base 23: mod_base = OTHER; note = 2'-O-methylcytidine
ttcagcaacattccggagcatcc

SEQ ID NO: 2512 - RNA, 21 nt, synthetic construct
  source 1..21: mol_type = other RNA
  modified_base 1: mod_base = OTHER; note = 2'-O-methylguanosine-3'-phosphorothioate
  modified_base 2: mod_base = OTHER; note = 2'-O-methyladenosine-3'-phosphorothioate
  modified_base 3: mod_base = OTHER; note = 2'-O-methyluridine-3'-phosphate
  modified_base 4: mod_base = OTHER; note = 2'-O-methylguanosine-3'-phosphate
  modified_base 5: mod_base = OTHER; note = 2'-O-methylcytidine-3'-phosphate
  modified_base 6: mod_base = OTHER; note = 2'-O-methyluridine-3'-phosphate
  modified_base 7: mod_base = OTHER; note = 2'-deoxy-2'-fluorocytidine-3'-phosphate
  modified_base 8: mod_base = OTHER; note = 2'-O-methylcytidine-3'-phosphate
  modified_base 9: mod_base = OTHER; note = 2'-deoxy-2'-fluoroguanosine-3'-phosphate
  modified_base 10: mod_base = OTHER; note = 2'-deoxy-2'-fluoroguanosine-3'-phosphate
  modified_base 11: mod_base = OTHER; note = 2'-deoxy-2'-fluoroadenosine-3'-phosphate
  modified_base 12: mod_base = OTHER; note = 2'-O-methyladenosine-3'-phosphate
  modified_base 13: mod_base = OTHER; note = 2'-O-methyluridine-3'-phosphate
  modified_base 14: mod_base = OTHER; note = 2'-O-methylguanosine-3'-phosphate
  modified_base 15: mod_base = OTHER; note = 2'-O-methyluridine-3'-phosphate
  modified_base 16: mod_base = OTHER; note = 2'-O-methyluridine-3'-phosphate
  modified_base 17: mod_base = OTHER; note = 2'-O-methylguanosine-3'-phosphate
  modified_base 18: mod_base = OTHER; note = 2'-O-methylcytidine-3'-phosphate
  modified_base 19: mod_base = OTHER; note = 2'-O-methyluridine-3'-phosphate
  modified_base 20: mod_base = OTHER; note = 2'-O-methylguanosine-3'-phosphate
  modified_base 21: mod_base = OTHER; note = 2'-O-methyladenosine-3'-phosphate ((2S,4R)-1-[29-[[2-(acetylamino)-2-deoxy-beta-D-galactopyra nosyl]oxy]-14,14-bis[[3-[[3-[[5-[[2-(acetylamino)-2-deoxy-b eta-D-galactopyranosyl]oxy]-1-oxopentyl]amino]propyl]amino] -3-oxopropoxy]methyl]-1,12,19,25-tetraoxo-16-oxa-13,20,24-t riazanonacos-1-yl]-4-hydroxy-2-pyrrolidinyl)methyl ester
gatgctccggaatgttgctga

SEQ ID NO: 2513 - RNA, 23 nt, synthetic construct
  source 1..23: mol_type = other RNA
  modified_base 1: mod_base = OTHER; note = 2'-O-methyluridine-3'-phosphorothioate
  modified_base 2: mod_base = OTHER; note = 2'-deoxy-2'-fluorocytidine-3'-phosphorothioate
  modified_base 3: mod_base = OTHER; note = 2'-O-methyladenosine-3'-phosphate
  modified_base 4: mod_base = OTHER; note = 2'-O-methylguanosine-3'-phosphate
  modified_base 5: mod_base = OTHER; note = 2'-O-methylcytidine-3'-phosphate
  modified_base 6: mod_base = OTHER; note = 2'-deoxy-2'-fluoroadenosine-3'-phosphate
  modified_base 7: mod_base = OTHER; note = 2'-O-methyladenosine-3'-phosphate
  modified_base 8: mod_base = OTHER; note = 2'-deoxy-2'-fluorocytidine-3'-phosphate
  modified_base 9: mod_base = OTHER; note = 2'-deoxy-2'-fluoroadenosine-3'-phosphate
  modified_base 10: mod_base = OTHER; note = 2'-O-methyluridine-3'-phosphate
  modified_base 11: mod_base = OTHER; note = 2'-O-methyluridine-3'-phosphate
  modified_base 12: mod_base = OTHER; note = 2'-O-methylcytidine-3'-phosphate
  modified_base 13: mod_base = OTHER; note = 2'-O-methylcytidine-3'-phosphate
  modified_base 14: mod_base = OTHER; note = 2'-deoxy-2'-fluoroguanosine-3'-phosphate
  modified_base 15: mod_base = OTHER; note = 2'-O-methylguanosine-3'-phosphate
  modified_base 16: mod_base = OTHER; note = 2'-deoxy-2'-fluoroadenosine-3'-phosphate
  modified_base 17: mod_base = OTHER; note = 2'-O-methylguanosine-3'-phosphate
  modified_base 18: mod_base = OTHER; note = 2'-O-methylcytidine-3'-phosphate
  modified_base 19: mod_base = OTHER; note = 2'-O-methyladenosine-3'-phosphate
  modified_base 20: mod_base = OTHER; note = 2'-O-methyluridine-3'-phosphate
  modified_base 21: mod_base = OTHER; note = 2'-O-methylcytidine-3'-phosphorothioate
  modified_base 22: mod_base = OTHER; note = 2'-O-methylcytidine-3'-phosphorothioate
  modified_base 23: mod_base = OTHER; note = 2'-O-methyluridine
tcagcaacattccggagcatcct

SEQ ID NO: 2514 - RNA, 21 nt, synthetic construct
  source 1..21: mol_type = other RNA
  modified_base 1: mod_base = OTHER; note = 2'-O-methyluridine-3'-phosphorothioate
  modified_base 2: mod_base = OTHER; note = 2'-O-methylguanosine-3'-phosphorothioate
  modified_base 3: mod_base = OTHER; note = 2'-O-methyluridine-3'-phosphate
  modified_base 4: mod_base = OTHER; note = 2'-O-methylcytidine-3'-phosphate
  modified_base 5: mod_base = OTHER; note = 2'-O-methylcytidine-3'-phosphate
  modified_base 6: mod_base = OTHER; note = 2'-O-methyluridine-3'-phosphate
  modified_base 7: mod_base = OTHER; note = 2'-deoxy-2'-fluorocytidine-3'-phosphate
  modified_base 8: mod_base = OTHER; note = 2'-O-methylguanosine-3'-phosphate
  modified_base 9: mod_base = OTHER; note = 2'-deoxy-2'-fluoroadenosine-3'-phosphate
  modified_base 10: mod_base = OTHER; note = 2'-deoxy-2'-fluoroguanosine-3'-phosphate
  modified_base 11: mod_base = OTHER; note = 2'-deoxy-2'-fluoroadenosine-3'-phosphate
  modified_base 12: mod_base = OTHER; note = 2'-O-methyluridine-3'-phosphate
  modified_base 13: mod_base = OTHER; note = 2'-O-methyladenosine-3'-phosphate
  modified_base 14: mod_base = OTHER; note = 2'-O-methylcytidine-3'-phosphate
  modified_base 15: mod_base = OTHER; note = 2'-O-methyluridine-3'-phosphate
  modified_base 16: mod_base = OTHER; note = 2'-O-methyladenosine-3'-phosphate
  modified_base 17: mod_base = OTHER; note = 2'-O-methyladenosine-3'-phosphate
  modified_base 18: mod_base = OTHER; note = 2'-O-methyladenosine-3'-phosphate
  modified_base 19: mod_base = OTHER; note = 2'-O-methylguanosine-3'-phosphate
  modified_base 20: mod_base = OTHER; note = 2'-O-methylguanosine-3'-phosphate
  modified_base 21: mod_base = OTHER; note = 2'-O-methyladenosine-3'-phosphate ((2S,4R)-1-[29-[[2-(acetylamino)-2-deoxy-beta-D-galactopyra nosyl]oxy]-14,14-bis[[3-[[3-[[5-[[2-(acetylamino)-2-deoxy-b eta-D-galactopyranosyl]oxy]-1-oxopentyl]amino]propyl]amino] -3-oxopropoxy]methyl]-1,12,19,25-tetraoxo-16-oxa-13,20,24-t riazanonacos-1-yl]-4-hydroxy-2-pyrrolidinyl)methyl ester
tgtcctcgagatactaaagga

SEQ ID NO: 2515 - RNA, 23 nt, synthetic construct
  source 1..23: mol_type = other RNA
  modified_base 1: mod_base = OTHER; note = 2'-O-methyluridine-3'-phosphorothioate
  modified_base 2: mod_base = OTHER; note = 2'-deoxy-2'-fluorocytidine-3'-phosphorothioate
  modified_base 3: mod_base = OTHER; note = 2'-O-methylcytidine-3'-phosphate
  modified_base 4: mod_base = OTHER; note = 2'-O-methyluridine-3'-phosphate
  modified_base 5: mod_base = OTHER; note = 2'-O-methyluridine-3'-phosphate
  modified_base 6: mod_base = OTHER; note = 2'-deoxy-2'-fluorouridine-3'-phosphate
  modified_base 7: mod_base = OTHER; note = 2'-O-methyladenosine-3'-phosphate
  modified_base 8: mod_base = OTHER; note = 2'-deoxy-2'-fluoroguanosine-3'-phosphate
  modified_base 9: mod_base = OTHER; note = 2'-deoxy-2'-fluorouridine-3'-phosphate
  modified_base 10: mod_base = OTHER; note = 2'-O-methyladenosine-3'-phosphate
  modified_base 11: mod_base = OTHER; note = 2'-O-methyluridine-3'-phosphate
  modified_base 12: mod_base = OTHER; note = 2'-O-methylcytidine-3'-phosphate
  modified_base 13: mod_base = OTHER; note = 2'-O-methyluridine-3'-phosphate
  modified_base 14: mod_base = OTHER; note = 2'-deoxy-2'-fluorocytidine-3'-phosphate
  modified_base 15: mod_base = OTHER; note = 2'-O-methylguanosine-3'-phosphate
  modified_base 16: mod_base = OTHER; note = 2'-deoxy-2'-fluoroadenosine-3'-phosphate
  modified_base 17: mod_base = OTHER; note = 2'-O-methylguanosine-3'-phosphate
  modified_base 18: mod_base = OTHER; note = 2'-O-methylguanosine-3'-phosphate
  modified_base 19: mod_base = OTHER; note = 2'-O-methyladenosine-3'-phosphate
  modified_base 20: mod_base = OTHER; note = 2'-O-methylcytidine-3'-phosphate
  modified_base 21: mod_base = OTHER; note = 2'-O-methyladenosine-3'-phosphorothioate
  modified_base 22: mod_base = OTHER; note = 2'-O-methyluridine-3'-phosphorothioate
  modified_base 23: mod_base = OTHER; note = 2'-O-methylcytidine
tcctttagtatctcgaggacatc

SEQ ID NO: 2516 - RNA, 21 nt, synthetic construct
  source 1..21: mol_type = other RNA
  modified_base 1: mod_base = OTHER; note = 2'-O-methylguanosine-3'-phosphorothioate
  modified_base 2: mod_base = OTHER; note = 2'-O-methyluridine-3'-phosphorothioate
  modified_base 3: mod_base = OTHER; note = 2'-O-methylcytidine-3'-phosphate
  modified_base 4: mod_base = OTHER; note = 2'-O-methylcytidine-3'-phosphate
  modified_base 5: mod_base = OTHER; note = 2'-O-methyluridine-3'-phosphate
  modified_base 6: mod_base = OTHER; note = 2'-O-methylcytidine-3'-phosphate
  modified_base 7: mod_base = OTHER; note = 2'-deoxy-2'-fluoroguanosine-3'-phosphate
  modified_base 8: mod_base = OTHER; note = 2'-O-methyladenosine-3'-phosphate
  modified_base 9: mod_base = OTHER; note = 2'-deoxy-2'-fluoroguanosine-3'-phosphate
  modified_base 10: mod_base = OTHER; note = 2'-deoxy-2'-fluoroadenosine-3'-phosphate
  modified_base 11: mod_base = OTHER; note = 2'-deoxy-2'-fluorouridine-3'-phosphate
  modified_base 12: mod_base = OTHER; note = 2'-O-methyladenosine-3'-phosphate
  modified_base 13: mod_base = OTHER; note = 2'-O-methylcytidine-3'-phosphate
  modified_base 14: mod_base = OTHER; note = 2'-O-methyluridine-3'-phosphate
  modified_base 15: mod_base = OTHER; note = 2'-O-methyladenosine-3'-phosphate
  modified_base 16: mod_base = OTHER; note = 2'-O-methyladenosine-3'-phosphate
  modified_base 17: mod_base = OTHER; note = 2'-O-methyladenosine-3'-phosphate
  modified_base 18: mod_base = OTHER; note = 2'-O-methylguanosine-3'-phosphate
  modified_base 19: mod_base = OTHER; note = 2'-O-methylguanosine-3'-phosphate
  modified_base 20: mod_base = OTHER; note = 2'-O-methyladenosine-3'-phosphate
  modified_base 21: mod_base = OTHER; note = 2'-O-methyladenosine-3'-phosphate ((2S,4R)-1-[29-[[2-(acetylamino)-2-deoxy-beta-D-galactopyra nosyl]oxy]-14,14-bis[[3-[[3-[[5-[[2-(acetylamino)-2-deoxy-b eta-D-galactopyranosyl]oxy]-1-oxopentyl]amino]propyl]amino] -3-oxopropoxy]methyl]-1,12,19,25-tetraoxo-16-oxa-13,20,24-t riazanonacos-1-yl]-4-hydroxy-2-pyrrolidinyl)methyl ester
gtcctcgagatactaaaggaa

SEQ ID NO: 2517 - RNA, 23 nt, synthetic construct
  source 1..23: mol_type = other RNA
  modified_base 1: mod_base = OTHER; note = 2'-O-methyluridine-3'-phosphorothioate
  modified_base 2: mod_base = OTHER; note = 2'-deoxy-2'-fluorouridine-3'-phosphorothioate
  modified_base 3: mod_base = OTHER; note = 2'-O-methylcytidine-3'-phosphate
  modified_base 4: mod_base = OTHER; note = 2'-O-methylcytidine-3'-phosphate
  modified_base 5: mod_base = OTHER; note = 2'-O-methyluridine-3'-phosphate
  modified_base 6: mod_base = OTHER; note = 2'-deoxy-2'-fluorouridine-3'-phosphate
  modified_base 7: mod_base = OTHER; note = 2'-O-methyluridine-3'-phosphate
  modified_base 8: mod_base = OTHER; note = 2'-deoxy-2'-fluoroadenosine-3'-phosphate
  modified_base 9: mod_base = OTHER; note = 2'-deoxy-2'-fluoroguanosine-3'-phosphate
  modified_base 10: mod_base = OTHER; note = 2'-O-methyluridine-3'-phosphate
  modified_base 11: mod_base = OTHER; note = 2'-O-methyladenosine-3'-phosphate
  modified_base 12: mod_base = OTHER; note = 2'-O-methyluridine-3'-phosphate
  modified_base 13: mod_base = OTHER; note = 2'-O-methylcytidine-3'-phosphate
  modified_base 14: mod_base = OTHER; note = 2'-deoxy-2'-fluorouridine-3'-phosphate
  modified_base 15: mod_base = OTHER; note = 2'-O-methylcytidine-3'-phosphate
  modified_base 16: mod_base = OTHER; note = 2'-deoxy-2'-fluoroguanosine-3'-phosphate
  modified_base 17: mod_base = OTHER; note = 2'-O-methyladenosine-3'-phosphate
  modified_base 18: mod_base = OTHER; note = 2'-O-methylguanosine-3'-phosphate
  modified_base 19: mod_base = OTHER; note = 2'-O-methylguanosine-3'-phosphate
  modified_base 20: mod_base = OTHER; note = 2'-O-methyladenosine-3'-phosphate
  modified_base 21: mod_base = OTHER; note = 2'-O-methylcytidine-3'-phosphorothioate
  modified_base 22: mod_base = OTHER; note = 2'-O-methyladenosine-3'-phosphorothioate
  modified_base 23: mod_base = OTHER; note = 2'-O-methyluridine
ttcctttagtatctcgaggacat

SEQ ID NO: 2518 - RNA, 21 nt, synthetic construct
  source 1..21: mol_type = other RNA
  modified_base 1: mod_base = OTHER; note = 2'-O-methyladenosine-3'-phosphorothioate
  modified_base 2: mod_base = OTHER; note = 2'-O-methyladenosine-3'-phosphorothioate
  modified_base 3: mod_base = OTHER; note = 2'-O-methylguanosine-3'-phosphate
  modified_base 4: mod_base = OTHER; note = 2'-O-methyladenosine-3'-phosphate
  modified_base 5: mod_base = OTHER; note = 2'-O-methyluridine-3'-phosphate
  modified_base 6: mod_base = OTHER; note = 2'-O-methylguanosine-3'-phosphate
  modified_base 7: mod_base = OTHER; note = 2'-deoxy-2'-fluorouridine-3'-phosphate
  modified_base 8: mod_base = OTHER; note = 2'-O-methylcytidine-3'-phosphate
  modified_base 9: mod_base = OTHER; note = 2'-deoxy-2'-fluorocytidine-3'-phosphate
  modified_base 10: mod_base = OTHER; note = 2'-deoxy-2'-fluorouridine-3'-phosphate
  modified_base 11: mod_base = OTHER; note = 2'-deoxy-2'-fluorocytidine-3'-phosphate
  modified_base 12: mod_base = OTHER; note = 2'-O-methylguanosine-3'-phosphate
  modified_base 13: mod_base = OTHER; note = 2'-O-methyladenosine-3'-phosphate
  modified_base 14: mod_base = OTHER; note = 2'-O-methylguanosine-3'-phosphate
  modified_base 15: mod_base = OTHER; note = 2'-O-methyladenosine-3'-phosphate
  modified_base 16: mod_base = OTHER; note = 2'-O-methyluridine-3'-phosphate
  modified_base 17: mod_base = OTHER; note = 2'-O-methyladenosine-3'-phosphate
  modified_base 18: mod_base = OTHER; note = 2'-O-methylcytidine-3'-phosphate
  modified_base 19: mod_base = OTHER; note = 2'-O-methyluridine-3'-phosphate
  modified_base 20: mod_base = OTHER; note = 2'-O-methyladenosine-3'-phosphate
  modified_base 21: mod_base = OTHER; note = 2'-O-methyladenosine-3'-phosphate ((2S,4R)-1-[29-[[2-(acetylamino)-2-deoxy-beta-D-galactopyra nosyl]oxy]-14,14-bis[[3-[[3-[[5-[[2-(acetylamino)-2-deoxy-b eta-D-galactopyranosyl]oxy]-1-oxopentyl]amino]propyl]amino] -3-oxopropoxy]methyl]-1,12,19,25-tetraoxo-16-oxa-13,20,24-t riazanonacos-1-yl]-4-hydroxy-2-pyrrolidinyl)methyl ester
aagatgtcctcgagatactaa

SEQ ID NO: 2519 - RNA, 23 nt, synthetic construct
  source 1..23: mol_type = other RNA
  modified_base 1: mod_base = OTHER; note = 2'-O-methyluridine-3'-phosphorothioate
  modified_base 2: mod_base = OTHER; note = 2'-deoxy-2'-fluorouridine-3'-phosphorothioate
  modified_base 3: mod_base = OTHER; note = 2'-O-methyladenosine-3'-phosphate
  modified_base 4: mod_base = OTHER; note = 2'-O-methylguanosine-3'-phosphate
  modified_base 5: mod_base = OTHER; note = 2'-O-methyluridine-3'-phosphate
  modified_base 6: mod_base = OTHER; note = 2'-deoxy-2'-fluoroadenosine-3'-phosphate
  modified_base 7: mod_base = OTHER; note = 2'-O-methyluridine-3'-phosphate
  modified_base 8: mod_base = OTHER; note = 2'-deoxy-2'-fluorocytidine-3'-phosphate
  modified_base 9: mod_base = OTHER; note = 2'-deoxy-2'-fluorouridine-3'-phosphate
  modified_base 10: mod_base = OTHER; note = 2'-O-methylcytidine-3'-phosphate
  modified_base 11: mod_base = OTHER; note = 2'-O-methylguanosine-3'-phosphate
  modified_base 12: mod_base = OTHER; note = 2'-O-methyladenosine-3'-phosphate
  modified_base 13: mod_base = OTHER; note = 2'-O-methylguanosine-3'-phosphate
  modified_base 14: mod_base = OTHER; note = 2'-deoxy-2'-fluoroguanosine-3'-phosphate
  modified_base 15: mod_base = OTHER; note = 2'-O-methyladenosine-3'-phosphate
  modified_base 16: mod_base = OTHER; note = 2'-deoxy-2'-fluorocytidine-3'-phosphate
  modified_base 17: mod_base = OTHER; note = 2'-O-methyladenosine-3'-phosphate
  modified_base 18: mod_base = OTHER; note = 2'-O-methyluridine-3'-phosphate
  modified_base 19: mod_base = OTHER; note = 2'-O-methylcytidine-3'-phosphate
  modified_base 20: mod_base = OTHER; note = 2'-O-methyluridine-3'-phosphate
  modified_base 21: mod_base = OTHER; note = 2'-O-methyluridine-3'-phosphorothioate
  modified_base 22: mod_base = OTHER; note = 2'-O-methylguanosine-3'-phosphorothioate
  modified_base 23: mod_base = OTHER; note = 2'-O-methyladenosine
ttagtatctcgaggacatcttga

SEQ ID NO: 2520 - RNA, 21 nt, synthetic construct
  source 1..21: mol_type = other RNA
  modified_base 1: mod_base = OTHER; note = 2'-O-methylcytidine-3'-phosphorothioate
  modified_base 2: mod_base = OTHER; note = 2'-O-methyladenosine-3'-phosphorothioate
  modified_base 3: mod_base = OTHER; note = 2'-O-methyladenosine-3'-phosphate
  modified_base 4: mod_base = OTHER; note = 2'-O-methylguanosine-3'-phosphate
  modified_base 5: mod_base = OTHER; note = 2'-O-methyladenosine-3'-phosphate
  modified_base 6: mod_base = OTHER; note = 2'-O-methyluridine-3'-phosphate
  modified_base 7: mod_base = OTHER; note = 2'-deoxy-2'-fluoroguanosine-3'-phosphate
  modified_base 8: mod_base = OTHER; note = 2'-O-methyluridine-3'-phosphate
  modified_base 9: mod_base = OTHER; note = 2'-deoxy-2'-fluorocytidine-3'-phosphate
  modified_base 10: mod_base = OTHER; note = 2'-deoxy-2'-fluorocytidine-3'-phosphate
  modified_base 11: mod_base = OTHER; note = 2'-deoxy-2'-fluorouridine-3'-phosphate
  modified_base 12: mod_base = OTHER; note = 2'-O-methylcytidine-3'-phosphate
  modified_base 13: mod_base = OTHER; note = 2'-O-methylguanosine-3'-phosphate
  modified_base 14: mod_base = OTHER; note = 2'-O-methyladenosine-3'-phosphate
  modified_base 15: mod_base = OTHER; note = 2'-O-methylguanosine-3'-phosphate
  modified_base 16: mod_base = OTHER; note = 2'-O-methyladenosine-3'-phosphate
  modified_base 17: mod_base = OTHER; note = 2'-O-methyluridine-3'-phosphate
  modified_base 18: mod_base = OTHER; note = 2'-O-methyladenosine-3'-phosphate
  modified_base 19: mod_base = OTHER; note = 2'-O-methylcytidine-3'-phosphate
  modified_base 20: mod_base = OTHER; note = 2'-O-methyluridine-3'-phosphate
  modified_base 21: mod_base = OTHER; note = 2'-O-methyladenosine-3'-phosphate ((2S,4R)-1-[29-[[2-(acetylamino)-2-deoxy-beta-D-galactopyra nosyl]oxy]-14,14-bis[[3-[[3-[[5-[[2-(acetylamino)-2-deoxy-b eta-D-galactopyranosyl]oxy]-1-oxopentyl]amino]propyl]amino] -3-oxopropoxy]methyl]-1,12,19,25-tetraoxo-16-oxa-13,20,24-t riazanonacos-1-yl]-4-hydroxy-2-pyrrolidinyl)methyl ester
caagatgtcctcgagatacta

SEQ ID NO: 2521 - RNA, 23 nt, synthetic construct
  source 1..23: mol_type = other RNA
  modified_base 1: mod_base = OTHER; note = 2'-O-methyluridine-3'-phosphorothioate
  modified_base 2: mod_base = OTHER; note = 2'-deoxy-2'-fluoroadenosine-3'-phosphorothioate
  modified_base 3: mod_base = OTHER; note = 2'-O-methylguanosine-3'-phosphate
  modified_base 4: mod_base = OTHER; note = 2'-O-methyluridine-3'-phosphate
  modified_base 5: mod_base = OTHER; note = 2'-O-methyladenosine-3'-phosphate
  modified_base 6: mod_base = OTHER; note = 2'-deoxy-2'-fluorouridine-3'-phosphate
  modified_base 7: mod_base = OTHER; note = 2'-O-methylcytidine-3'-phosphate
  modified_base 8: mod_base = OTHER; note = 2'-deoxy-2'-fluorouridine-3'-phosphate
  modified_base 9: mod_base = OTHER; note = 2'-deoxy-2'-fluorocytidine-3'-phosphate
  modified_base 10: mod_base = OTHER; note = 2'-O-methylguanosine-3'-phosphate
  modified_base 11: mod_base = OTHER; note = 2'-O-methyladenosine-3'-phosphate
  modified_base 12: mod_base = OTHER; note = 2'-O-methylguanosine-3'-phosphate
  modified_base 13: mod_base = OTHER; note = 2'-O-methylguanosine-3'-phosphate
  modified_base 14: mod_base = OTHER; note = 2'-deoxy-2'-fluoroadenosine-3'-phosphate
  modified_base 15: mod_base = OTHER; note = 2'-O-methylcytidine-3'-phosphate
  modified_base 16: mod_base = OTHER; note = 2'-deoxy-2'-fluoroadenosine-3'-phosphate
  modified_base 17: mod_base = OTHER; note = 2'-O-methyluridine-3'-phosphate
  modified_base 18: mod_base = OTHER; note = 2'-O-methylcytidine-3'-phosphate
  modified_base 19: mod_base = OTHER; note = 2'-O-methyluridine-3'-phosphate
  modified_base 20: mod_base = OTHER; note = 2'-O-methyluridine-3'-phosphate
  modified_base 21: mod_base = OTHER; note = 2'-O-methylguanosine-3'-phosphorothioate
  modified_base 22: mod_base = OTHER; note = 2'-O-methyladenosine-3'-phosphorothioate
  modified_base 23: mod_base = OTHER; note = 2'-O-methyladenosine
tagtatctcgaggacatcttgaa

SEQ ID NO: 2522 - RNA, 21 nt, synthetic construct
  source 1..21: mol_type = other RNA
  modified_base 1: mod_base = OTHER; note = 2'-O-methyladenosine-3'-phosphorothioate
  modified_base 2: mod_base = OTHER; note = 2'-O-methylcytidine-3'-phosphorothioate
  modified_base 3: mod_base = OTHER; note = 2'-O-methyladenosine-3'-phosphate
  modified_base 4: mod_base = OTHER; note = 2'-O-methyladenosine-3'-phosphate
  modified_base 5: mod_base = OTHER; note = 2'-O-methylcytidine-3'-phosphate
  modified_base 6: mod_base = OTHER; note = 2'-O-methyladenosine-3'-phosphate
  modified_base 7: mod_base = OTHER; note = 2'-deoxy-2'-fluorouridine-3'-phosphate
  modified_base 8: mod_base = OTHER; note = 2'-O-methylguanosine-3'-phosphate
  modified_base 9: mod_base = OTHER; note = 2'-deoxy-2'-fluorocytidine-3'-phosphate
  modified_base 10: mod_base = OTHER; note = 2'-deoxy-2'-fluorouridine-3'-phosphate
  modified_base 11: mod_base = OTHER; note = 2'-deoxy-2'-fluoroadenosine-3'-phosphate
  modified_base 12: mod_base = OTHER; note = 2'-O-methyladenosine-3'-phosphate
  modified_base 13: mod_base = OTHER; note = 2'-O-methyladenosine-3'-phosphate
  modified_base 14: mod_base = OTHER; note = 2'-O-methyluridine-3'-phosphate
  modified_base 15: mod_base = OTHER; note = 2'-O-methylcytidine-3'-phosphate
  modified_base 16: mod_base = OTHER; note = 2'-O-methyladenosine-3'-phosphate
  modified_base 17: mod_base = OTHER; note = 2'-O-methylguanosine-3'-phosphate
  modified_base 18: mod_base = OTHER; note = 2'-O-methyluridine-3'-phosphate
  modified_base 19: mod_base = OTHER; note = 2'-O-methyladenosine-3'-phosphate
  modified_base 20: mod_base = OTHER; note = 2'-O-methylcytidine-3'-phosphate
  modified_base 21: mod_base = OTHER; note = 2'-O-methyluridine-3'-phosphate ((2S,4R)-1-[29-[[2-(acetylamino)-2-deoxy-beta-D-galactopyra nosyl]oxy]-14,14-bis[[3-[[3-[[5-[[2-(acetylamino)-2-deoxy-b eta-D-galactopyranosyl]oxy]-1-oxopentyl]amino]propyl]amino] -3-oxopropoxy]methyl]-1,12,19,25-tetraoxo-16-oxa-13,20,24-t riazanonacos-1-yl]-4-hydroxy-2-pyrrolidinyl)methyl ester
acaacatgctaaatcagtact

SEQ ID NO: 2523 - RNA, 23 nt, synthetic construct
  source 1..23: mol_type = other RNA
  modified_base 1: mod_base = OTHER; note = 2'-O-methyladenosine-3'-phosphorothioate
  modified_base 2: mod_base = OTHER; note = 2'-deoxy-2'-fluoroguanosine-3'-phosphorothioate
  modified_base 3: mod_base = OTHER; note = 2'-O-methyluridine-3'-phosphate
  modified_base 4: mod_base = OTHER; note = 2'-O-methyladenosine-3'-phosphate
  modified_base 5: mod_base = OTHER; note = 2'-O-methylcytidine-3'-phosphate
  modified_base 6: mod_base = OTHER; note = 2'-deoxy-2'-fluorouridine-3'-phosphate
  modified_base 7: mod_base = OTHER; note = 2'-O-methylguanosine-3'-phosphate
  modified_base 8: mod_base = OTHER; note = 2'-deoxy-2'-fluoroadenosine-3'-phosphate
  modified_base 9: mod_base = OTHER; note = 2'-deoxy-2'-fluorouridine-3'-phosphate
  modified_base 10: mod_base = OTHER; note = 2'-O-methyluridine-3'-phosphate
  modified_base 11: mod_base = OTHER; note = 2'-O-methyluridine-3'-phosphate
  modified_base 12: mod_base = OTHER; note = 2'-O-methyladenosine-3'-phosphate
  modified_base 13: mod_base = OTHER; note = 2'-O-methylguanosine-3'-phosphate
  modified_base 14: mod_base = OTHER; note = 2'-deoxy-2'-fluorocytidine-3'-phosphate
  modified_base 15: mod_base = OTHER; note = 2'-O-methyladenosine-3'-phosphate
  modified_base 16: mod_base = OTHER; note = 2'-deoxy-2'-fluorouridine-3'-phosphate
  modified_base 17: mod_base = OTHER; note = 2'-O-methylguanosine-3'-phosphate
  modified_base 18: mod_base = OTHER; note = 2'-O-methyluridine-3'-phosphate
  modified_base 19: mod_base = OTHER; note = 2'-O-methyluridine-3'-phosphate
  modified_base 20: mod_base = OTHER; note = 2'-O-methylguanosine-3'-phosphate
  modified_base 21: mod_base = OTHER; note = 2'-O-methyluridine-3'-phosphorothioate
  modified_base 22: mod_base = OTHER; note = 2'-O-methyluridine-3'-phosphorothioate
  modified_base 23: mod_base = OTHER; note = 2'-O-methylcytidine
agtactgatttagcatgttgttc

SEQ ID NO: 2524 - RNA, 21 nt, synthetic construct
  source 1..21: mol_type = other RNA
  modified_base 1: mod_base = OTHER; note = 2'-O-methylcytidine-3'-phosphorothioate
  modified_base 2: mod_base = OTHER; note = 2'-O-methyladenosine-3'-phosphorothioate
  modified_base 3: mod_base = OTHER; note = 2'-O-methyladenosine-3'-phosphate
  modified_base 4: mod_base = OTHER; note = 2'-O-methylcytidine-3'-phosphate
  modified_base 5: mod_base = OTHER; note = 2'-O-methyladenosine-3'-phosphate
  modified_base 6: mod_base = OTHER; note = 2'-O-methyluridine-3'-phosphate
  modified_base 7: mod_base = OTHER; note = 2'-deoxy-2'-fluoroguanosine-3'-phosphate
  modified_base 8: mod_base = OTHER; note = 2'-O-methylcytidine-3'-phosphate
  modified_base 9: mod_base = OTHER; note = 2'-deoxy-2'-fluorouridine-3'-phosphate
  modified_base 10: mod_base = OTHER; note = 2'-deoxy-2'-fluoroadenosine-3'-phosphate
  modified_base 11: mod_base = OTHER; note = 2'-deoxy-2'-fluoroadenosine-3'-phosphate
  modified_base 12: mod_base = OTHER; note = 2'-O-methyladenosine-3'-phosphate
  modified_base 13: mod_base = OTHER; note = 2'-O-methyluridine-3'-phosphate
  modified_base 14: mod_base = OTHER; note = 2'-O-methylcytidine-3'-phosphate
  modified_base 15: mod_base = OTHER; note = 2'-O-methyladenosine-3'-phosphate
  modified_base 16: mod_base = OTHER; note = 2'-O-methylguanosine-3'-phosphate
  modified_base 17: mod_base = OTHER; note = 2'-O-methyluridine-3'-phosphate
  modified_base 18: mod_base = OTHER; note = 2'-O-methyladenosine-3'-phosphate
  modified_base 19: mod_base = OTHER; note = 2'-O-methylcytidine-3'-phosphate
  modified_base 20: mod_base = OTHER; note = 2'-O-methyluridine-3'-phosphate
  modified_base 21: mod_base = OTHER; note = 2'-O-methyluridine-3'-phosphate ((2S,4R)-1-[29-[[2-(acetylamino)-2-deoxy-beta-D-galactopyra nosyl]oxy]-14,14-bis[[3-[[3-[[5-[[2-(acetylamino)-2-deoxy-b eta-D-galactopyranosyl]oxy]-1-oxopentyl]amino]propyl]amino] -3-oxopropoxy]methyl]-1,12,19,25-tetraoxo-16-oxa-13,20,24-t riazanonacos-1-yl]-4-hydroxy-2-pyrrolidinyl)methyl ester
caacatgctaaatcagtactt

SEQ ID NO: 2525 - RNA, 23 nt, synthetic construct
  source 1..23: mol_type = other RNA
  modified_base 1: mod_base = OTHER; note = 2'-O-methyladenosine-3'-phosphorothioate
  modified_base 2: mod_base = OTHER; note = 2'-deoxy-2'-fluoroadenosine-3'-phosphorothioate
  modified_base 3: mod_base = OTHER; note = 2'-O-methylguanosine-3'-phosphate
  modified_base 4: mod_base = OTHER; note = 2'-O-methyluridine-3'-phosphate
  modified_base 5: mod_base = OTHER; note = 2'-O-methyladenosine-3'-phosphate
  modified_base 6: mod_base = OTHER; note = 2'-deoxy-2'-fluorocytidine-3'-phosphate
  modified_base 7: mod_base = OTHER; note = 2'-O-methyluridine-3'-phosphate
  modified_base 8: mod_base = OTHER; note = 2'-deoxy-2'-fluoroguanosine-3'-phosphate
  modified_base 9: mod_base = OTHER; note = 2'-deoxy-2'-fluoroadenosine-3'-phosphate
  modified_base 10: mod_base = OTHER; note = 2'-O-methyluridine-3'-phosphate
  modified_base 11: mod_base = OTHER; note = 2'-O-methyluridine-3'-phosphate
  modified_base 12: mod_base = OTHER; note = 2'-O-methyluridine-3'-phosphate
  modified_base 13: mod_base = OTHER; note = 2'-O-methyladenosine-3'-phosphate
  modified_base 14: mod_base = OTHER; note = 2'-deoxy-2'-fluoroguanosine-3'-phosphate
  modified_base 15: mod_base = OTHER; note = 2'-O-methylcytidine-3'-phosphate
  modified_base 16: mod_base = OTHER; note = 2'-deoxy-2'-fluoroadenosine-3'-phosphate
  modified_base 17: mod_base = OTHER; note = 2'-O-methyluridine-3'-phosphate
  modified_base 18: mod_base = OTHER; note = 2'-O-methylguanosine-3'-phosphate
  modified_base 19: mod_base = OTHER; note = 2'-O-methyluridine-3'-phosphate
  modified_base 20: mod_base = OTHER; note = 2'-O-methyluridine-3'-phosphate
  modified_base 21: mod_base = OTHER; note = 2'-O-methylguanosine-3'-phosphorothioate
  modified_base 22: mod_base = OTHER; note = 2'-O-methyluridine-3'-phosphorothioate
  modified_base 23: mod_base = OTHER; note = 2'-O-methyluridine
aagtactgatttagcatgttgtt

SEQ ID NO: 2526 - RNA, 21 nt, synthetic construct
  source 1..21: mol_type = other RNA
  modified_base 1: mod_base = OTHER; note = 2'-O-methyladenosine-3'-phosphorothioate
  modified_base 2: mod_base = OTHER; note = 2'-O-methyluridine-3'-phosphorothioate
  modified_base 3: mod_base = OTHER; note = 2'-O-methylguanosine-3'-phosphate
  modified_base 4: mod_base = OTHER; note = 2'-O-methyladenosine-3'-phosphate
  modified_base 5: mod_base = OTHER; note = 2'-O-methyladenosine-3'-phosphate
  modified_base 6: mod_base = OTHER; note = 2'-O-methylcytidine-3'-phosphate
  modified_base 7: mod_base = OTHER; note = 2'-deoxy-2'-fluoroadenosine-3'-phosphate
  modified_base 8: mod_base = OTHER; note = 2'-O-methyladenosine-3'-phosphate
  modified_base 9: mod_base = OTHER; note = 2'-deoxy-2'-fluorocytidine-3'-phosphate
  modified_base 10: mod_base = OTHER; note = 2'-deoxy-2'-fluoroadenosine-3'-phosphate
  modified_base 11: mod_base = OTHER; note = 2'-deoxy-2'-fluorouridine-3'-phosphate
  modified_base 12: mod_base = OTHER; note = 2'-O-methylguanosine-3'-phosphate
  modified_base 13: mod_base = OTHER; note = 2'-O-methylcytidine-3'-phosphate
  modified_base 14: mod_base = OTHER; note = 2'-O-methyluridine-3'-phosphate
  modified_base 15: mod_base = OTHER; note = 2'-O-methyladenosine-3'-phosphate
  modified_base 16: mod_base = OTHER; note = 2'-O-methyladenosine-3'-phosphate
  modified_base 17: mod_base = OTHER; note = 2'-O-methyladenosine-3'-phosphate
  modified_base 18: mod_base = OTHER; note = 2'-O-methyluridine-3'-phosphate
  modified_base 19: mod_base = OTHER; note = 2'-O-methylcytidine-3'-phosphate
  modified_base 20: mod_base = OTHER; note = 2'-O-methyladenosine-3'-phosphate
  modified_base 21: mod_base = OTHER; note = 2'-O-methylguanosine-3'-phosphate ((2S,4R)-1-[29-[[2-(acetylamino)-2-deoxy-beta-D-galactopyra nosyl]oxy]-14,14-bis[[3-[[3-[[5-[[2-(acetylamino)-2-deoxy-b eta-D-galactopyranosyl]oxy]-1-oxopentyl]amino]propyl]amino] -3-oxopropoxy]methyl]-1,12,19,25-tetraoxo-16-oxa-13,20,24-t riazanonacos-1-yl]-4-hydroxy-2-pyrrolidinyl)methyl ester
atgaacaacatgctaaatcag

SEQ ID NO: 2527 - RNA, 23 nt, synthetic construct
  source 1..23: mol_type = other RNA
  modified_base 1: mod_base = OTHER; note = 2'-O-methylcytidine-3'-phosphorothioate
  modified_base 2: mod_base = OTHER; note = 2'-deoxy-2'-fluorouridine-3'-phosphorothioate
  modified_base 3: mod_base = OTHER; note = 2'-O-methylguanosine-3'-phosphate
  modified_base 4: mod_base = OTHER; note = 2'-O-methyladenosine-3'-phosphate
  modified_base 5: mod_base = OTHER; note = 2'-O-methyluridine-3'-phosphate
  modified_base 6: mod_base = OTHER; note = 2'-deoxy-2'-fluorouridine-3'-phosphate
  modified_base 7: mod_base = OTHER; note = 2'-O-methyluridine-3'-phosphate
  modified_base 8: mod_base = OTHER; note = 2'-deoxy-2'-fluoroadenosine-3'-phosphate
  modified_base 9: mod_base = OTHER; note = 2'-deoxy-2'-fluoroguanosine-3'-phosphate
  modified_base 10: mod_base = OTHER; note = 2'-O-methylcytidine-3'-phosphate
  modified_base 11: mod_base = OTHER; note = 2'-O-methyladenosine-3'-phosphate
  modified_base 12: mod_base = OTHER; note = 2'-O-methyluridine-3'-phosphate
  modified_base 13: mod_base = OTHER; note = 2'-O-methylguanosine-3'-phosphate
  modified_base 14: mod_base = OTHER; note = 2'-deoxy-2'-fluorouridine-3'-phosphate
  modified_base 15: mod_base = OTHER; note = 2'-O-methyluridine-3'-phosphate
  modified_base 16: mod_base = OTHER; note = 2'-deoxy-2'-fluoroguanosine-3'-phosphate
  modified_base 17: mod_base = OTHER; note = 2'-O-methyluridine-3'-phosphate
  modified_base 18: mod_base = OTHER; note = 2'-O-methyluridine-3'-phosphate
  modified_base 19: mod_base = OTHER; note = 2'-O-methylcytidine-3'-phosphate
  modified_base 20: mod_base = OTHER; note = 2'-O-methyladenosine-3'-phosphate
  modified_base 21: mod_base = OTHER; note = 2'-O-methyluridine-3'-phosphorothioate
  modified_base 22: mod_base = OTHER; note = 2'-O-methyladenosine-3'-phosphorothioate
  modified_base 23: mod_base = OTHER; note = 2'-O-methyladenosine
ctgatttagcatgttgttcataa

SEQ ID NO: 2528 - RNA, 21 nt, synthetic construct
  source 1..21: mol_type = other RNA
  modified_base 1: mod_base = OTHER; note = 2'-O-methyluridine-3'-phosphorothioate
  modified_base 2: mod_base = OTHER; note = 2'-O-methyladenosine-3'-phosphorothioate
  modified_base 3: mod_base = OTHER; note = 2'-O-methyluridine-3'-phosphate
  modified_base 4: mod_base = OTHER; note = 2'-O-methylguanosine-3'-phosphate
  modified_base 5: mod_base = OTHER; note = 2'-O-methyladenosine-3'-phosphate
  modified_base 6: mod_base = OTHER; note = 2'-O-methyladenosine-3'-phosphate
  modified_base 7: mod_base = OTHER; note = 2'-deoxy-2'-fluorocytidine-3'-phosphate
  modified_base 8: mod_base = OTHER; note = 2'-O-methyladenosine-3'-phosphate
  modified_base 9: mod_base = OTHER; note = 2'-deoxy-2'-fluoroadenosine-3'-phosphate
  modified_base 10: mod_base = OTHER; note = 2'-deoxy-2'-fluorocytidine-3'-phosphate
  modified_base 11: mod_base = OTHER; note = 2'-deoxy-2'-fluoroadenosine-3'-phosphate
  modified_base 12: mod_base = OTHER; note = 2'-O-methyluridine-3'-phosphate
  modified_base 13: mod_base = OTHER; note = 2'-O-methylguanosine-3'-phosphate
  modified_base 14: mod_base = OTHER; note = 2'-O-methylcytidine-3'-phosphate
  modified_base 15: mod_base = OTHER; note = 2'-O-methyluridine-3'-phosphate
  modified_base 16: mod_base = OTHER; note = 2'-O-methyladenosine-3'-phosphate
  modified_base 17: mod_base = OTHER; note = 2'-O-methyladenosine-3'-phosphate
  modified_base 18: mod_base = OTHER; note = 2'-O-methyladenosine-3'-phosphate
  modified_base 19: mod_base = OTHER; note = 2'-O-methyluridine-3'-phosphate
  modified_base 20: mod_base = OTHER; note = 2'-O-methylcytidine-3'-phosphate
  modified_base 21: mod_base = OTHER; note = 2'-O-methyladenosine-3'-phosphate ((2S,4R)-1-[29-[[2-(acetylamino)-2-deoxy-beta-D-galactopyra nosyl]oxy]-14,14-bis[[3-[[3-[[5-[[2-(acetylamino)-2-deoxy-b eta-D-galactopyranosyl]oxy]-1-oxopentyl]amino]propyl]amino] -3-oxopropoxy]methyl]-1,12,19,25-tetraoxo-16-oxa-13,20,24-t riazanonacos-1-yl]-4-hydroxy-2-pyrrolidinyl)methyl ester
tatgaacaacatgctaaatca

SEQ ID NO: 2529 - RNA, 23 nt, synthetic construct
  source 1..23: mol_type = other RNA
  modified_base 1: mod_base = OTHER; note = 2'-O-methyluridine-3'-phosphorothioate
  modified_base 2: mod_base = OTHER; note = 2'-deoxy-2'-fluoroguanosine-3'-phosphorothioate
  modified_base 3: mod_base = OTHER; note = 2'-O-methyladenosine-3'-phosphate
  modified_base 4: mod_base = OTHER; note = 2'-O-methyluridine-3'-phosphate
  modified_base 5: mod_base = OTHER; note = 2'-O-methyluridine-3'-phosphate
  modified_base 6: mod_base = OTHER; note = 2'-deoxy-2'-fluorouridine-3'-phosphate
  modified_base 7: mod_base = OTHER; note = 2'-O-methyladenosine-3'-phosphate
  modified_base 8: mod_base = OTHER; note = 2'-deoxy-2'-fluoroguanosine-3'-phosphate
  modified_base 9: mod_base = OTHER; note = 2'-deoxy-2'-fluorocytidine-3'-phosphate
  modified_base 10: mod_base = OTHER; note = 2'-O-methyladenosine-3'-phosphate
  modified_base 11: mod_base = OTHER; note = 2'-O-methyluridine-3'-phosphate
  modified_base 12: mod_base = OTHER; note = 2'-O-methylguanosine-3'-phosphate
  modified_base 13: mod_base = OTHER; note = 2'-O-methyluridine-3'-phosphate
  modified_base 14: mod_base = OTHER; note = 2'-deoxy-2'-fluorouridine-3'-phosphate
  modified_base 15: mod_base = OTHER; note = 2'-O-methylguanosine-3'-phosphate
  modified_base 16: mod_base = OTHER; note = 2'-deoxy-2'-fluorouridine-3'-phosphate
  modified_base 17: mod_base = OTHER; note = 2'-O-methyluridine-3'-phosphate
  modified_base 18: mod_base = OTHER; note = 2'-O-methylcytidine-3'-phosphate
  modified_base 19: mod_base = OTHER; note = 2'-O-methyladenosine-3'-phosphate
  modified_base 20: mod_base = OTHER; note = 2'-O-methyluridine-3'-phosphate
  modified_base 21: mod_base = OTHER; note = 2'-O-methyladenosine-3'-phosphorothioate
  modified_base 22: mod_base = OTHER; note = 2'-O-methyladenosine-3'-phosphorothioate
  modified_base 23: mod_base = OTHER; note = 2'-O-methyluridine
tgatttagcatgttgttcataat

SEQ ID NO: 2530 - RNA, 21 nt, synthetic construct
  source 1..21: mol_type = other RNA
  modified_base 1: mod_base = OTHER; note = 2'-O-methylguanosine-3'-phosphorothioate
  modified_base 2: mod_base = OTHER; note = 2'-O-methylcytidine-3'-phosphorothioate
  modified_base 3: mod_base = OTHER; note = 2'-O-methylcytidine-3'-phosphate
  modified_base 4: mod_base = OTHER; note = 2'-O-methyladenosine-3'-phosphate
  modified_base 5: mod_base = OTHER; note = 2'-O-methyladenosine-3'-phosphate
  modified_base 6: mod_base = OTHER; note = 2'-O-methylguanosine-3'-phosphate
  modified_base 7: mod_base = OTHER; note = 2'-deoxy-2'-fluoroguanosine-3'-phosphate
  modified_base 8: mod_base = OTHER; note = 2'-O-methylcytidine-3'-phosphate
  modified_base 9: mod_base = OTHER; note = 2'-deoxy-2'-fluorouridine-3'-phosphate
  modified_base 10: mod_base = OTHER; note = 2'-deoxy-2'-fluoroguanosine-3'-phosphate
  modified_base 11: mod_base = OTHER; note = 2'-deoxy-2'-fluorouridine-3'-phosphate
  modified_base 12: mod_base = OTHER; note = 2'-O-methylguanosine-3'-phosphate
  modified_base 13: mod_base = OTHER; note = 2'-O-methyluridine-3'-phosphate
  modified_base 14: mod_base = OTHER; note = 2'-O-methyluridine-3'-phosphate
  modified_base 15: mod_base = OTHER; note = 2'-O-methyluridine-3'-phosphate
  modified_base 16: mod_base = OTHER; note = 2'-O-methylguanosine-3'-phosphate
  modified_base 17: mod_base = OTHER; note = 2'-O-methyluridine-3'-phosphate
  modified_base 18: mod_base = OTHER; note = 2'-O-methylguanosine-3'-phosphate
  modified_base 19: mod_base = OTHER; note = 2'-O-methylguanosine-3'-phosphate
  modified_base 20: mod_base = OTHER; note = 2'-O-methylguanosine-3'-phosphate
  modified_base 21: mod_base = OTHER; note = 2'-O-methylguanosine-3'-phosphate ((2S,4R)-1-[29-[[2-(acetylamino)-2-deoxy-beta-D-galactopyra nosyl]oxy]-14,14-bis[[3-[[3-[[5-[[2-(acetylamino)-2-deoxy-b eta-D-galactopyranosyl]oxy]-1-oxopentyl]amino]propyl]amino] -3-oxopropoxy]methyl]-1,12,19,25-tetraoxo-16-oxa-13,20,24-t riazanonacos-1-yl]-4-hydroxy-2-pyrrolidinyl)methyl ester
gccaaggctgtgtttgtgggg

SEQ ID NO: 2531 - RNA, 23 nt, synthetic construct
  source 1..23: mol_type = other RNA
  modified_base 1: mod_base = OTHER; note = 2'-O-methylcytidine-3'-phosphorothioate
  modified_base 2: mod_base = OTHER; note = 2'-deoxy-2'-fluorocytidine-3'-phosphorothioate
  modified_base 3: mod_base = OTHER; note = 2'-O-methylcytidine-3'-phosphate
  modified_base 4: mod_base = OTHER; note = 2'-O-methylcytidine-3'-phosphate
  modified_base 5: mod_base = OTHER; note = 2'-O-methyladenosine-3'-phosphate
  modified_base 6: mod_base = OTHER; note = 2'-deoxy-2'-fluorocytidine-3'-phosphate
  modified_base 7: mod_base = OTHER; note = 2'-O-methyladenosine-3'-phosphate
  modified_base 8: mod_base = OTHER; note = 2'-deoxy-2'-fluoroadenosine-3'-phosphate
  modified_base 9: mod_base = OTHER; note = 2'-deoxy-2'-fluoroadenosine-3'-phosphate
  modified_base 10: mod_base = OTHER; note = 2'-O-methylcytidine-3'-phosphate
  modified_base 11: mod_base = OTHER; note = 2'-O-methyladenosine-3'-phosphate
  modified_base 12: mod_base = OTHER; note = 2'-O-methylcytidine-3'-phosphate
  modified_base 13: mod_base = OTHER; note = 2'-O-methyladenosine-3'-phosphate
  modified_base 14: mod_base = OTHER; note = 2'-deoxy-2'-fluoroguanosine-3'-phosphate
  modified_base 15: mod_base = OTHER; note = 2'-O-methylcytidine-3'-phosphate
  modified_base 16: mod_base = OTHER; note = 2'-deoxy-2'-fluorocytidine-3'-phosphate
  modified_base 17: mod_base = OTHER; note = 2'-O-methyluridine-3'-phosphate
  modified_base 18: mod_base = OTHER; note = 2'-O-methyluridine-3'-phosphate
  modified_base 19: mod_base = OTHER; note = 2'-O-methylguanosine-3'-phosphate
  modified_base 20: mod_base = OTHER; note = 2'-O-methylguanosine-3'-phosphate
  modified_base 21: mod_base = OTHER; note = 2'-O-methylcytidine-3'-phosphorothioate
  modified_base 22: mod_base = OTHER; note = 2'-O-methylguanosine-3'-phosphorothioate
  modified_base 23: mod_base = OTHER; note = 2'-O-methylcytidine
ccccacaaacacagccttggcgc

SEQ ID NO: 2532 - RNA, 21 nt, synthetic construct
  source 1..21: mol_type = other RNA
  modified_base 1: mod_base = OTHER; note = 2'-O-methylcytidine-3'-phosphorothioate
  modified_base 2: mod_base = OTHER; note = 2'-O-methylcytidine-3'-phosphorothioate
  modified_base 3: mod_base = OTHER; note = 2'-O-methyladenosine-3'-phosphate
  modified_base 4: mod_base = OTHER; note = 2'-O-methyladenosine-3'-phosphate
  modified_base 5: mod_base = OTHER; note = 2'-O-methylguanosine-3'-phosphate
  modified_base 6: mod_base = OTHER; note = 2'-O-methylguanosine-3'-phosphate
  modified_base 7: mod_base = OTHER; note = 2'-deoxy-2'-fluorocytidine-3'-phosphate
  modified_base 8: mod_base = OTHER; note = 2'-O-methyluridine-3'-phosphate
  modified_base 9: mod_base = OTHER; note = 2'-deoxy-2'-fluoroguanosine-3'-phosphate
  modified_base 10: mod_base = OTHER; note = 2'-deoxy-2'-fluorouridine-3'-phosphate
  modified_base 11: mod_base = OTHER; note = 2'-deoxy-2'-fluoroguanosine-3'-phosphate
  modified_base 12: mod_base = OTHER; note = 2'-O-methyluridine-3'-phosphate
  modified_base 13: mod_base = OTHER; note = 2'-O-methyluridine-3'-phosphate
  modified_base 14: mod_base = OTHER; note = 2'-O-methyluridine-3'-phosphate
  modified_base 15: mod_base = OTHER; note = 2'-O-methylguanosine-3'-phosphate
  modified_base 16: mod_base = OTHER; note = 2'-O-methyluridine-3'-phosphate
  modified_base 17: mod_base = OTHER; note = 2'-O-methylguanosine-3'-phosphate
  modified_base 18: mod_base = OTHER; note = 2'-O-methylguanosine-3'-phosphate
  modified_base 19: mod_base = OTHER; note = 2'-O-methylguanosine-3'-phosphate
  modified_base 20: mod_base = OTHER; note = 2'-O-methylguanosine-3'-phosphate
  modified_base 21: mod_base = OTHER; note = 2'-O-methyladenosine-3'-phosphate ((2S,4R)-1-[29-[[2-(acetylamino)-2-deoxy-beta-D-galactopyra nosyl]oxy]-14,14-bis[[3-[[3-[[5-[[2-(acetylamino)-2-deoxy-b eta-D-galactopyranosyl]oxy]-1-oxopentyl]amino]propyl]amino] -3-oxopropoxy]methyl]-1,12,19,25-tetraoxo-16-oxa-13,20,24-t riazanonacos-1-yl]-4-hydroxy-2-pyrrolidinyl)methyl ester
ccaaggctgtgtttgtgggga

SEQ ID NO: 2533 - RNA, 23 nt, synthetic construct
  source 1..23: mol_type = other RNA
  modified_base 1: mod_base = OTHER; note = 2'-O-methyluridine-3'-phosphorothioate
  modified_base 2: mod_base = OTHER; note = 2'-deoxy-2'-fluorocytidine-3'-phosphorothioate
  modified_base 3: mod_base = OTHER; note = 2'-O-methylcytidine-3'-phosphate
  modified_base 4: mod_base = OTHER; note = 2'-O-methylcytidine-3'-phosphate
  modified_base 5: mod_base = OTHER; note = 2'-O-methylcytidine-3'-phosphate
  modified_base 6: mod_base = OTHER; note = 2'-deoxy-2'-fluoroadenosine-3'-phosphate
  modified_base 7: mod_base = OTHER; note = 2'-O-methylcytidine-3'-phosphate
  modified_base 8: mod_base = OTHER; note = 2'-deoxy-2'-fluoroadenosine-3'-phosphate
  modified_base 9: mod_base = OTHER; note = 2'-deoxy-2'-fluoroadenosine-3'-phosphate
  modified_base 10: mod_base = OTHER; note = 2'-O-methyladenosine-3'-phosphate
  modified_base 11: mod_base = OTHER; note = 2'-O-methylcytidine-3'-phosphate
  modified_base 12: mod_base = OTHER; note = 2'-O-methyladenosine-3'-phosphate
  modified_base 13: mod_base = OTHER; note = 2'-O-methylcytidine-3'-phosphate
  modified_base 14: mod_base = OTHER; note = 2'-deoxy-2'-fluoroadenosine-3'-phosphate
  modified_base 15: mod_base = OTHER; note = 2'-O-methylguanosine-3'-phosphate
  modified_base 16: mod_base = OTHER; note = 2'-deoxy-2'-fluorocytidine-3'-phosphate
  modified_base 17: mod_base = OTHER; note = 2'-O-methylcytidine-3'-phosphate
  modified_base 18: mod_base = OTHER; note = 2'-O-methyluridine-3'-phosphate
  modified_base 19: mod_base = OTHER; note = 2'-O-methyluridine-3'-phosphate
  modified_base 20: mod_base = OTHER; note = 2'-O-methylguanosine-3'-phosphate
  modified_base 21: mod_base = OTHER; note = 2'-O-methylguanosine-3'-phosphorothioate
  modified_base 22: mod_base = OTHER; note = 2'-O-methylcytidine-3'-phosphorothioate
  modified_base 23: mod_base = OTHER; note = 2'-O-methylguanosine
tccccacaaacacagccttggcg

SEQ ID NO: 2534 - RNA, 21 nt, synthetic construct
  source 1..21: mol_type = other RNA
  modified_base 1: mod_base = OTHER; note = 2'-O-methyluridine-3'-phosphorothioate
  modified_base 2: mod_base = OTHER; note = 2'-O-methylguanosine-3'-phosphorothioate
  modified_base 3: mod_base = OTHER; note = 2'-O-methylguanosine-3'-phosphate
  modified_base 4: mod_base = OTHER; note = 2'-O-methylcytidine-3'-phosphate
  modified_base 5: mod_base = OTHER; note = 2'-O-methylguanosine-3'-phosphate
  modified_base 6: mod_base = OTHER; note = 2'-O-methylcytidine-3'-phosphate
  modified_base 7: mod_base = OTHER; note = 2'-deoxy-2'-fluorocytidine-3'-phosphate
  modified_base 8: mod_base = OTHER; note = 2'-O-methyladenosine-3'-phosphate
  modified_base 9: mod_base = OTHER; note = 2'-deoxy-2'-fluoroadenosine-3'-phosphate
  modified_base 10: mod_base = OTHER; note = 2'-deoxy-2'-fluoroguanosine-3'-phosphate
  modified_base 11: mod_base = OTHER; note = 2'-deoxy-2'-fluoroguanosine-3'-phosphate
  modified_base 12: mod_base = OTHER; note = 2'-O-methylcytidine-3'-phosphate
  modified_base 13: mod_base = OTHER; note = 2'-O-methyluridine-3'-phosphate
  modified_base 14: mod_base = OTHER; note = 2'-O-methylguanosine-3'-phosphate
  modified_base 15: mod_base = OTHER; note = 2'-O-methyluridine-3'-phosphate
  modified_base 16: mod_base = OTHER; note = 2'-O-methylguanosine-3'-phosphate
  modified_base 17: mod_base = OTHER; note = 2'-O-methyluridine-3'-phosphate
  modified_base 18: mod_base = OTHER; note = 2'-O-methyluridine-3'-phosphate
  modified_base 19: mod_base = OTHER; note = 2'-O-methyluridine-3'-phosphate
  modified_base 20: mod_base = OTHER; note = 2'-O-methylguanosine-3'-phosphate
  modified_base 21: mod_base = OTHER; note = 2'-O-methyluridine-3'-phosphate ((2S,4R)-1-[29-[[2-(acetylamino)-2-deoxy-beta-D-galactopyra nosyl]oxy]-14,14-bis[[3-[[3-[[5-[[2-(acetylamino)-2-deoxy-b eta-D-galactopyranosyl]oxy]-1-oxopentyl]amino]propyl]amino] -3-oxopropoxy]methyl]-1,12,19,25-tetraoxo-16-oxa-13,20,24-t riazanonacos-1-yl]-4-hydroxy-2-pyrrolidinyl)methyl ester
tggcgccaaggctgtgtttgt

SEQ ID NO: 2535 - RNA, 23 nt, synthetic construct
  source 1..23: mol_type = other RNA
  modified_base 1: mod_base = OTHER; note = 2'-O-methyladenosine-3'-phosphorothioate
  modified_base 2: mod_base = OTHER; note = 2'-deoxy-2'-fluorocytidine-3'-phosphorothioate
  modified_base 3: mod_base = OTHER; note = 2'-O-methyladenosine-3'-phosphate
  modified_base 4: mod_base = OTHER; note = 2'-O-methyladenosine-3'-phosphate
  modified_base 5: mod_base = OTHER; note = 2'-O-methyladenosine-3'-phosphate
  modified_base 6: mod_base = OTHER; note = 2'-deoxy-2'-fluorocytidine-3'-phosphate
  modified_base 7: mod_base = OTHER; note = 2'-O-methyladenosine-3'-phosphate
  modified_base 8: mod_base = OTHER; note = 2'-deoxy-2'-fluorocytidine-3'-phosphate
  modified_base 9: mod_base = OTHER; note = 2'-deoxy-2'-fluoroadenosine-3'-phosphate
  modified_base 10: mod_base = OTHER; note = 2'-O-methylguanosine-3'-phosphate
  modified_base 11: mod_base = OTHER; note = 2'-O-methylcytidine-3'-phosphate
  modified_base 12: mod_base = OTHER; note = 2'-O-methylcytidine-3'-phosphate
  modified_base 13: mod_base = OTHER; note = 2'-O-methyluridine-3'-phosphate
  modified_base 14: mod_base = OTHER; note = 2'-deoxy-2'-fluorouridine-3'-phosphate
  modified_base 15: mod_base = OTHER; note = 2'-O-methylguanosine-3'-phosphate
  modified_base 16: mod_base = OTHER; note = 2'-deoxy-2'-fluoroguanosine-3'-phosphate
  modified_base 17: mod_base = OTHER; note = 2'-O-methylcytidine-3'-phosphate
  modified_base 18: mod_base = OTHER; note = 2'-O-methylguanosine-3'-phosphate
  modified_base 19: mod_base = OTHER; note = 2'-O-methylcytidine-3'-phosphate
  modified_base 20: mod_base = OTHER; note = 2'-O-methylcytidine-3'-phosphate
  modified_base 21: mod_base = OTHER; note = 2'-O-methyladenosine-3'-phosphorothioate
  modified_base 22: mod_base = OTHER; note = 2'-O-methyladenosine-3'-phosphorothioate
  modified_base 23: mod_base = OTHER; note = 2'-O-methylguanosine
acaaacacagccttggcgccaag

SEQ ID NO: 2536 - RNA, 21 nt, synthetic construct
  source 1..21: mol_type = other RNA
  modified_base 1: mod_base = OTHER; note = 2'-O-methyluridine-3'-phosphorothioate
  modified_base 2: mod_base = OTHER; note = 2'-O-methyluridine-3'-phosphorothioate
  modified_base 3: mod_base = OTHER; note = 2'-O-methylguanosine-3'-phosphate
  modified_base 4: mod_base = OTHER; note = 2'-O-methylguanosine-3'-phosphate
  modified_base 5: mod_base = OTHER; note = 2'-O-methylcytidine-3'-phosphate
  modified_base 6: mod_base = OTHER; note = 2'-O-methylguanosine-3'-phosphate
  modified_base 7: mod_base = OTHER; note = 2'-deoxy-2'-fluorocytidine-3'-phosphate
  modified_base 8: mod_base = OTHER; note = 2'-O-methylcytidine-3'-phosphate
  modified_base 9: mod_base = OTHER; note = 2'-deoxy-2'-fluoroadenosine-3'-phosphate
  modified_base 10: mod_base = OTHER; note = 2'-deoxy-2'-fluoroadenosine-3'-phosphate
  modified_base 11: mod_base = OTHER; note = 2'-deoxy-2'-fluoroguanosine-3'-phosphate
  modified_base 12: mod_base = OTHER; note = 2'-O-methylguanosine-3'-phosphate
  modified_base 13: mod_base = OTHER; note = 2'-O-methylcytidine-3'-phosphate
  modified_base 14: mod_base = OTHER; note = 2'-O-methyluridine-3'-phosphate
  modified_base 15: mod_base = OTHER; note = 2'-O-methylguanosine-3'-phosphate
  modified_base 16: mod_base = OTHER; note = 2'-O-methyluridine-3'-phosphate
  modified_base 17: mod_base = OTHER; note = 2'-O-methylguanosine-3'-phosphate
  modified_base 18: mod_base = OTHER; note = 2'-O-methyluridine-3'-phosphate
  modified_base 19: mod_base = OTHER; note = 2'-O-methyluridine-3'-phosphate
  modified_base 20: mod_base = OTHER; note = 2'-O-methyluridine-3'-phosphate
  modified_base 21: mod_base = OTHER; note = 2'-O-methylguanosine-3'-phosphate ((2S,4R)-1-[29-[[2-(acetylamino)-2-deoxy-beta-D-galactopyra nosyl]oxy]-14,14-bis[[3-[[3-[[5-[[2-(acetylamino)-2-deoxy-b eta-D-galactopyranosyl]oxy]-1-oxopentyl]amino]propyl]amino] -3-oxopropoxy]methyl]-1,12,19,25-tetraoxo-16-oxa-13,20,24-t riazanonacos-1-yl]-4-hydroxy-2-pyrrolidinyl)methyl ester
ttggcgccaaggctgtgtttg

SEQ ID NO: 2537 - RNA, 23 nt, synthetic construct
  source 1..23: mol_type = other RNA
  modified_base 1: mod_base = OTHER; note = 2'-O-methylcytidine-3'-phosphorothioate
  modified_base 2: mod_base = OTHER; note = 2'-deoxy-2'-fluoroadenosine-3'-phosphorothioate
  modified_base 3: mod_base = OTHER; note = 2'-O-methyladenosine-3'-phosphate
  modified_base 4: mod_base = OTHER; note = 2'-O-methyladenosine-3'-phosphate
  modified_base 5: mod_base = OTHER; note = 2'-O-methylcytidine-3'-phosphate
  modified_base 6: mod_base = OTHER; note = 2'-deoxy-2'-fluoroadenosine-3'-phosphate
  modified_base 7: mod_base = OTHER; note = 2'-O-methylcytidine-3'-phosphate
  modified_base 8: mod_base = OTHER; note = 2'-deoxy-2'-fluoroadenosine-3'-phosphate
  modified_base 9: mod_base = OTHER; note = 2'-deoxy-2'-fluoroguanosine-3'-phosphate
  modified_base 10: mod_base = OTHER; note = 2'-O-methylcytidine-3'-phosphate
  modified_base 11: mod_base = OTHER; note = 2'-O-methylcytidine-3'-phosphate
  modified_base 12: mod_base = OTHER; note = 2'-O-methyluridine-3'-phosphate
  modified_base 13: mod_base = OTHER; note = 2'-O-methyluridine-3'-phosphate
  modified_base 14: mod_base = OTHER; note = 2'-deoxy-2'-fluoroguanosine-3'-phosphate
  modified_base 15: mod_base = OTHER; note = 2'-O-methylguanosine-3'-phosphate
  modified_base 16: mod_base = OTHER; note = 2'-deoxy-2'-fluorocytidine-3'-phosphate
  modified_base 17: mod_base = OTHER; note = 2'-O-methylguanosine-3'-phosphate
  modified_base 18: mod_base = OTHER; note = 2'-O-methylcytidine-3'-phosphate
  modified_base 19: mod_base = OTHER; note = 2'-O-methylcytidine-3'-phosphate
  modified_base 20: mod_base = OTHER; note = 2'-O-methyladenosine-3'-phosphate
  modified_base 21: mod_base = OTHER; note = 2'-O-methyladenosine-3'-phosphorothioate
  modified_base 22: mod_base = OTHER; note = 2'-O-methylguanosine-3'-phosphorothioate
  modified_base 23: mod_base = OTHER; note = 2'-O-methyladenosine
caaacacagccttggcgccaaga

SEQ ID NO: 2538 - RNA, 21 nt, synthetic construct
  source 1..21: mol_type = other RNA
  modified_base 1: mod_base = OTHER; note = 2'-O-methyluridine-3'-phosphorothioate
  modified_base 2: mod_base = OTHER; note = 2'-O-methylguanosine-3'-phosphorothioate
  modified_base 3: mod_base = OTHER; note = 2'-O-methyladenosine-3'-phosphate
  modified_base 4: mod_base = OTHER; note = 2'-O-methyladenosine-3'-phosphate
  modified_base 5: mod_base = OTHER; note = 2'-O-methyladenosine-3'-phosphate
  modified_base 6: mod_base = OTHER; note = 2'-O-methylguanosine-3'-phosphate
  modified_base 7: mod_base = OTHER; note = 2'-deoxy-2'-fluorocytidine-3'-phosphate
  modified_base 8: mod_base = OTHER; note = 2'-O-methyluridine-3'-phosphate
  modified_base 9: mod_base = OTHER; note = 2'-deoxy-2'-fluorocytidine-3'-phosphate
  modified_base 10: mod_base = OTHER; note = 2'-deoxy-2'-fluorouridine-3'-phosphate
  modified_base 11: mod_base = OTHER; note = 2'-deoxy-2'-fluoroguanosine-3'-phosphate
  modified_base 12: mod_base = OTHER; note = 2'-O-methylguanosine-3'-phosphate
  modified_base 13: mod_base = OTHER; note = 2'-O-methylcytidine-3'-phosphate
  modified_base 14: mod_base = OTHER; note = 2'-O-methyluridine-3'-phosphate
  modified_base 15: mod_base = OTHER; note = 2'-O-methylcytidine-3'-phosphate
  modified_base 16: mod_base = OTHER; note = 2'-O-methyluridine-3'-phosphate
  modified_base 17: mod_base = OTHER; note = 2'-O-methyluridine-3'-phosphate
  modified_base 18: mod_base = OTHER; note = 2'-O-methylguanosine-3'-phosphate
  modified_base 19: mod_base = OTHER; note = 2'-O-methylguanosine-3'-phosphate
  modified_base 20: mod_base = OTHER; note = 2'-O-methylcytidine-3'-phosphate
  modified_base 21: mod_base = OTHER; note = 2'-O-methylguanosine-3'-phosphate ((2S,4R)-1-[29-[[2-(acetylamino)-2-deoxy-beta-D-galactopyra nosyl]oxy]-14,14-bis[[3-[[3-[[5-[[2-(acetylamino)-2-deoxy-b eta-D-galactopyranosyl]oxy]-1-oxopentyl]amino]propyl]amino] -3-oxopropoxy]methyl]-1,12,19,25-tetraoxo-16-oxa-13,20,24-t riazanonacos-1-yl]-4-hydroxy-2-pyrrolidinyl)methyl ester
tgaaagctctggctcttggcg

SEQ ID NO: 2539 - RNA, 23 nt, synthetic construct
  source 1..23: mol_type = other RNA
  modified_base 1: mod_base = OTHER; note = 2'-O-methylcytidine-3'-phosphorothioate
  modified_base 2: mod_base = OTHER; note = 2'-deoxy-2'-fluoroguanosine-3'-phosphorothioate
  modified_base 3: mod_base = OTHER; note = 2'-O-methylcytidine-3'-phosphate
  modified_base 4: mod_base = OTHER; note = 2'-O-methylcytidine-3'-phosphate
  modified_base 5: mod_base = OTHER; note = 2'-O-methyladenosine-3'-phosphate
  modified_base 6: mod_base = OTHER; note = 2'-deoxy-2'-fluoroadenosine-3'-phosphate
  modified_base 7: mod_base = OTHER; note = 2'-O-methylguanosine-3'-phosphate
  modified_base 8: mod_base = OTHER; note = 2'-deoxy-2'-fluoroadenosine-3'-phosphate
  modified_base 9: mod_base = OTHER; note = 2'-deoxy-2'-fluoroguanosine-3'-phosphate
  modified_base 10: mod_base = OTHER; note = 2'-O-methylcytidine-3'-phosphate
  modified_base 11: mod_base = OTHER; note = 2'-O-methylcytidine-3'-phosphate
  modified_base 12: mod_base = OTHER; note = 2'-O-methyladenosine-3'-phosphate
  modified_base 13: mod_base = OTHER; note = 2'-O-methylguanosine-3'-phosphate
  modified_base 14: mod_base = OTHER; note = 2'-deoxy-2'-fluoroadenosine-3'-phosphate
  modified_base 15: mod_base = OTHER; note = 2'-O-methylguanosine-3'-phosphate
  modified_base 16: mod_base = OTHER; note = 2'-deoxy-2'-fluorocytidine-3'-phosphate
  modified_base 17: mod_base = OTHER; note = 2'-O-methyluridine-3'-phosphate
  modified_base 18: mod_base = OTHER; note = 2'-O-methyluridine-3'-phosphate
  modified_base 19: mod_base = OTHER; note = 2'-O-methyluridine-3'-phosphate
  modified_base 20: mod_base = OTHER; note = 2'-O-methylcytidine-3'-phosphate
  modified_base 21: mod_base = OTHER; note = 2'-O-methyladenosine-3'-phosphorothioate
  modified_base 22: mod_base = OTHER; note = 2'-O-methylguanosine-3'-phosphorothioate
  modified_base 23: mod_base = OTHER; note = 2'-O-methyladenosine
cgccaagagccagagctttcaga

SEQ ID NO: 2540 - RNA, 21 nt, synthetic construct
  source 1..21: mol_type = other RNA
  modified_base 1: mod_base = OTHER; note = 2'-O-methylguanosine-3'-phosphorothioate
  modified_base 2: mod_base = OTHER; note = 2'-O-methyladenosine-3'-phosphorothioate
  modified_base 3: mod_base = OTHER; note = 2'-O-methyladenosine-3'-phosphate
  modified_base 4: mod_base = OTHER; note = 2'-O-methyladenosine-3'-phosphate
  modified_base 5: mod_base = OTHER; note = 2'-O-methylguanosine-3'-phosphate
  modified_base 6: mod_base = OTHER; note = 2'-O-methylcytidine-3'-phosphate
  modified_base 7: mod_base = OTHER; note = 2'-deoxy-2'-fluorouridine-3'-phosphate
  modified_base 8: mod_base = OTHER; note = 2'-O-methylcytidine-3'-phosphate
  modified_base 9: mod_base = OTHER; note = 2'-deoxy-2'-fluorouridine-3'-phosphate
  modified_base 10: mod_base = OTHER; note = 2'-deoxy-2'-fluoroguanosine-3'-phosphate
  modified_base 11: mod_base = OTHER; note = 2'-deoxy-2'-fluoroguanosine-3'-phosphate
  modified_base 12: mod_base = OTHER; note = 2'-O-methylcytidine-3'-phosphate
  modified_base 13: mod_base = OTHER; note = 2'-O-methyluridine-3'-phosphate
  modified_base 14: mod_base = OTHER; note = 2'-O-methylcytidine-3'-phosphate
  modified_base 15: mod_base = OTHER; note = 2'-O-methyluridine-3'-phosphate
  modified_base 16: mod_base = OTHER; note = 2'-O-methyluridine-3'-phosphate
  modified_base 17: mod_base = OTHER; note = 2'-O-methylguanosine-3'-phosphate
  modified_base 18: mod_base = OTHER; note = 2'-O-methylguanosine-3'-phosphate
  modified_base 19: mod_base = OTHER; note = 2'-O-methylcytidine-3'-phosphate
  modified_base 20: mod_base = OTHER; note = 2'-O-methylguanosine-3'-phosphate
  modified_base 21: mod_base = OTHER; note = 2'-O-methylcytidine-3'-phosphate ((2S,4R)-1-[29-[[2-(acetylamino)-2-deoxy-beta-D-galactopyra nosyl]oxy]-14,14-bis[[3-[[3-[[5-[[2-(acetylamino)-2-deoxy-b eta-D-galactopyranosyl]oxy]-1-oxopentyl]amino]propyl]amino] -3-oxopropoxy]methyl]-1,12,19,25-tetraoxo-16-oxa-13,20,24-t riazanonacos-1-yl]-4-hydroxy-2-pyrrolidinyl)methyl ester
gaaagctctggctcttggcgc

SEQ ID NO: 2541 - RNA, 23 nt, synthetic construct
  source 1..23: mol_type = other RNA
  modified_base 1: mod_base = OTHER; note = 2'-O-methylguanosine-3'-phosphorothioate
  modified_base 2: mod_base = OTHER; note = 2'-deoxy-2'-fluorocytidine-3'-phosphorothioate
  modified_base 3: mod_base = OTHER; note = 2'-O-methylguanosine-3'-phosphate
  modified_base 4: mod_base = OTHER; note = 2'-O-methylcytidine-3'-phosphate
  modified_base 5: mod_base = OTHER; note = 2'-O-methylcytidine-3'-phosphate
  modified_base 6: mod_base = OTHER; note = 2'-deoxy-2'-fluoroadenosine-3'-phosphate
  modified_base 7: mod_base = OTHER; note = 2'-O-methyladenosine-3'-phosphate
  modified_base 8: mod_base = OTHER; note = 2'-deoxy-2'-fluoroguanosine-3'-phosphate
  modified_base 9: mod_base = OTHER; note = 2'-deoxy-2'-fluoroadenosine-3'-phosphate
  modified_base 10: mod_base = OTHER; note = 2'-O-methylguanosine-3'-phosphate
  modified_base 11: mod_base = OTHER; note = 2'-O-methylcytidine-3'-phosphate
  modified_base 12: mod_base = OTHER; note = 2'-O-methylcytidine-3'-phosphate
  modified_base 13: mod_base = OTHER; note = 2'-O-methyladenosine-3'-phosphate
  modified_base 14: mod_base = OTHER; note = 2'-deoxy-2'-fluoroguanosine-3'-phosphate
  modified_base 15: mod_base = OTHER; note = 2'-O-methyladenosine-3'-phosphate
  modified_base 16: mod_base = OTHER; note = 2'-deoxy-2'-fluoroguanosine-3'-phosphate
  modified_base 17: mod_base = OTHER; note = 2'-O-methylcytidine-3'-phosphate
  modified_base 18: mod_base = OTHER; note = 2'-O-methyluridine-3'-phosphate
  modified_base 19: mod_base = OTHER; note = 2'-O-methyluridine-3'-phosphate
  modified_base 20: mod_base = OTHER; note = 2'-O-methyluridine-3'-phosphate
  modified_base 21: mod_base = OTHER; note = 2'-O-methylcytidine-3'-phosphorothioate
  modified_base 22: mod_base = OTHER; note = 2'-O-methyladenosine-3'-phosphorothioate
  modified_base 23: mod_base = OTHER; note = 2'-O-methylguanosine
gcgccaagagccagagctttcag

SEQ ID NO: 2542 - RNA, 21 nt, synthetic construct
  source 1..21: mol_type = other RNA
  modified_base 1: mod_base = OTHER; note = 2'-O-methylguanosine-3'-phosphorothioate
  modified_base 2: mod_base = OTHER; note = 2'-O-methyluridine-3'-phosphorothioate
  modified_base 3: mod_base = OTHER; note = 2'-O-methyluridine-3'-phosphate
  modified_base 4: mod_base = OTHER; note = 2'-O-methylcytidine-3'-phosphate
  modified_base 5: mod_base = OTHER; note = 2'-O-methyluridine-3'-phosphate
  modified_base 6: mod_base = OTHER; note = 2'-O-methylguanosine-3'-phosphate
  modified_base 7: mod_base = OTHER; note = 2'-deoxy-2'-fluoroadenosine-3'-phosphate
  modified_base 8: mod_base = OTHER; note = 2'-O-methyladenosine-3'-phosphate
  modified_base 9: mod_base = OTHER; note = 2'-deoxy-2'-fluoroadenosine-3'-phosphate
  modified_base 10: mod_base = OTHER; note = 2'-deoxy-2'-fluoroguanosine-3'-phosphate
  modified_base 11: mod_base = OTHER; note = 2'-deoxy-2'-fluorocytidine-3'-phosphate
  modified_base 12: mod_base = OTHER; note = 2'-O-methyluridine-3'-phosphate
  modified_base 13: mod_base = OTHER; note = 2'-O-methylcytidine-3'-phosphate
  modified_base 14: mod_base = OTHER; note = 2'-O-methyluridine-3'-phosphate
  modified_base 15: mod_base = OTHER; note = 2'-O-methylguanosine-3'-phosphate
  modified_base 16: mod_base = OTHER; note = 2'-O-methylguanosine-3'-phosphate
  modified_base 17: mod_base = OTHER; note = 2'-O-methylcytidine-3'-phosphate
  modified_base 18: mod_base = OTHER; note = 2'-O-methyluridine-3'-phosphate
  modified_base 19: mod_base = OTHER; note = 2'-O-methylcytidine-3'-phosphate
  modified_base 20: mod_base = OTHER; note = 2'-O-methyluridine-3'-phosphate
  modified_base 21: mod_base = OTHER; note = 2'-O-methyluridine-3'-phosphate ((2S,4R)-1-[29-[[2-(acetylamino)-2-deoxy-beta-D-galactopyra nosyl]oxy]-14,14-bis[[3-[[3-[[5-[[2-(acetylamino)-2-deoxy-b eta-D-galactopyranosyl]oxy]-1-oxopentyl]amino]propyl]amino] -3-oxopropoxy]methyl]-1,12,19,25-tetraoxo-16-oxa-13,20,24-t riazanonacos-1-yl]-4-hydroxy-2-pyrrolidinyl)methyl ester
gttctgaaagctctggctctt

SEQ ID NO: 2543 - RNA, 23 nt, synthetic construct
  source 1..23: mol_type = other RNA
  modified_base 1: mod_base = OTHER; note = 2'-O-methyladenosine-3'-phosphorothioate
  modified_base 2: mod_base = OTHER; note = 2'-deoxy-2'-fluoroadenosine-3'-phosphorothioate
  modified_base 3: mod_base = OTHER; note = 2'-O-methylguanosine-3'-phosphate
  modified_base 4: mod_base = OTHER; note = 2'-O-methyladenosine-3'-phosphate
  modified_base 5: mod_base = OTHER; note = 2'-O-methylguanosine-3'-phosphate
  modified_base 6: mod_base = OTHER; note = 2'-deoxy-2'-fluorocytidine-3'-phosphate
  modified_base 7: mod_base = OTHER; note = 2'-O-methylcytidine-3'-phosphate
  modified_base 8: mod_base = OTHER; note = 2'-deoxy-2'-fluoroadenosine-3'-phosphate
  modified_base 9: mod_base = OTHER; note = 2'-deoxy-2'-fluoroguanosine-3'-phosphate
  modified_base 10: mod_base = OTHER; note = 2'-O-methyladenosine-3'-phosphate
  modified_base 11: mod_base = OTHER; note = 2'-O-methylguanosine-3'-phosphate
  modified_base 12: mod_base = OTHER; note = 2'-O-methylcytidine-3'-phosphate
  modified_base 13: mod_base = OTHER; note = 2'-O-methyluridine-3'-phosphate
  modified_base 14: mod_base = OTHER; note = 2'-deoxy-2'-fluorouridine-3'-phosphate
  modified_base 15: mod_base = OTHER; note = 2'-O-methyluridine-3'-phosphate
  modified_base 16: mod_base = OTHER; note = 2'-deoxy-2'-fluorocytidine-3'-phosphate
  modified_base 17: mod_base = OTHER; note = 2'-O-methyladenosine-3'-phosphate
  modified_base 18: mod_base = OTHER; note = 2'-O-methylguanosine-3'-phosphate
  modified_base 19: mod_base = OTHER; note = 2'-O-methyladenosine-3'-phosphate
  modified_base 20: mod_base = OTHER; note = 2'-O-methyladenosine-3'-phosphate
  modified_base 21: mod_base = OTHER; note = 2'-O-methylcytidine-3'-phosphorothioate
  modified_base 22: mod_base = OTHER; note = 2'-O-methyladenosine-3'-phosphorothioate
  modified_base 23: mod_base = OTHER; note = 2'-O-methyluridine
aagagccagagctttcagaacat

SEQ ID NO: 2544 - RNA, 21 nt, synthetic construct
  source 1..21: mol_type = other RNA
  modified_base 1: mod_base = OTHER; note = 2'-O-methyluridine-3'-phosphorothioate
  modified_base 2: mod_base = OTHER; note = 2'-O-methylguanosine-3'-phosphorothioate
  modified_base 3: mod_base = OTHER; note = 2'-O-methyluridine-3'-phosphate
  modified_base 4: mod_base = OTHER; note = 2'-O-methyluridine-3'-phosphate
  modified_base 5: mod_base = OTHER; note = 2'-O-methylcytidine-3'-phosphate
  modified_base 6: mod_base = OTHER; note = 2'-O-methyluridine-3'-phosphate
  modified_base 7: mod_base = OTHER; note = 2'-deoxy-2'-fluoroguanosine-3'-phosphate
  modified_base 8: mod_base = OTHER; note = 2'-O-methyladenosine-3'-phosphate
  modified_base 9: mod_base = OTHER; note = 2'-deoxy-2'-fluoroadenosine-3'-phosphate
  modified_base 10: mod_base = OTHER; note = 2'-deoxy-2'-fluoroadenosine-3'-phosphate
  modified_base 11: mod_base = OTHER; note = 2'-deoxy-2'-fluoroguanosine-3'-phosphate
  modified_base 12: mod_base = OTHER; note = 2'-O-methylcytidine-3'-phosphate
  modified_base 13: mod_base = OTHER; note = 2'-O-methyluridine-3'-phosphate
  modified_base 14: mod_base = OTHER; note = 2'-O-methylcytidine-3'-phosphate
  modified_base 15: mod_base = OTHER; note = 2'-O-methyluridine-3'-phosphate
  modified_base 16: mod_base = OTHER; note = 2'-O-methylguanosine-3'-phosphate
  modified_base 17: mod_base = OTHER; note = 2'-O-methylguanosine-3'-phosphate
  modified_base 18: mod_base = OTHER; note = 2'-O-methylcytidine-3'-phosphate
  modified_base 19: mod_base = OTHER; note = 2'-O-methyluridine-3'-phosphate
  modified_base 20: mod_base = OTHER; note = 2'-O-methylcytidine-3'-phosphate
  modified_base 21: mod_base = OTHER; note = 2'-O-methyluridine-3'-phosphate ((2S,4R)-1-[29-[[2-(acetylamino)-2-deoxy-beta-D-galactopyra nosyl]oxy]-14,14-bis[[3-[[3-[[5-[[2-(acetylamino)-2-deoxy-b eta-D-galactopyranosyl]oxy]-1-oxopentyl]amino]propyl]amino] -3-oxopropoxy]methyl]-1,12,19,25-tetraoxo-16-oxa-13,20,24-t riazanonacos-1-yl]-4-hydroxy-2-pyrrolidinyl)methyl ester
tgttctgaaagctctggctct

SEQ ID NO: 2545 - RNA, 23 nt, synthetic construct
  source 1..23: mol_type = other RNA
  modified_base 1: mod_base = OTHER; note = 2'-O-methyladenosine-3'-phosphorothioate
  modified_base 2: mod_base = OTHER; note = 2'-deoxy-2'-fluoroguanosine-3'-phosphorothioate
  modified_base 3: mod_base = OTHER; note = 2'-O-methyladenosine-3'-phosphate
  modified_base 4: mod_base = OTHER; note = 2'-O-methylguanosine-3'-phosphate
  modified_base 5: mod_base = OTHER; note = 2'-O-methylcytidine-3'-phosphate
  modified_base 6: mod_base = OTHER; note = 2'-deoxy-2'-fluorocytidine-3'-phosphate
  modified_base 7: mod_base = OTHER; note = 2'-O-methyladenosine-3'-phosphate
  modified_base 8: mod_base = OTHER; note = 2'-deoxy-2'-fluoroguanosine-3'-phosphate
  modified_base 9: mod_base = OTHER; note = 2'-deoxy-2'-fluoroadenosine-3'-phosphate
  modified_base 10: mod_base = OTHER; note = 2'-O-methylguanosine-3'-phosphate
  modified_base 11: mod_base = OTHER; note = 2'-O-methylcytidine-3'-phosphate
  modified_base 12: mod_base = OTHER; note = 2'-O-methyluridine-3'-phosphate
  modified_base 13: mod_base = OTHER; note = 2'-O-methyluridine-3'-phosphate
  modified_base 14: mod_base = OTHER; note = 2'-deoxy-2'-fluorouridine-3'-phosphate
  modified_base 15: mod_base = OTHER; note = 2'-O-methylcytidine-3'-phosphate
  modified_base 16: mod_base = OTHER; note = 2'-deoxy-2'-fluoroadenosine-3'-phosphate
  modified_base 17: mod_base = OTHER; note = 2'-O-methylguanosine-3'-phosphate
  modified_base 18: mod_base = OTHER; note = 2'-O-methyladenosine-3'-phosphate
  modified_base 19: mod_base = OTHER; note = 2'-O-methyladenosine-3'-phosphate
  modified_base 20: mod_base = OTHER; note = 2'-O-methylcytidine-3'-phosphate
  modified_base 21: mod_base = OTHER; note = 2'-O-methyladenosine-3'-phosphorothioate
  modified_base 22: mod_base = OTHER; note = 2'-O-methyluridine-3'-phosphorothioate
  modified_base 23: mod_base = OTHER; note = 2'-O-methylcytidine
agagccagagctttcagaacatc

SEQ ID NO: 2546 - RNA, 21 nt, synthetic construct
  source 1..21: mol_type = other RNA
  modified_base 1: mod_base = OTHER; note = 2'-O-methylcytidine-3'-phosphorothioate
  modified_base 2: mod_base = OTHER; note = 2'-O-methyladenosine-3'-phosphorothioate
  modified_base 3: mod_base = OTHER; note = 2'-O-methylguanosine-3'-phosphate
  modified_base 4: mod_base = OTHER; note = 2'-O-methylcytidine-3'-phosphate
  modified_base 5: mod_base = OTHER; note = 2'-O-methylcytidine-3'-phosphate
  modified_base 6: mod_base = OTHER; note = 2'-O-methyladenosine-3'-phosphate
  modified_base 7: mod_base = OTHER; note = 2'-deoxy-2'-fluorocytidine-3'-phosphate
  modified_base 8: mod_base = OTHER; note = 2'-O-methyluridine-3'-phosphate
  modified_base 9: mod_base = OTHER; note = 2'-deoxy-2'-fluoroadenosine-3'-phosphate
  modified_base 10: mod_base = OTHER; note = 2'-deoxy-2'-fluorouridine-3'-phosphate
  modified_base 11: mod_base = OTHER; note = 2'-deoxy-2'-fluorouridine-3'-phosphate
  modified_base 12: mod_base = OTHER; note = 2'-O-methylguanosine-3'-phosphate
  modified_base 13: mod_base = OTHER; note = 2'-O-methyladenosine-3'-phosphate
  modified_base 14: mod_base = OTHER; note = 2'-O-methyluridine-3'-phosphate
  modified_base 15: mod_base = OTHER; note = 2'-O-methylguanosine-3'-phosphate
  modified_base 16: mod_base = OTHER; note = 2'-O-methyluridine-3'-phosphate
  modified_base 17: mod_base = OTHER; note = 2'-O-methyluridine-3'-phosphate
  modified_base 18: mod_base = OTHER; note = 2'-O-methylcytidine-3'-phosphate
  modified_base 19: mod_base = OTHER; note = 2'-O-methyluridine-3'-phosphate
  modified_base 20: mod_base = OTHER; note = 2'-O-methylguanosine-3'-phosphate
  modified_base 21: mod_base = OTHER; note = 2'-O-methylcytidine-3'-phosphate ((2S,4R)-1-[29-[[2-(acetylamino)-2-deoxy-beta-D-galactopyra nosyl]oxy]-14,14-bis[[3-[[3-[[5-[[2-(acetylamino)-2-deoxy-b eta-D-galactopyranosyl]oxy]-1-oxopentyl]amino]propyl]amino] -3-oxopropoxy]methyl]-1,12,19,25-tetraoxo-16-oxa-13,20,24-t riazanonacos-1-yl]-4-hydroxy-2-pyrrolidinyl)methyl ester
cagccactattgatgttctgc

SEQ ID NO: 2547 - RNA, 23 nt, synthetic construct
  source 1..23: mol_type = other RNA
  modified_base 1: mod_base = OTHER; note = 2'-O-methylguanosine-3'-phosphorothioate
  modified_base 2: mod_base = OTHER; note = 2'-deoxy-2'-fluorocytidine-3'-phosphorothioate
  modified_base 3: mod_base = OTHER; note = 2'-O-methyladenosine-3'-phosphate
  modified_base 4: mod_base = OTHER; note = 2'-O-methylguanosine-3'-phosphate
  modified_base 5: mod_base = OTHER; note = 2'-O-methyladenosine-3'-phosphate
  modified_base 6: mod_base = OTHER; note = 2'-deoxy-2'-fluoroadenosine-3'-phosphate
  modified_base 7: mod_base = OTHER; note = 2'-O-methylcytidine-3'-phosphate
  modified_base 8: mod_base = OTHER; note = 2'-deoxy-2'-fluoroadenosine-3'-phosphate
  modified_base 9: mod_base = OTHER; note = 2'-deoxy-2'-fluorouridine-3'-phosphate
  modified_base 10: mod_base = OTHER; note = 2'-O-methylcytidine-3'-phosphate
  modified_base 11: mod_base = OTHER; note = 2'-O-methyladenosine-3'-phosphate
  modified_base 12: mod_base = OTHER; note = 2'-O-methyladenosine-3'-phosphate
  modified_base 13: mod_base = OTHER; note = 2'-O-methyluridine-3'-phosphate
  modified_base 14: mod_base = OTHER; note = 2'-deoxy-2'-fluoroadenosine-3'-phosphate
  modified_base 15: mod_base = OTHER; note = 2'-O-methylguanosine-3'-phosphate
  modified_base 16: mod_base = OTHER; note = 2'-deoxy-2'-fluorouridine-3'-phosphate
  modified_base 17: mod_base = OTHER; note = 2'-O-methylguanosine-3'-phosphate
  modified_base 18: mod_base = OTHER; note = 2'-O-methylguanosine-3'-phosphate
  modified_base 19: mod_base = OTHER; note = 2'-O-methylcytidine-3'-phosphate
  modified_base 20: mod_base = OTHER; note = 2'-O-methyluridine-3'-phosphate
  modified_base 21: mod_base = OTHER; note = 2'-O-methylguanosine-3'-phosphorothioate
  modified_base 22: mod_base = OTHER; note = 2'-O-methylguanosine-3'-phosphorothioate
  modified_base 23: mod_base = OTHER; note = 2'-O-methylcytidine
gcagaacatcaatagtggctggc

SEQ ID NO: 2548 - RNA, 21 nt, synthetic construct
  source 1..21: mol_type = other RNA
  modified_base 1: mod_base = OTHER; note = 2'-O-methyladenosine-3'-phosphorothioate
  modified_base 2: mod_base = OTHER; note = 2'-O-methylguanosine-3'-phosphorothioate
  modified_base 3: mod_base = OTHER; note = 2'-O-methylcytidine-3'-phosphate
  modified_base 4: mod_base = OTHER; note = 2'-O-methylcytidine-3'-phosphate
  modified_base 5: mod_base = OTHER; note = 2'-O-methyladenosine-3'-phosphate
  modified_base 6: mod_base = OTHER; note = 2'-O-methylcytidine-3'-phosphate
  modified_base 7: mod_base = OTHER; note = 2'-deoxy-2'-fluorouridine-3'-phosphate
  modified_base 8: mod_base = OTHER; note = 2'-O-methyladenosine-3'-phosphate
  modified_base 9: mod_base = OTHER; note = 2'-deoxy-2'-fluorouridine-3'-phosphate
  modified_base 10: mod_base = OTHER; note = 2'-deoxy-2'-fluorouridine-3'-phosphate
  modified_base 11: mod_base = OTHER; note = 2'-deoxy-2'-fluoroguanosine-3'-phosphate
  modified_base 12: mod_base = OTHER; note = 2'-O-methyladenosine-3'-phosphate
  modified_base 13: mod_base = OTHER; note = 2'-O-methyluridine-3'-phosphate
  modified_base 14: mod_base = OTHER; note = 2'-O-methylguanosine-3'-phosphate
  modified_base 15: mod_base = OTHER; note = 2'-O-methyluridine-3'-phosphate
  modified_base 16: mod_base = OTHER; note = 2'-O-methyluridine-3'-phosphate
  modified_base 17: mod_base = OTHER; note = 2'-O-methylcytidine-3'-phosphate
  modified_base 18: mod_base = OTHER; note = 2'-O-methyluridine-3'-phosphate
  modified_base 19: mod_base = OTHER; note = 2'-O-methylguanosine-3'-phosphate
  modified_base 20: mod_base = OTHER; note = 2'-O-methylcytidine-3'-phosphate
  modified_base 21: mod_base = OTHER; note = 2'-O-methylcytidine-3'-phosphate ((2S,4R)-1-[29-[[2-(acetylamino)-2-deoxy-beta-D-galactopyra nosyl]oxy]-14,14-bis[[3-[[3-[[5-[[2-(acetylamino)-2-deoxy-b eta-D-galactopyranosyl]oxy]-1-oxopentyl]amino]propyl]amino] -3-oxopropoxy]methyl]-1,12,19,25-tetraoxo-16-oxa-13,20,24-t riazanonacos-1-yl]-4-hydroxy-2-pyrrolidinyl)methyl ester
agccactattgatgttctgcc

SEQ ID NO: 2549 - RNA, 23 nt, synthetic construct
  source 1..23: mol_type = other RNA
  modified_base 1: mod_base = OTHER; note = 2'-O-methylguanosine-3'-phosphorothioate
  modified_base 2: mod_base = OTHER; note = 2'-deoxy-2'-fluoroguanosine-3'-phosphorothioate
  modified_base 3: mod_base = OTHER; note = 2'-O-methylcytidine-3'-phosphate
  modified_base 4: mod_base = OTHER; note = 2'-O-methyladenosine-3'-phosphate
  modified_base 5: mod_base = OTHER; note = 2'-O-methylguanosine-3'-phosphate
  modified_base 6: mod_base = OTHER; note = 2'-deoxy-2'-fluoroadenosine-3'-phosphate
  modified_base 7: mod_base = OTHER; note = 2'-O-methyladenosine-3'-phosphate
  modified_base 8: mod_base = OTHER; note = 2'-deoxy-2'-fluorocytidine-3'-phosphate
  modified_base 9: mod_base = OTHER; note = 2'-deoxy-2'-fluoroadenosine-3'-phosphate
  modified_base 10: mod_base = OTHER; note = 2'-O-methyluridine-3'-phosphate
  modified_base 11: mod_base = OTHER; note = 2'-O-methylcytidine-3'-phosphate
  modified_base 12: mod_base = OTHER; note = 2'-O-methyladenosine-3'-phosphate
  modified_base 13: mod_base = OTHER; note = 2'-O-methyladenosine-3'-phosphate
  modified_base 14: mod_base = OTHER; note = 2'-deoxy-2'-fluorouridine-3'-phosphate
  modified_base 15: mod_base = OTHER; note = 2'-O-methyladenosine-3'-phosphate
  modified_base 16: mod_base = OTHER; note = 2'-deoxy-2'-fluoroguanosine-3'-phosphate
  modified_base 17: mod_base = OTHER; note = 2'-O-methyluridine-3'-phosphate
  modified_base 18: mod_base = OTHER; note = 2'-O-methylguanosine-3'-phosphate
  modified_base 19: mod_base = OTHER; note = 2'-O-methylguanosine-3'-phosphate
  modified_base 20: mod_base = OTHER; note = 2'-O-methylcytidine-3'-phosphate
  modified_base 21: mod_base = OTHER; note = 2'-O-methyluridine-3'-phosphorothioate
  modified_base 22: mod_base = OTHER; note = 2'-O-methylguanosine-3'-phosphorothioate
  modified_base 23: mod_base = OTHER; note = 2'-O-methylguanosine
ggcagaacatcaatagtggctgg

SEQ ID NO: 2550 - RNA, 21 nt, synthetic construct
  source 1..21: mol_type = other RNA
  modified_base 1: mod_base = OTHER; note = 2'-O-methylguanosine-3'-phosphorothioate
  modified_base 2: mod_base = OTHER; note = 2'-O-methyluridine-3'-phosphorothioate
  modified_base 3: mod_base = OTHER; note = 2'-O-methylguanosine-3'-phosphate
  modified_base 4: mod_base = OTHER; note = 2'-O-methylcytidine-3'-phosphate
  modified_base 5: mod_base = OTHER; note = 2'-O-methylcytidine-3'-phosphate
  modified_base 6: mod_base = OTHER; note = 2'-O-methyladenosine-3'-phosphate
  modified_base 7: mod_base = OTHER; note = 2'-deoxy-2'-fluoroguanosine-3'-phosphate
  modified_base 8: mod_base = OTHER; note = 2'-O-methylcytidine-3'-phosphate
  modified_base 9: mod_base = OTHER; note = 2'-deoxy-2'-fluorocytidine-3'-phosphate
  modified_base 10: mod_base = OTHER; note = 2'-deoxy-2'-fluoroadenosine-3'-phosphate
  modified_base 11: mod_base = OTHER; note = 2'-deoxy-2'-fluorocytidine-3'-phosphate
  modified_base 12: mod_base = OTHER; note = 2'-O-methyluridine-3'-phosphate
  modified_base 13: mod_base = OTHER; note = 2'-O-methyladenosine-3'-phosphate
  modified_base 14: mod_base = OTHER; note = 2'-O-methyluridine-3'-phosphate
  modified_base 15: mod_base = OTHER; note = 2'-O-methyluridine-3'-phosphate
  modified_base 16: mod_base = OTHER; note = 2'-O-methylguanosine-3'-phosphate
  modified_base 17: mod_base = OTHER; note = 2'-O-methyladenosine-3'-phosphate
  modified_base 18: mod_base = OTHER; note = 2'-O-methyluridine-3'-phosphate
  modified_base 19: mod_base = OTHER; note = 2'-O-methylguanosine-3'-phosphate
  modified_base 20: mod_base = OTHER; note = 2'-O-methyluridine-3'-phosphate
  modified_base 21: mod_base = OTHER; note = 2'-O-methyluridine-3'-phosphate ((2S,4R)-1-[29-[[2-(acetylamino)-2-deoxy-beta-D-galactopyra nosyl]oxy]-14,14-bis[[3-[[3-[[5-[[2-(acetylamino)-2-deoxy-b eta-D-galactopyranosyl]oxy]-1-oxopentyl]amino]propyl]amino] -3-oxopropoxy]methyl]-1,12,19,25-tetraoxo-16-oxa-13,20,24-t riazanonacos-1-yl]-4-hydroxy-2-pyrrolidinyl)methyl ester
gtgccagccactattgatgtt

SEQ ID NO: 2551 - RNA, 23 nt, synthetic construct
  source 1..23: mol_type = other RNA
  modified_base 1: mod_base = OTHER; note = 2'-O-methyladenosine-3'-phosphorothioate
  modified_base 2: mod_base = OTHER; note = 2'-deoxy-2'-fluoroadenosine-3'-phosphorothioate
  modified_base 3: mod_base = OTHER; note = 2'-O-methylcytidine-3'-phosphate
  modified_base 4: mod_base = OTHER; note = 2'-O-methyladenosine-3'-phosphate
  modified_base 5: mod_base = OTHER; note = 2'-O-methyluridine-3'-phosphate
  modified_base 6: mod_base = OTHER; note = 2'-deoxy-2'-fluorocytidine-3'-phosphate
  modified_base 7: mod_base = OTHER; note = 2'-O-methyladenosine-3'-phosphate
  modified_base 8: mod_base = OTHER; note = 2'-deoxy-2'-fluoroadenosine-3'-phosphate
  modified_base 9: mod_base = OTHER; note = 2'-deoxy-2'-fluorouridine-3'-phosphate
  modified_base 10: mod_base = OTHER; note = 2'-O-methyladenosine-3'-phosphate
  modified_base 11: mod_base = OTHER; note = 2'-O-methylguanosine-3'-phosphate
  modified_base 12: mod_base = OTHER; note = 2'-O-methyluridine-3'-phosphate
  modified_base 13: mod_base = OTHER; note = 2'-O-methylguanosine-3'-phosphate
  modified_base 14: mod_base = OTHER; note = 2'-deoxy-2'-fluoroguanosine-3'-phosphate
  modified_base 15: mod_base = OTHER; note = 2'-O-methylcytidine-3'-phosphate
  modified_base 16: mod_base = OTHER; note = 2'-deoxy-2'-fluorouridine-3'-phosphate
  modified_base 17: mod_base = OTHER; note = 2'-O-methylguanosine-3'-phosphate
  modified_base 18: mod_base = OTHER; note = 2'-O-methylguanosine-3'-phosphate
  modified_base 19: mod_base = OTHER; note = 2'-O-methylcytidine-3'-phosphate
  modified_base 20: mod_base = OTHER; note = 2'-O-methyladenosine-3'-phosphate
  modified_base 21: mod_base = OTHER; note = 2'-O-methylcytidine-3'-phosphorothioate
  modified_base 22: mod_base = OTHER; note = 2'-O-methylcytidine-3'-phosphorothioate
  modified_base 23: mod_base = OTHER; note = 2'-O-methylcytidine
aacatcaatagtggctggcaccc

SEQ ID NO: 2552 - RNA, 21 nt, synthetic construct
  source 1..21: mol_type = other RNA
  modified_base 1: mod_base = OTHER; note = 2'-O-methylguanosine-3'-phosphorothioate
  modified_base 2: mod_base = OTHER; note = 2'-O-methylguanosine-3'-phosphorothioate
  modified_base 3: mod_base = OTHER; note = 2'-O-methyluridine-3'-phosphate
  modified_base 4: mod_base = OTHER; note = 2'-O-methylguanosine-3'-phosphate
  modified_base 5: mod_base = OTHER; note = 2'-O-methylcytidine-3'-phosphate
  modified_base 6: mod_base = OTHER; note = 2'-O-methylcytidine-3'-phosphate
  modified_base 7: mod_base = OTHER; note = 2'-deoxy-2'-fluoroadenosine-3'-phosphate
  modified_base 8: mod_base = OTHER; note = 2'-O-methylguanosine-3'-phosphate
  modified_base 9: mod_base = OTHER; note = 2'-deoxy-2'-fluorocytidine-3'-phosphate
  modified_base 10: mod_base = OTHER; note = 2'-deoxy-2'-fluorocytidine-3'-phosphate
  modified_base 11: mod_base = OTHER; note = 2'-deoxy-2'-fluoroadenosine-3'-phosphate
  modified_base 12: mod_base = OTHER; note = 2'-O-methylcytidine-3'-phosphate
  modified_base 13: mod_base = OTHER; note = 2'-O-methyluridine-3'-phosphate
  modified_base 14: mod_base = OTHER; note = 2'-O-methyladenosine-3'-phosphate
  modified_base 15: mod_base = OTHER; note = 2'-O-methyluridine-3'-phosphate
  modified_base 16: mod_base = OTHER; note = 2'-O-methyluridine-3'-phosphate
  modified_base 17: mod_base = OTHER; note = 2'-O-methylguanosine-3'-phosphate
  modified_base 18: mod_base = OTHER; note = 2'-O-methyladenosine-3'-phosphate
  modified_base 19: mod_base = OTHER; note = 2'-O-methyluridine-3'-phosphate
  modified_base 20: mod_base = OTHER; note = 2'-O-methylguanosine-3'-phosphate
  modified_base 21: mod_base = OTHER; note = 2'-O-methyluridine-3'-phosphate ((2S,4R)-1-[29-[[2-(acetylamino)-2-deoxy-beta-D-galactopyra nosyl]oxy]-14,14-bis[[3-[[3-[[5-[[2-(acetylamino)-2-deoxy-b eta-D-galactopyranosyl]oxy]-1-oxopentyl]amino]propyl]amino] -3-oxopropoxy]methyl]-1,12,19,25-tetraoxo-16-oxa-13,20,24-t riazanonacos-1-yl]-4-hydroxy-2-pyrrolidinyl)methyl ester
ggtgccagccactattgatgt

SEQ ID NO: 2553 - RNA, 23 nt, synthetic construct
  source 1..23: mol_type = other RNA
  modified_base 1: mod_base = OTHER; note = 2'-O-methyladenosine-3'-phosphorothioate
  modified_base 2: mod_base = OTHER; note = 2'-deoxy-2'-fluorocytidine-3'-phosphorothioate
  modified_base 3: mod_base = OTHER; note = 2'-O-methyladenosine-3'-phosphate
  modified_base 4: mod_base = OTHER; note = 2'-O-methyluridine-3'-phosphate
  modified_base 5: mod_base = OTHER; note = 2'-O-methylcytidine-3'-phosphate
  modified_base 6: mod_base = OTHER; note = 2'-deoxy-2'-fluoroadenosine-3'-phosphate
  modified_base 7: mod_base = OTHER; note = 2'-O-methyladenosine-3'-phosphate
  modified_base 8: mod_base = OTHER; note = 2'-deoxy-2'-fluorouridine-3'-phosphate
  modified_base 9: mod_base = OTHER; note = 2'-deoxy-2'-fluoroadenosine-3'-phosphate
  modified_base 10: mod_base = OTHER; note = 2'-O-methylguanosine-3'-phosphate
  modified_base 11: mod_base = OTHER; note = 2'-O-methyluridine-3'-phosphate
  modified_base 12: mod_base = OTHER; note = 2'-O-methylguanosine-3'-phosphate
  modified_base 13: mod_base = OTHER; note = 2'-O-methylguanosine-3'-phosphate
  modified_base 14: mod_base = OTHER; note = 2'-deoxy-2'-fluorocytidine-3'-phosphate
  modified_base 15: mod_base = OTHER; note = 2'-O-methyluridine-3'-phosphate
  modified_base 16: mod_base = OTHER; note = 2'-deoxy-2'-fluoroguanosine-3'-phosphate
  modified_base 17: mod_base = OTHER; note = 2'-O-methylguanosine-3'-phosphate
  modified_base 18: mod_base = OTHER; note = 2'-O-methylcytidine-3'-phosphate
  modified_base 19: mod_base = OTHER; note = 2'-O-methyladenosine-3'-phosphate
  modified_base 20: mod_base = OTHER; note = 2'-O-methylcytidine-3'-phosphate
  modified_base 21: mod_base = OTHER; note = 2'-O-methylcytidine-3'-phosphorothioate
  modified_base 22: mod_base = OTHER; note = 2'-O-methylcytidine-3'-phosphorothioate
  modified_base 23: mod_base = OTHER; note = 2'-O-methylcytidine
acatcaatagtggctggcacccc

SEQ ID NO: 2554 - RNA, 21 nt, synthetic construct
  source 1..21: mol_type = other RNA
  modified_base 1: mod_base = OTHER; note = 2'-O-methyladenosine-3'-phosphorothioate
  modified_base 2: mod_base = OTHER; note = 2'-O-methylcytidine-3'-phosphorothioate
  modified_base 3: mod_base = OTHER; note = 2'-O-methyladenosine-3'-phosphate
  modified_base 4: mod_base = OTHER; note = 2'-O-methyladenosine-3'-phosphate
  modified_base 5: mod_base = OTHER; note = 2'-O-methylguanosine-3'-phosphate
  modified_base 6: mod_base = OTHER; note = 2'-O-methylguanosine-3'-phosphate
  modified_base 7: mod_base = OTHER; note = 2'-deoxy-2'-fluoroadenosine-3'-phosphate
  modified_base 8: mod_base = OTHER; note = 2'-O-methylcytidine-3'-phosphate
  modified_base 9: mod_base = OTHER; note = 2'-deoxy-2'-fluorocytidine-3'-phosphate
  modified_base 10: mod_base = OTHER; note = 2'-deoxy-2'-fluoroguanosine-3'-phosphate
  modified_base 11: mod_base = OTHER; note = 2'-deoxy-2'-fluoroadenosine-3'-phosphate
  modified_base 12: mod_base = OTHER; note = 2'-O-methylguanosine-3'-phosphate
  modified_base 13: mod_base = OTHER; note = 2'-O-methyladenosine-3'-phosphate
  modified_base 14: mod_base = OTHER; note = 2'-O-methyladenosine-3'-phosphate
  modified_base 15: mod_base = OTHER; note = 2'-O-methylguanosine-3'-phosphate
  modified_base 16: mod_base = OTHER; note = 2'-O-methyluridine-3'-phosphate
  modified_base 17: mod_base = OTHER; note = 2'-O-methylcytidine-3'-phosphate
  modified_base 18: mod_base = OTHER; note = 2'-O-methyladenosine-3'-phosphate
  modified_base 19: mod_base = OTHER; note = 2'-O-methylcytidine-3'-phosphate
  modified_base 20: mod_base = OTHER; note = 2'-O-methylcytidine-3'-phosphate
  modified_base 21: mod_base = OTHER; note = 2'-O-methyladenosine-3'-phosphate ((2S,4R)-1-[29-[[2-(acetylamino)-2-deoxy-beta-D-galactopyra nosyl]oxy]-14,14-bis[[3-[[3-[[5-[[2-(acetylamino)-2-deoxy-b eta-D-galactopyranosyl]oxy]-1-oxopentyl]amino]propyl]amino] -3-oxopropoxy]methyl]-1,12,19,25-tetraoxo-16-oxa-13,20,24-t riazanonacos-1-yl]-4-hydroxy-2-pyrrolidinyl)methyl ester
acaaggaccgagaagtcacca

SEQ ID NO: 2555 - RNA, 23 nt, synthetic construct
  source 1..23: mol_type = other RNA
  modified_base 1: mod_base = OTHER; note = 2'-O-methyluridine-3'-phosphorothioate
  modified_base 2: mod_base = OTHER; note = 2'-deoxy-2'-fluoroguanosine-3'-phosphorothioate
  modified_base 3: mod_base = OTHER; note = 2'-O-methylguanosine-3'-phosphate
  modified_base 4: mod_base = OTHER; note = 2'-O-methyluridine-3'-phosphate
  modified_base 5: mod_base = OTHER; note = 2'-O-methylguanosine-3'-phosphate
  modified_base 6: mod_base = OTHER; note = 2'-deoxy-2'-fluoroadenosine-3'-phosphate
  modified_base 7: mod_base = OTHER; note = 2'-O-methylcytidine-3'-phosphate
  modified_base 8: mod_base = OTHER; note = 2'-deoxy-2'-fluorouridine-3'-phosphate
  modified_base 9: mod_base = OTHER; note = 2'-deoxy-2'-fluorouridine-3'-phosphate
  modified_base 10: mod_base = OTHER; note = 2'-O-methylcytidine-3'-phosphate
  modified_base 11: mod_base = OTHER; note = 2'-O-methyluridine-3'-phosphate
  modified_base 12: mod_base = OTHER; note = 2'-O-methylcytidine-3'-phosphate
  modified_base 13: mod_base = OTHER; note = 2'-O-methylguanosine-3'-phosphate
  modified_base 14: mod_base = OTHER; note = 2'-deoxy-2'-fluoroguanosine-3'-phosphate
  modified_base 15: mod_base = OTHER; note = 2'-O-methyluridine-3'-phosphate
  modified_base 16: mod_base = OTHER; note = 2'-deoxy-2'-fluorocytidine-3'-phosphate
  modified_base 17: mod_base = OTHER; note = 2'-O-methylcytidine-3'-phosphate
  modified_base 18: mod_base = OTHER; note = 2'-O-methyluridine-3'-phosphate
  modified_base 19: mod_base = OTHER; note = 2'-O-methyluridine-3'-phosphate
  modified_base 20: mod_base = OTHER; note = 2'-O-methylguanosine-3'-phosphate
  modified_base 21: mod_base = OTHER; note = 2'-O-methyluridine-3'-phosphorothioate
  modified_base 22: mod_base = OTHER; note = 2'-O-methyladenosine-3'-phosphorothioate
  modified_base 23: mod_base = OTHER; note = 2'-O-methylguanosine
tggtgacttctcggtccttgtag

SEQ ID NO: 2556 - RNA, 21 nt, synthetic construct
  source 1..21: mol_type = other RNA
  modified_base 1: mod_base = OTHER; note = 2'-O-methylcytidine-3'-phosphorothioate
  modified_base 2: mod_base = OTHER; note = 2'-O-methyladenosine-3'-phosphorothioate
  modified_base 3: mod_base = OTHER; note = 2'-O-methyladenosine-3'-phosphate
  modified_base 4: mod_base = OTHER; note = 2'-O-methylguanosine-3'-phosphate
  modified_base 5: mod_base = OTHER; note = 2'-O-methylguanosine-3'-phosphate
  modified_base 6: mod_base = OTHER; note = 2'-O-methyladenosine-3'-phosphate
  modified_base 7: mod_base = OTHER; note = 2'-deoxy-2'-fluorocytidine-3'-phosphate
  modified_base 8: mod_base = OTHER; note = 2'-O-methylcytidine-3'-phosphate
  modified_base 9: mod_base = OTHER; note = 2'-deoxy-2'-fluoroguanosine-3'-phosphate
  modified_base 10: mod_base = OTHER; note = 2'-deoxy-2'-fluoroadenosine-3'-phosphate
  modified_base 11: mod_base = OTHER; note = 2'-deoxy-2'-fluoroguanosine-3'-phosphate
  modified_base 12: mod_base = OTHER; note = 2'-O-methyladenosine-3'-phosphate
  modified_base 13: mod_base = OTHER; note = 2'-O-methyladenosine-3'-phosphate
  modified_base 14: mod_base = OTHER; note = 2'-O-methylguanosine-3'-phosphate
  modified_base 15: mod_base = OTHER; note = 2'-O-methyluridine-3'-phosphate
  modified_base 16: mod_base = OTHER; note = 2'-O-methylcytidine-3'-phosphate
  modified_base 17: mod_base = OTHER; note = 2'-O-methyladenosine-3'-phosphate
  modified_base 18: mod_base = OTHER; note = 2'-O-methylcytidine-3'-phosphate
  modified_base 19: mod_base = OTHER; note = 2'-O-methylcytidine-3'-phosphate
  modified_base 20: mod_base = OTHER; note = 2'-O-methyladenosine-3'-phosphate
  modified_base 21: mod_base = OTHER; note = 2'-O-methyladenosine-3'-phosphate ((2S,4R)-1-[29-[[2-(acetylamino)-2-deoxy-beta-D-galactopyra nosyl]oxy]-14,14-bis[[3-[[3-[[5-[[2-(acetylamino)-2-deoxy-b eta-D-galactopyranosyl]oxy]-1-oxopentyl]amino]propyl]amino] -3-oxopropoxy]methyl]-1,12,19,25-tetraoxo-16-oxa-13,20,24-t riazanonacos-1-yl]-4-hydroxy-2-pyrrolidinyl)methyl ester
caaggaccgagaagtcaccaa

SEQ ID NO: 2557 - RNA, 23 nt, synthetic construct
  source 1..23: mol_type = other RNA
  modified_base 1: mod_base = OTHER; note = 2'-O-methyluridine-3'-phosphorothioate
  modified_base 2: mod_base = OTHER; note = 2'-deoxy-2'-fluorouridine-3'-phosphorothioate
  modified_base 3: mod_base = OTHER; note = 2'-O-methylguanosine-3'-phosphate
  modified_base 4: mod_base = OTHER; note = 2'-O-methylguanosine-3'-phosphate
  modified_base 5: mod_base = OTHER; note = 2'-O-methyluridine-3'-phosphate
  modified_base 6: mod_base = OTHER; note = 2'-deoxy-2'-fluoroguanosine-3'-phosphate
  modified_base 7: mod_base = OTHER; note = 2'-O-methyladenosine-3'-phosphate
  modified_base 8: mod_base = OTHER; note = 2'-deoxy-2'-fluorocytidine-3'-phosphate
  modified_base 9: mod_base = OTHER; note = 2'-deoxy-2'-fluorouridine-3'-phosphate
  modified_base 10: mod_base = OTHER; note = 2'-O-methyluridine-3'-phosphate
  modified_base 11: mod_base = OTHER; note = 2'-O-methylcytidine-3'-phosphate
  modified_base 12: mod_base = OTHER; note = 2'-O-methyluridine-3'-phosphate
  modified_base 13: mod_base = OTHER; note = 2'-O-methylcytidine-3'-phosphate
  modified_base 14: mod_base = OTHER; note = 2'-deoxy-2'-fluoroguanosine-3'-phosphate
  modified_base 15: mod_base = OTHER; note = 2'-O-methylguanosine-3'-phosphate
  modified_base 16: mod_base = OTHER; note = 2'-deoxy-2'-fluorouridine-3'-phosphate
  modified_base 17: mod_base = OTHER; note = 2'-O-methylcytidine-3'-phosphate
  modified_base 18: mod_base = OTHER; note = 2'-O-methylcytidine-3'-phosphate
  modified_base 19: mod_base = OTHER; note = 2'-O-methyluridine-3'-phosphate
  modified_base 20: mod_base = OTHER; note = 2'-O-methyluridine-3'-phosphate
  modified_base 21: mod_base = OTHER; note = 2'-O-methylguanosine-3'-phosphorothioate
  modified_base 22: mod_base = OTHER; note = 2'-O-methyluridine-3'-phosphorothioate
  modified_base 23: mod_base = OTHER; note = 2'-O-methyladenosine
ttggtgacttctcggtccttgta

SEQ ID NO: 2558 - RNA, 21 nt, synthetic construct
  source 1..21: mol_type = other RNA
  modified_base 1: mod_base = OTHER; note = 2'-O-methyladenosine-3'-phosphorothioate
  modified_base 2: mod_base = OTHER; note = 2'-O-methyluridine-3'-phosphorothioate
  modified_base 3: mod_base = OTHER; note = 2'-O-methylcytidine-3'-phosphate
  modified_base 4: mod_base = OTHER; note = 2'-O-methyluridine-3'-phosphate
  modified_base 5: mod_base = OTHER; note = 2'-O-methyladenosine-3'-phosphate
  modified_base 6: mod_base = OTHER; note = 2'-O-methylcytidine-3'-phosphate
  modified_base 7: mod_base = OTHER; note = 2'-deoxy-2'-fluoroadenosine-3'-phosphate
  modified_base 8: mod_base = OTHER; note = 2'-O-methyladenosine-3'-phosphate
  modified_base 9: mod_base = OTHER; note = 2'-deoxy-2'-fluoroguanosine-3'-phosphate
  modified_base 10: mod_base = OTHER; note = 2'-deoxy-2'-fluoroguanosine-3'-phosphate
  modified_base 11: mod_base = OTHER; note = 2'-deoxy-2'-fluoroadenosine-3'-phosphate
  modified_base 12: mod_base = OTHER; note = 2'-O-methylcytidine-3'-phosphate
  modified_base 13: mod_base = OTHER; note = 2'-O-methylcytidine-3'-phosphate
  modified_base 14: mod_base = OTHER; note = 2'-O-methylguanosine-3'-phosphate
  modified_base 15: mod_base = OTHER; note = 2'-O-methyladenosine-3'-phosphate
  modified_base 16: mod_base = OTHER; note = 2'-O-methylguanosine-3'-phosphate
  modified_base 17: mod_base = OTHER; note = 2'-O-methyladenosine-3'-phosphate
  modified_base 18: mod_base = OTHER; note = 2'-O-methyladenosine-3'-phosphate
  modified_base 19: mod_base = OTHER; note = 2'-O-methylguanosine-3'-phosphate
  modified_base 20: mod_base = OTHER; note = 2'-O-methyluridine-3'-phosphate
  modified_base 21: mod_base = OTHER; note = 2'-O-methylcytidine-3'-phosphate ((2S,4R)-1-[29-[[2-(acetylamino)-2-deoxy-beta-D-galactopyra nosyl]oxy]-14,14-bis[[3-[[3-[[5-[[2-(acetylamino)-2-deoxy-b eta-D-galactopyranosyl]oxy]-1-oxopentyl]amino]propyl]amino] -3-oxopropoxy]methyl]-1,12,19,25-tetraoxo-16-oxa-13,20,24-t riazanonacos-1-yl]-4-hydroxy-2-pyrrolidinyl)methyl ester
atctacaaggaccgagaagtc

SEQ ID NO: 2559 - RNA, 23 nt, synthetic construct
  source 1..23: mol_type = other RNA
  modified_base 1: mod_base = OTHER; note = 2'-O-methylguanosine-3'-phosphorothioate
  modified_base 2: mod_base = OTHER; note = 2'-deoxy-2'-fluoroadenosine-3'-phosphorothioate
  modified_base 3: mod_base = OTHER; note = 2'-O-methylcytidine-3'-phosphate
  modified_base 4: mod_base = OTHER; note = 2'-O-methyluridine-3'-phosphate
  modified_base 5: mod_base = OTHER; note = 2'-O-methyluridine-3'-phosphate
  modified_base 6: mod_base = OTHER; note = 2'-deoxy-2'-fluorocytidine-3'-phosphate
  modified_base 7: mod_base = OTHER; note = 2'-O-methyluridine-3'-phosphate
  modified_base 8: mod_base = OTHER; note = 2'-deoxy-2'-fluorocytidine-3'-phosphate
  modified_base 9: mod_base = OTHER; note = 2'-deoxy-2'-fluoroguanosine-3'-phosphate
  modified_base 10: mod_base = OTHER; note = 2'-O-methylguanosine-3'-phosphate
  modified_base 11: mod_base = OTHER; note = 2'-O-methyluridine-3'-phosphate
  modified_base 12: mod_base = OTHER; note = 2'-O-methylcytidine-3'-phosphate
  modified_base 13: mod_base = OTHER; note = 2'-O-methylcytidine-3'-phosphate
  modified_base 14: mod_base = OTHER; note = 2'-deoxy-2'-fluorouridine-3'-phosphate
  modified_base 15: mod_base = OTHER; note = 2'-O-methyluridine-3'-phosphate
  modified_base 16: mod_base = OTHER; note = 2'-deoxy-2'-fluoroguanosine-3'-phosphate
  modified_base 17: mod_base = OTHER; note = 2'-O-methyluridine-3'-phosphate
  modified_base 18: mod_base = OTHER; note = 2'-O-methyladenosine-3'-phosphate
  modified_base 19: mod_base = OTHER; note = 2'-O-methylguanosine-3'-phosphate
  modified_base 20: mod_base = OTHER; note = 2'-O-methyladenosine-3'-phosphate
  modified_base 21: mod_base = OTHER; note = 2'-O-methyluridine-3'-phosphorothioate
  modified_base 22: mod_base = OTHER; note = 2'-O-methyladenosine-3'-phosphorothioate
  modified_base 23: mod_base = OTHER; note = 2'-O-methyluridine
gacttctcggtccttgtagatat

SEQ ID NO: 2560 - RNA, 21 nt, synthetic construct
  source 1..21: mol_type = other RNA
  modified_base 1: mod_base = OTHER; note = 2'-O-methyluridine-3'-phosphorothioate
  modified_base 2: mod_base = OTHER; note = 2'-O-methyladenosine-3'-phosphorothioate
  modified_base 3: mod_base = OTHER; note = 2'-O-methyluridine-3'-phosphate
  modified_base 4: mod_base = OTHER; note = 2'-O-methylcytidine-3'-phosphate
  modified_base 5: mod_base = OTHER; note = 2'-O-methyluridine-3'-phosphate
  modified_base 6: mod_base = OTHER; note = 2'-O-methyladenosine-3'-phosphate
  modified_base 7: mod_base = OTHER; note = 2'-deoxy-2'-fluorocytidine-3'-phosphate
  modified_base 8: mod_base = OTHER; note = 2'-O-methyladenosine-3'-phosphate
  modified_base 9: mod_base = OTHER; note = 2'-deoxy-2'-fluoroadenosine-3'-phosphate
  modified_base 10: mod_base = OTHER; note = 2'-deoxy-2'-fluoroguanosine-3'-phosphate
  modified_base 11: mod_base = OTHER; note = 2'-deoxy-2'-fluoroguanosine-3'-phosphate
  modified_base 12: mod_base = OTHER; note = 2'-O-methyladenosine-3'-phosphate
  modified_base 13: mod_base = OTHER; note = 2'-O-methylcytidine-3'-phosphate
  modified_base 14: mod_base = OTHER; note = 2'-O-methylcytidine-3'-phosphate
  modified_base 15: mod_base = OTHER; note = 2'-O-methylguanosine-3'-phosphate
  modified_base 16: mod_base = OTHER; note = 2'-O-methyladenosine-3'-phosphate
  modified_base 17: mod_base = OTHER; note = 2'-O-methylguanosine-3'-phosphate
  modified_base 18: mod_base = OTHER; note = 2'-O-methyladenosine-3'-phosphate
  modified_base 19: mod_base = OTHER; note = 2'-O-methyladenosine-3'-phosphate
  modified_base 20: mod_base = OTHER; note = 2'-O-methylguanosine-3'-phosphate
  modified_base 21: mod_base = OTHER; note = 2'-O-methyluridine-3'-phosphate ((2S,4R)-1-[29-[[2-(acetylamino)-2-deoxy-beta-D-galactopyra nosyl]oxy]-14,14-bis[[3-[[3-[[5-[[2-(acetylamino)-2-deoxy-b eta-D-galactopyranosyl]oxy]-1-oxopentyl]amino]propyl]amino] -3-oxopropoxy]methyl]-1,12,19,25-tetraoxo-16-oxa-13,20,24-t riazanonacos-1-yl]-4-hydroxy-2-pyrrolidinyl)methyl ester
tatctacaaggaccgagaagt

SEQ ID NO: 2561 - RNA, 23 nt, synthetic construct
  source 1..23: mol_type = other RNA
  modified_base 1: mod_base = OTHER; note = 2'-O-methyladenosine-3'-phosphorothioate
  modified_base 2: mod_base = OTHER; note = 2'-deoxy-2'-fluorocytidine-3'-phosphorothioate
  modified_base 3: mod_base = OTHER; note = 2'-O-methyluridine-3'-phosphate
  modified_base 4: mod_base = OTHER; note = 2'-O-methyluridine-3'-phosphate
  modified_base 5: mod_base = OTHER; note = 2'-O-methylcytidine-3'-phosphate
  modified_base 6: mod_base = OTHER; note = 2'-deoxy-2'-fluorouridine-3'-phosphate
  modified_base 7: mod_base = OTHER; note = 2'-O-methylcytidine-3'-phosphate
  modified_base 8: mod_base = OTHER; note = 2'-deoxy-2'-fluoroguanosine-3'-phosphate
  modified_base 9: mod_base = OTHER; note = 2'-deoxy-2'-fluoroguanosine-3'-phosphate
  modified_base 10: mod_base = OTHER; note = 2'-O-methyluridine-3'-phosphate
  modified_base 11: mod_base = OTHER; note = 2'-O-methylcytidine-3'-phosphate
  modified_base 12: mod_base = OTHER; note = 2'-O-methylcytidine-3'-phosphate
  modified_base 13: mod_base = OTHER; note = 2'-O-methyluridine-3'-phosphate
  modified_base 14: mod_base = OTHER; note = 2'-deoxy-2'-fluorouridine-3'-phosphate
  modified_base 15: mod_base = OTHER; note = 2'-O-methylguanosine-3'-phosphate
  modified_base 16: mod_base = OTHER; note = 2'-deoxy-2'-fluorouridine-3'-phosphate
  modified_base 17: mod_base = OTHER; note = 2'-O-methyladenosine-3'-phosphate
  modified_base 18: mod_base = OTHER; note = 2'-O-methylguanosine-3'-phosphate
  modified_base 19: mod_base = OTHER; note = 2'-O-methyladenosine-3'-phosphate
  modified_base 20: mod_base = OTHER; note = 2'-O-methyluridine-3'-phosphate
  modified_base 21: mod_base = OTHER; note = 2'-O-methyladenosine-3'-phosphorothioate
  modified_base 22: mod_base = OTHER; note = 2'-O-methyluridine-3'-phosphorothioate
  modified_base 23: mod_base = OTHER; note = 2'-O-methyladenosine
acttctcggtccttgtagatata

SEQ ID NO: 2562 - RNA, 21 nt, synthetic construct
  source 1..21: mol_type = other RNA
  modified_base 1: mod_base = OTHER; note = 2'-O-methylcytidine-3'-phosphorothioate
  modified_base 2: mod_base = OTHER; note = 2'-O-methyladenosine-3'-phosphorothioate
  modified_base 3: mod_base = OTHER; note = 2'-O-methylguanosine-3'-phosphate
  modified_base 4: mod_base = OTHER; note = 2'-O-methyladenosine-3'-phosphate
  modified_base 5: mod_base = OTHER; note = 2'-O-methyladenosine-3'-phosphate
  modified_base 6: mod_base = OTHER; note = 2'-O-methyluridine-3'-phosphate
  modified_base 7: mod_base = OTHER; note = 2'-deoxy-2'-fluoroguanosine-3'-phosphate
  modified_base 8: mod_base = OTHER; note = 2'-O-methyluridine-3'-phosphate
  modified_base 9: mod_base = OTHER; note = 2'-deoxy-2'-fluoroguanosine-3'-phosphate
  modified_base 10: mod_base = OTHER; note = 2'-deoxy-2'-fluoroadenosine-3'-phosphate
  modified_base 11: mod_base = OTHER; note = 2'-deoxy-2'-fluoroadenosine-3'-phosphate
  modified_base 12: mod_base = OTHER; note = 2'-O-methyladenosine-3'-phosphate
  modified_base 13: mod_base = OTHER; note = 2'-O-methylguanosine-3'-phosphate
  modified_base 14: mod_base = OTHER; note = 2'-O-methyluridine-3'-phosphate
  modified_base 15: mod_base = OTHER; note = 2'-O-methylcytidine-3'-phosphate
  modified_base 16: mod_base = OTHER; note = 2'-O-methyladenosine-3'-phosphate
  modified_base 17: mod_base = OTHER; note = 2'-O-methyluridine-3'-phosphate
  modified_base 18: mod_base = OTHER; note = 2'-O-methylcytidine-3'-phosphate
  modified_base 19: mod_base = OTHER; note = 2'-O-methylguanosine-3'-phosphate
  modified_base 20: mod_base = OTHER; note = 2'-O-methyladenosine-3'-phosphate
  modified_base 21: mod_base = OTHER; note = 2'-O-methylcytidine-3'-phosphate ((2S,4R)-1-[29-[[2-(acetylamino)-2-deoxy-beta-D-galactopyra nosyl]oxy]-14,14-bis[[3-[[3-[[5-[[2-(acetylamino)-2-deoxy-b eta-D-galactopyranosyl]oxy]-1-oxopentyl]amino]propyl]amino] -3-oxopropoxy]methyl]-1,12,19,25-tetraoxo-16-oxa-13,20,24-t riazanonacos-1-yl]-4-hydroxy-2-pyrrolidinyl)methyl ester
cagaatgtgaaagtcatcgac

SEQ ID NO: 2563 - RNA, 23 nt, synthetic construct
  source 1..23: mol_type = other RNA
  modified_base 1: mod_base = OTHER; note = 2'-O-methylguanosine-3'-phosphorothioate
  modified_base 2: mod_base = OTHER; note = 2'-deoxy-2'-fluorouridine-3'-phosphorothioate
  modified_base 3: mod_base = OTHER; note = 2'-O-methylcytidine-3'-phosphate
  modified_base 4: mod_base = OTHER; note = 2'-O-methylguanosine-3'-phosphate
  modified_base 5: mod_base = OTHER; note = 2'-O-methyladenosine-3'-phosphate
  modified_base 6: mod_base = OTHER; note = 2'-deoxy-2'-fluorouridine-3'-phosphate
  modified_base 7: mod_base = OTHER; note = 2'-O-methylguanosine-3'-phosphate
  modified_base 8: mod_base = OTHER; note = 2'-deoxy-2'-fluoroadenosine-3'-phosphate
  modified_base 9: mod_base = OTHER; note = 2'-deoxy-2'-fluorocytidine-3'-phosphate
  modified_base 10: mod_base = OTHER; note = 2'-O-methyluridine-3'-phosphate
  modified_base 11: mod_base = OTHER; note = 2'-O-methyluridine-3'-phosphate
  modified_base 12: mod_base = OTHER; note = 2'-O-methyluridine-3'-phosphate
  modified_base 13: mod_base = OTHER; note = 2'-O-methylcytidine-3'-phosphate
  modified_base 14: mod_base = OTHER; note = 2'-deoxy-2'-fluoroadenosine-3'-phosphate
  modified_base 15: mod_base = OTHER; note = 2'-O-methylcytidine-3'-phosphate
  modified_base 16: mod_base = OTHER; note = 2'-deoxy-2'-fluoroadenosine-3'-phosphate
  modified_base 17: mod_base = OTHER; note = 2'-O-methyluridine-3'-phosphate
  modified_base 18: mod_base = OTHER; note = 2'-O-methyluridine-3'-phosphate
  modified_base 19: mod_base = OTHER; note = 2'-O-methylcytidine-3'-phosphate
  modified_base 20: mod_base = OTHER; note = 2'-O-methyluridine-3'-phosphate
  modified_base 21: mod_base = OTHER; note = 2'-O-methylguanosine-3'-phosphorothioate
  modified_base 22: mod_base = OTHER; note = 2'-O-methylguanosine-3'-phosphorothioate
  modified_base 23: mod_base = OTHER; note = 2'-O-methylcytidine
gtcgatgactttcacattctggc

SEQ ID NO: 2564 - RNA, 21 nt, synthetic construct
  source 1..21: mol_type = other RNA
  modified_base 1: mod_base = OTHER; note = 2'-O-methyladenosine-3'-phosphorothioate
  modified_base 2: mod_base = OTHER; note = 2'-O-methylguanosine-3'-phosphorothioate
  modified_base 3: mod_base = OTHER; note = 2'-O-methyladenosine-3'-phosphate
  modified_base 4: mod_base = OTHER; note = 2'-O-methyladenosine-3'-phosphate
  modified_base 5: mod_base = OTHER; note = 2'-O-methyluridine-3'-phosphate
  modified_base 6: mod_base = OTHER; note = 2'-O-methylguanosine-3'-phosphate
  modified_base 7: mod_base = OTHER; note = 2'-deoxy-2'-fluorouridine-3'-phosphate
  modified_base 8: mod_base = OTHER; note = 2'-O-methylguanosine-3'-phosphate
  modified_base 9: mod_base = OTHER; note = 2'-deoxy-2'-fluoroadenosine-3'-phosphate
  modified_base 10: mod_base = OTHER; note = 2'-deoxy-2'-fluoroadenosine-3'-phosphate
  modified_base 11: mod_base = OTHER; note = 2'-deoxy-2'-fluoroadenosine-3'-phosphate
  modified_base 12: mod_base = OTHER; note = 2'-O-methylguanosine-3'-phosphate
  modified_base 13: mod_base = OTHER; note = 2'-O-methyluridine-3'-phosphate
  modified_base 14: mod_base = OTHER; note = 2'-O-methylcytidine-3'-phosphate
  modified_base 15: mod_base = OTHER; note = 2'-O-methyladenosine-3'-phosphate
  modified_base 16: mod_base = OTHER; note = 2'-O-methyluridine-3'-phosphate
  modified_base 17: mod_base = OTHER; note = 2'-O-methylcytidine-3'-phosphate
  modified_base 18: mod_base = OTHER; note = 2'-O-methylguanosine-3'-phosphate
  modified_base 19: mod_base = OTHER; note = 2'-O-methyladenosine-3'-phosphate
  modified_base 20: mod_base = OTHER; note = 2'-O-methylcytidine-3'-phosphate
  modified_base 21: mod_base = OTHER; note = 2'-O-methyladenosine-3'-phosphate ((2S,4R)-1-[29-[[2-(acetylamino)-2-deoxy-beta-D-galactopyra nosyl]oxy]-14,14-bis[[3-[[3-[[5-[[2-(acetylamino)-2-deoxy-b eta-D-galactopyranosyl]oxy]-1-oxopentyl]amino]propyl]amino] -3-oxopropoxy]methyl]-1,12,19,25-tetraoxo-16-oxa-13,20,24-t riazanonacos-1-yl]-4-hydroxy-2-pyrrolidinyl)methyl ester
agaatgtgaaagtcatcgaca

SEQ ID NO: 2565 - RNA, 23 nt, synthetic construct
  source 1..23: mol_type = other RNA
  modified_base 1: mod_base = OTHER; note = 2'-O-methyluridine-3'-phosphorothioate
  modified_base 2: mod_base = OTHER; note = 2'-deoxy-2'-fluoroguanosine-3'-phosphorothioate
  modified_base 3: mod_base = OTHER; note = 2'-O-methyluridine-3'-phosphate
  modified_base 4: mod_base = OTHER; note = 2'-O-methylcytidine-3'-phosphate
  modified_base 5: mod_base = OTHER; note = 2'-O-methylguanosine-3'-phosphate
  modified_base 6: mod_base = OTHER; note = 2'-deoxy-2'-fluoroadenosine-3'-phosphate
  modified_base 7: mod_base = OTHER; note = 2'-O-methyluridine-3'-phosphate
  modified_base 8: mod_base = OTHER; note = 2'-deoxy-2'-fluoroguanosine-3'-phosphate
  modified_base 9: mod_base = OTHER; note = 2'-deoxy-2'-fluoroadenosine-3'-phosphate
  modified_base 10: mod_base = OTHER; note = 2'-O-methylcytidine-3'-phosphate
  modified_base 11: mod_base = OTHER; note = 2'-O-methyluridine-3'-phosphate
  modified_base 12: mod_base = OTHER; note = 2'-O-methyluridine-3'-phosphate
  modified_base 13: mod_base = OTHER; note = 2'-O-methyluridine-3'-phosphate
  modified_base 14: mod_base = OTHER; note = 2'-deoxy-2'-fluorocytidine-3'-phosphate
  modified_base 15: mod_base = OTHER; note = 2'-O-methyladenosine-3'-phosphate
  modified_base 16: mod_base = OTHER; note = 2'-deoxy-2'-fluorocytidine-3'-phosphate
  modified_base 17: mod_base = OTHER; note = 2'-O-methyladenosine-3'-phosphate
  modified_base 18: mod_base = OTHER; note = 2'-O-methyluridine-3'-phosphate
  modified_base 19: mod_base = OTHER; note = 2'-O-methyluridine-3'-phosphate
  modified_base 20: mod_base = OTHER; note = 2'-O-methylcytidine-3'-phosphate
  modified_base 21: mod_base = OTHER; note = 2'-O-methyluridine-3'-phosphorothioate
  modified_base 22: mod_base = OTHER; note = 2'-O-methylguanosine-3'-phosphorothioate
  modified_base 23: mod_base = OTHER; note = 2'-O-methylguanosine
tgtcgatgactttcacattctgg

SEQ ID NO: 2566 - RNA, 21 nt, synthetic construct
  source 1..21: mol_type = other RNA
  modified_base 1: mod_base = OTHER; note = 2'-O-methylguanosine-3'-phosphorothioate
  modified_base 2: mod_base = OTHER; note = 2'-O-methyluridine-3'-phosphorothioate
  modified_base 3: mod_base = OTHER; note = 2'-O-methylguanosine-3'-phosphate
  modified_base 4: mod_base = OTHER; note = 2'-O-methylcytidine-3'-phosphate
  modified_base 5: mod_base = OTHER; note = 2'-O-methylcytidine-3'-phosphate
  modified_base 6: mod_base = OTHER; note = 2'-O-methyladenosine-3'-phosphate
  modified_base 7: mod_base = OTHER; note = 2'-deoxy-2'-fluoroguanosine-3'-phosphate
  modified_base 8: mod_base = OTHER; note = 2'-O-methyladenosine-3'-phosphate
  modified_base 9: mod_base = OTHER; note = 2'-deoxy-2'-fluoroadenosine-3'-phosphate
  modified_base 10: mod_base = OTHER; note = 2'-deoxy-2'-fluorouridine-3'-phosphate
  modified_base 11: mod_base = OTHER; note = 2'-deoxy-2'-fluoroguanosine-3'-phosphate
  modified_base 12: mod_base = OTHER; note = 2'-O-methyluridine-3'-phosphate
  modified_base 13: mod_base = OTHER; note = 2'-O-methylguanosine-3'-phosphate
  modified_base 14: mod_base = OTHER; note = 2'-O-methyladenosine-3'-phosphate
  modified_base 15: mod_base = OTHER; note = 2'-O-methyladenosine-3'-phosphate
  modified_base 16: mod_base = OTHER; note = 2'-O-methyladenosine-3'-phosphate
  modified_base 17: mod_base = OTHER; note = 2'-O-methylguanosine-3'-phosphate
  modified_base 18: mod_base = OTHER; note = 2'-O-methyluridine-3'-phosphate
  modified_base 19: mod_base = OTHER; note = 2'-O-methylcytidine-3'-phosphate
  modified_base 20: mod_base = OTHER; note = 2'-O-methyladenosine-3'-phosphate
  modified_base 21: mod_base = OTHER; note = 2'-O-methyluridine-3'-phosphate ((2S,4R)-1-[29-[[2-(acetylamino)-2-deoxy-beta-D-galactopyra nosyl]oxy]-14,14-bis[[3-[[3-[[5-[[2-(acetylamino)-2-deoxy-b eta-D-galactopyranosyl]oxy]-1-oxopentyl]amino]propyl]amino] -3-oxopropoxy]methyl]-1,12,19,25-tetraoxo-16-oxa-13,20,24-t riazanonacos-1-yl]-4-hydroxy-2-pyrrolidinyl)methyl ester
gtgccagaatgtgaaagtcat

SEQ ID NO: 2567 - RNA, 23 nt, synthetic construct
  source 1..23: mol_type = other RNA
  modified_base 1: mod_base = OTHER; note = 2'-O-methyladenosine-3'-phosphorothioate
  modified_base 2: mod_base = OTHER; note = 2'-deoxy-2'-fluorouridine-3'-phosphorothioate
  modified_base 3: mod_base = OTHER; note = 2'-O-methylguanosine-3'-phosphate
  modified_base 4: mod_base = OTHER; note = 2'-O-methyladenosine-3'-phosphate
  modified_base 5: mod_base = OTHER; note = 2'-O-methylcytidine-3'-phosphate
  modified_base 6: mod_base = OTHER; note = 2'-deoxy-2'-fluorouridine-3'-phosphate
  modified_base 7: mod_base = OTHER; note = 2'-O-methyluridine-3'-phosphate
  modified_base 8: mod_base = OTHER; note = 2'-deoxy-2'-fluorouridine-3'-phosphate
  modified_base 9: mod_base = OTHER; note = 2'-deoxy-2'-fluorocytidine-3'-phosphate
  modified_base 10: mod_base = OTHER; note = 2'-O-methyladenosine-3'-phosphate
  modified_base 11: mod_base = OTHER; note = 2'-O-methylcytidine-3'-phosphate
  modified_base 12: mod_base = OTHER; note = 2'-O-methyladenosine-3'-phosphate
  modified_base 13: mod_base = OTHER; note = 2'-O-methyluridine-3'-phosphate
  modified_base 14: mod_base = OTHER; note = 2'-deoxy-2'-fluorouridine-3'-phosphate
  modified_base 15: mod_base = OTHER; note = 2'-O-methylcytidine-3'-phosphate
  modified_base 16: mod_base = OTHER; note = 2'-deoxy-2'-fluorouridine-3'-phosphate
  modified_base 17: mod_base = OTHER; note = 2'-O-methylguanosine-3'-phosphate
  modified_base 18: mod_base = OTHER; note = 2'-O-methylguanosine-3'-phosphate
  modified_base 19: mod_base = OTHER; note = 2'-O-methylcytidine-3'-phosphate
  modified_base 20: mod_base = OTHER; note = 2'-O-methyladenosine-3'-phosphate
  modified_base 21: mod_base = OTHER; note = 2'-O-methylcytidine-3'-phosphorothioate
  modified_base 22: mod_base = OTHER; note = 2'-O-methylcytidine-3'-phosphorothioate
  modified_base 23: mod_base = OTHER; note = 2'-O-methylcytidine
atgactttcacattctggcaccc

SEQ ID NO: 2568 - RNA, 21 nt, synthetic construct
  source 1..21: mol_type = other RNA
  modified_base 1: mod_base = OTHER; note = 2'-O-methylguanosine-3'-phosphorothioate
  modified_base 2: mod_base = OTHER; note = 2'-O-methylguanosine-3'-phosphorothioate
  modified_base 3: mod_base = OTHER; note = 2'-O-methyluridine-3'-phosphate
  modified_base 4: mod_base = OTHER; note = 2'-O-methylguanosine-3'-phosphate
  modified_base 5: mod_base = OTHER; note = 2'-O-methylcytidine-3'-phosphate
  modified_base 6: mod_base = OTHER; note = 2'-O-methylcytidine-3'-phosphate
  modified_base 7: mod_base = OTHER; note = 2'-deoxy-2'-fluoroadenosine-3'-phosphate
  modified_base 8: mod_base = OTHER; note = 2'-O-methylguanosine-3'-phosphate
  modified_base 9: mod_base = OTHER; note = 2'-deoxy-2'-fluoroadenosine-3'-phosphate
  modified_base 10: mod_base = OTHER; note = 2'-deoxy-2'-fluoroadenosine-3'-phosphate
  modified_base 11: mod_base = OTHER; note = 2'-deoxy-2'-fluorouridine-3'-phosphate
  modified_base 12: mod_base = OTHER; note = 2'-O-methylguanosine-3'-phosphate
  modified_base 13: mod_base = OTHER; note = 2'-O-methyluridine-3'-phosphate
  modified_base 14: mod_base = OTHER; note = 2'-O-methylguanosine-3'-phosphate
  modified_base 15: mod_base = OTHER; note = 2'-O-methyladenosine-3'-phosphate
  modified_base 16: mod_base = OTHER; note = 2'-O-methyladenosine-3'-phosphate
  modified_base 17: mod_base = OTHER; note = 2'-O-methyladenosine-3'-phosphate
  modified_base 18: mod_base = OTHER; note = 2'-O-methylguanosine-3'-phosphate
  modified_base 19: mod_base = OTHER; note = 2'-O-methyluridine-3'-phosphate
  modified_base 20: mod_base = OTHER; note = 2'-O-methylcytidine-3'-phosphate
  modified_base 21: mod_base = OTHER; note = 2'-O-methyladenosine-3'-phosphate ((2S,4R)-1-[29-[[2-(acetylamino)-2-deoxy-beta-D-galactopyra nosyl]oxy]-14,14-bis[[3-[[3-[[5-[[2-(acetylamino)-2-deoxy-b eta-D-galactopyranosyl]oxy]-1-oxopentyl]amino]propyl]amino] -3-oxopropoxy]methyl]-1,12,19,25-tetraoxo-16-oxa-13,20,24-t riazanonacos-1-yl]-4-hydroxy-2-pyrrolidinyl)methyl ester
ggtgccagaatgtgaaagtca

SEQ ID NO: 2569 - RNA, 23 nt, synthetic construct
  source 1..23: mol_type = other RNA
  modified_base 1: mod_base = OTHER; note = 2'-O-methyluridine-3'-phosphorothioate
  modified_base 2: mod_base = OTHER; note = 2'-deoxy-2'-fluoroguanosine-3'-phosphorothioate
  modified_base 3: mod_base = OTHER; note = 2'-O-methyladenosine-3'-phosphate
  modified_base 4: mod_base = OTHER; note = 2'-O-methylcytidine-3'-phosphate
  modified_base 5: mod_base = OTHER; note = 2'-O-methyluridine-3'-phosphate
  modified_base 6: mod_base = OTHER; note = 2'-deoxy-2'-fluorouridine-3'-phosphate
  modified_base 7: mod_base = OTHER; note = 2'-O-methyluridine-3'-phosphate
  modified_base 8: mod_base = OTHER; note = 2'-deoxy-2'-fluorocytidine-3'-phosphate
  modified_base 9: mod_base = OTHER; note = 2'-deoxy-2'-fluoroadenosine-3'-phosphate
  modified_base 10: mod_base = OTHER; note = 2'-O-methylcytidine-3'-phosphate
  modified_base 11: mod_base = OTHER; note = 2'-O-methyladenosine-3'-phosphate
  modified_base 12: mod_base = OTHER; note = 2'-O-methyluridine-3'-phosphate
  modified_base 13: mod_base = OTHER; note = 2'-O-methyluridine-3'-phosphate
  modified_base 14: mod_base = OTHER; note = 2'-deoxy-2'-fluorocytidine-3'-phosphate
  modified_base 15: mod_base = OTHER; note = 2'-O-methyluridine-3'-phosphate
  modified_base 16: mod_base = OTHER; note = 2'-deoxy-2'-fluoroguanosine-3'-phosphate
  modified_base 17: mod_base = OTHER; note = 2'-O-methylguanosine-3'-phosphate
  modified_base 18: mod_base = OTHER; note = 2'-O-methylcytidine-3'-phosphate
  modified_base 19: mod_base = OTHER; note = 2'-O-methyladenosine-3'-phosphate
  modified_base 20: mod_base = OTHER; note = 2'-O-methylcytidine-3'-phosphate
  modified_base 21: mod_base = OTHER; note = 2'-O-methylcytidine-3'-phosphorothioate
  modified_base 22: mod_base = OTHER; note = 2'-O-methylcytidine-3'-phosphorothioate
  modified_base 23: mod_base = OTHER; note = 2'-O-methyladenosine
tgactttcacattctggcaccca

SEQ ID NO: 2570 - RNA, 21 nt, synthetic construct
  source 1..21: mol_type = other RNA
  modified_base 1: mod_base = OTHER; note = 2'-O-methyladenosine-3'-phosphorothioate
  modified_base 2: mod_base = OTHER; note = 2'-O-methylguanosine-3'-phosphorothioate
  modified_base 3: mod_base = OTHER; note = 2'-O-methyladenosine-3'-phosphate
  modified_base 4: mod_base = OTHER; note = 2'-O-methyluridine-3'-phosphate
  modified_base 5: mod_base = OTHER; note = 2'-O-methylguanosine-3'-phosphate
  modified_base 6: mod_base = OTHER; note = 2'-O-methyluridine-3'-phosphate
  modified_base 7: mod_base = OTHER; note = 2'-deoxy-2'-fluorocytidine-3'-phosphate
  modified_base 8: mod_base = OTHER; note = 2'-O-methylcytidine-3'-phosphate
  modified_base 9: mod_base = OTHER; note = 2'-deoxy-2'-fluorouridine-3'-phosphate
  modified_base 10: mod_base = OTHER; note = 2'-deoxy-2'-fluorocytidine-3'-phosphate
  modified_base 11: mod_base = OTHER; note = 2'-deoxy-2'-fluoroguanosine-3'-phosphate
  modified_base 12: mod_base = OTHER; note = 2'-O-methyladenosine-3'-phosphate
  modified_base 13: mod_base = OTHER; note = 2'-O-methylguanosine-3'-phosphate
  modified_base 14: mod_base = OTHER; note = 2'-O-methyladenosine-3'-phosphate
  modified_base 15: mod_base = OTHER; note = 2'-O-methyluridine-3'-phosphate
  modified_base 16: mod_base = OTHER; note = 2'-O-methyladenosine-3'-phosphate
  modified_base 17: mod_base = OTHER; note = 2'-O-methylcytidine-3'-phosphate
  modified_base 18: mod_base = OTHER; note = 2'-O-methyluridine-3'-phosphate
  modified_base 19: mod_base = OTHER; note = 2'-O-methyladenosine-3'-phosphate
  modified_base 20: mod_base = OTHER; note = 2'-O-methyladenosine-3'-phosphate
  modified_base 21: mod_base = OTHER; note = 2'-O-methyladenosine-3'-phosphate ((2S,4R)-1-[29-[[2-(acetylamino)-2-deoxy-beta-D-galactopyra nosyl]oxy]-14,14-bis[[3-[[3-[[5-[[2-(acetylamino)-2-deoxy-b eta-D-galactopyranosyl]oxy]-1-oxopentyl]amino]propyl]amino] -3-oxopropoxy]methyl]-1,12,19,25-tetraoxo-16-oxa-13,20,24-t riazanonacos-1-yl]-4-hydroxy-2-pyrrolidinyl)methyl ester
agatgtcctcgagatactaaa

SEQ ID NO: 2571 - RNA, 23 nt, synthetic construct
  source 1..23: mol_type = other RNA
  modified_base 1: mod_base = OTHER; note = 2'-O-methyluridine-3'-phosphorothioate
  modified_base 2: mod_base = OTHER; note = 2'-deoxy-2'-fluorouridine-3'-phosphorothioate
  modified_base 3: mod_base = OTHER; note = 2'-O-methyluridine-3'-phosphate
  modified_base 4: mod_base = OTHER; note = 2'-O-methyladenosine-3'-phosphate
  modified_base 5: mod_base = OTHER; note = 2'-O-methylguanosine-3'-phosphate
  modified_base 6: mod_base = OTHER; note = 2'-deoxy-2'-fluorouridine-3'-phosphate
  modified_base 7: mod_base = OTHER; note = 2'-O-methyladenosine-3'-phosphate
  modified_base 8: mod_base = OTHER; note = 2'-deoxy-2'-fluorouridine-3'-phosphate
  modified_base 9: mod_base = OTHER; note = 2'-deoxy-2'-fluorocytidine-3'-phosphate
  modified_base 10: mod_base = OTHER; note = 2'-O-methyluridine-3'-phosphate
  modified_base 11: mod_base = OTHER; note = 2'-O-methylcytidine-3'-phosphate
  modified_base 12: mod_base = OTHER; note = 2'-O-methylguanosine-3'-phosphate
  modified_base 13: mod_base = OTHER; note = 2'-O-methyladenosine-3'-phosphate
  modified_base 14: mod_base = OTHER; note = 2'-deoxy-2'-fluoroguanosine-3'-phosphate
  modified_base 15: mod_base = OTHER; note = 2'-O-methylguanosine-3'-phosphate
  modified_base 16: mod_base = OTHER; note = 2'-deoxy-2'-fluoroadenosine-3'-phosphate
  modified_base 17: mod_base = OTHER; note = 2'-O-methylcytidine-3'-phosphate
  modified_base 18: mod_base = OTHER; note = 2'-O-methyladenosine-3'-phosphate
  modified_base 19: mod_base = OTHER; note = 2'-O-methyluridine-3'-phosphate
  modified_base 20: mod_base = OTHER; note = 2'-O-methylcytidine-3'-phosphate
  modified_base 21: mod_base = OTHER; note = 2'-O-methyluridine-3'-phosphorothioate
  modified_base 22: mod_base = OTHER; note = 2'-O-methyluridine-3'-phosphorothioate
  modified_base 23: mod_base = OTHER; note = 2'-O-methylguanosine
tttagtatctcgaggacatcttg

SEQ ID NO: 2572 - RNA, 21 nt, synthetic construct
  source 1..21: mol_type = other RNA
  modified_base 1: mod_base = OTHER; note = 2'-O-methylguanosine-3'-phosphorothioate
  modified_base 2: mod_base = OTHER; note = 2'-O-methyladenosine-3'-phosphorothioate
  modified_base 3: mod_base = OTHER; note = 2'-O-methyluridine-3'-phosphate
  modified_base 4: mod_base = OTHER; note = 2'-O-methylguanosine-3'-phosphate
  modified_base 5: mod_base = OTHER; note = 2'-O-methyluridine-3'-phosphate
  modified_base 6: mod_base = OTHER; note = 2'-O-methylcytidine-3'-phosphate
  modified_base 7: mod_base = OTHER; note = 2'-deoxy-2'-fluorocytidine-3'-phosphate
  modified_base 8: mod_base = OTHER; note = 2'-O-methyluridine-3'-phosphate
  modified_base 9: mod_base = OTHER; note = 2'-deoxy-2'-fluorocytidine-3'-phosphate
  modified_base 10: mod_base = OTHER; note = 2'-deoxy-2'-fluoroguanosine-3'-phosphate
  modified_base 11: mod_base = OTHER; note = 2'-deoxy-2'-fluoroadenosine-3'-phosphate
  modified_base 12: mod_base = OTHER; note = 2'-O-methylguanosine-3'-phosphate
  modified_base 13: mod_base = OTHER; note = 2'-O-methyladenosine-3'-phosphate
  modified_base 14: mod_base = OTHER; note = 2'-O-methyluridine-3'-phosphate
  modified_base 15: mod_base = OTHER; note = 2'-O-methyladenosine-3'-phosphate
  modified_base 16: mod_base = OTHER; note = 2'-O-methylcytidine-3'-phosphate
  modified_base 17: mod_base = OTHER; note = 2'-O-methyluridine-3'-phosphate
  modified_base 18: mod_base = OTHER; note = 2'-O-methyladenosine-3'-phosphate
  modified_base 19: mod_base = OTHER; note = 2'-O-methyladenosine-3'-phosphate
  modified_base 20: mod_base = OTHER; note = 2'-O-methyladenosine-3'-phosphate
  modified_base 21: mod_base = OTHER; note = 2'-O-methylguanosine-3'-phosphate ((2S,4R)-1-[29-[[2-(acetylamino)-2-deoxy-beta-D-galactopyra nosyl]oxy]-14,14-bis[[3-[[3-[[5-[[2-(acetylamino)-2-deoxy-b eta-D-galactopyranosyl]oxy]-1-oxopentyl]amino]propyl]amino] -3-oxopropoxy]methyl]-1,12,19,25-tetraoxo-16-oxa-13,20,24-t riazanonacos-1-yl]-4-hydroxy-2-pyrrolidinyl)methyl ester
gatgtcctcgagatactaaag

SEQ ID NO: 2573 - RNA, 23 nt, synthetic construct
  source 1..23: mol_type = other RNA
  modified_base 1: mod_base = OTHER; note = 2'-O-methylcytidine-3'-phosphorothioate
  modified_base 2: mod_base = OTHER; note = 2'-deoxy-2'-fluorouridine-3'-phosphorothioate
  modified_base 3: mod_base = OTHER; note = 2'-O-methyluridine-3'-phosphate
  modified_base 4: mod_base = OTHER; note = 2'-O-methyluridine-3'-phosphate
  modified_base 5: mod_base = OTHER; note = 2'-O-methyladenosine-3'-phosphate
  modified_base 6: mod_base = OTHER; note = 2'-deoxy-2'-fluoroguanosine-3'-phosphate
  modified_base 7: mod_base = OTHER; note = 2'-O-methyluridine-3'-phosphate
  modified_base 8: mod_base = OTHER; note = 2'-deoxy-2'-fluoroadenosine-3'-phosphate
  modified_base 9: mod_base = OTHER; note = 2'-deoxy-2'-fluorouridine-3'-phosphate
  modified_base 10: mod_base = OTHER; note = 2'-O-methylcytidine-3'-phosphate
  modified_base 11: mod_base = OTHER; note = 2'-O-methyluridine-3'-phosphate
  modified_base 12: mod_base = OTHER; note = 2'-O-methylcytidine-3'-phosphate
  modified_base 13: mod_base = OTHER; note = 2'-O-methylguanosine-3'-phosphate
  modified_base 14: mod_base = OTHER; note = 2'-deoxy-2'-fluoroadenosine-3'-phosphate
  modified_base 15: mod_base = OTHER; note = 2'-O-methylguanosine-3'-phosphate
  modified_base 16: mod_base = OTHER; note = 2'-deoxy-2'-fluoroguanosine-3'-phosphate
  modified_base 17: mod_base = OTHER; note = 2'-O-methyladenosine-3'-phosphate
  modified_base 18: mod_base = OTHER; note = 2'-O-methylcytidine-3'-phosphate
  modified_base 19: mod_base = OTHER; note = 2'-O-methyladenosine-3'-phosphate
  modified_base 20: mod_base = OTHER; note = 2'-O-methyluridine-3'-phosphate
  modified_base 21: mod_base = OTHER; note = 2'-O-methylcytidine-3'-phosphorothioate
  modified_base 22: mod_base = OTHER; note = 2'-O-methyluridine-3'-phosphorothioate
  modified_base 23: mod_base = OTHER; note = 2'-O-methyluridine
ctttagtatctcgaggacatctt

SEQ ID NO: 2574 - RNA, 21 nt, synthetic construct
  source 1..21: mol_type = other RNA
  modified_base 1: mod_base = OTHER; note = 2'-O-methyluridine-3'-phosphorothioate
  modified_base 2: mod_base = OTHER; note = 2'-O-methyluridine-3'-phosphorothioate
  modified_base 3: mod_base = OTHER; note = 2'-O-methylcytidine-3'-phosphate
  modified_base 4: mod_base = OTHER; note = 2'-O-methyladenosine-3'-phosphate
  modified_base 5: mod_base = OTHER; note = 2'-O-methyladenosine-3'-phosphate
  modified_base 6: mod_base = OTHER; note = 2'-O-methylguanosine-3'-phosphate
  modified_base 7: mod_base = OTHER; note = 2'-deoxy-2'-fluoroadenosine-3'-phosphate
  modified_base 8: mod_base = OTHER; note = 2'-O-methyluridine-3'-phosphate
  modified_base 9: mod_base = OTHER; note = 2'-deoxy-2'-fluoroguanosine-3'-phosphate
  modified_base 10: mod_base = OTHER; note = 2'-deoxy-2'-fluorouridine-3'-phosphate
  modified_base 11: mod_base = OTHER; note = 2'-deoxy-2'-fluorocytidine-3'-phosphate
  modified_base 12: mod_base = OTHER; note = 2'-O-methylcytidine-3'-phosphate
  modified_base 13: mod_base = OTHER; note = 2'-O-methyluridine-3'-phosphate
  modified_base 14: mod_base = OTHER; note = 2'-O-methylcytidine-3'-phosphate
  modified_base 15: mod_base = OTHER; note = 2'-O-methylguanosine-3'-phosphate
  modified_base 16: mod_base = OTHER; note = 2'-O-methyladenosine-3'-phosphate
  modified_base 17: mod_base = OTHER; note = 2'-O-methylguanosine-3'-phosphate
  modified_base 18: mod_base = OTHER; note = 2'-O-methyladenosine-3'-phosphate
  modified_base 19: mod_base = OTHER; note = 2'-O-methyluridine-3'-phosphate
  modified_base 20: mod_base = OTHER; note = 2'-O-methyladenosine-3'-phosphate
  modified_base 21: mod_base = OTHER; note = 2'-O-methylcytidine-3'-phosphate ((2S,4R)-1-[29-[[2-(acetylamino)-2-deoxy-beta-D-galactopyra nosyl]oxy]-14,14-bis[[3-[[3-[[5-[[2-(acetylamino)-2-deoxy-b eta-D-galactopyranosyl]oxy]-1-oxopentyl]amino]propyl]amino] -3-oxopropoxy]methyl]-1,12,19,25-tetraoxo-16-oxa-13,20,24-t riazanonacos-1-yl]-4-hydroxy-2-pyrrolidinyl)methyl ester
ttcaagatgtcctcgagatac

SEQ ID NO: 2575 - RNA, 23 nt, synthetic construct
  source 1..23: mol_type = other RNA
  modified_base 1: mod_base = OTHER; note = 2'-O-methylguanosine-3'-phosphorothioate
  modified_base 2: mod_base = OTHER; note = 2'-deoxy-2'-fluorouridine-3'-phosphorothioate
  modified_base 3: mod_base = OTHER; note = 2'-O-methyladenosine-3'-phosphate
  modified_base 4: mod_base = OTHER; note = 2'-O-methyluridine-3'-phosphate
  modified_base 5: mod_base = OTHER; note = 2'-O-methylcytidine-3'-phosphate
  modified_base 6: mod_base = OTHER; note = 2'-deoxy-2'-fluorouridine-3'-phosphate
  modified_base 7: mod_base = OTHER; note = 2'-O-methylcytidine-3'-phosphate
  modified_base 8: mod_base = OTHER; note = 2'-deoxy-2'-fluoroguanosine-3'-phosphate
  modified_base 9: mod_base = OTHER; note = 2'-deoxy-2'-fluoroadenosine-3'-phosphate
  modified_base 10: mod_base = OTHER; note = 2'-O-methylguanosine-3'-phosphate
  modified_base 11: mod_base = OTHER; note = 2'-O-methylguanosine-3'-phosphate
  modified_base 12: mod_base = OTHER; note = 2'-O-methyladenosine-3'-phosphate
  modified_base 13: mod_base = OTHER; note = 2'-O-methylcytidine-3'-phosphate
  modified_base 14: mod_base = OTHER; note = 2'-deoxy-2'-fluoroadenosine-3'-phosphate
  modified_base 15: mod_base = OTHER; note = 2'-O-methyluridine-3'-phosphate
  modified_base 16: mod_base = OTHER; note = 2'-deoxy-2'-fluorocytidine-3'-phosphate
  modified_base 17: mod_base = OTHER; note = 2'-O-methyluridine-3'-phosphate
  modified_base 18: mod_base = OTHER; note = 2'-O-methyluridine-3'-phosphate
  modified_base 19: mod_base = OTHER; note = 2'-O-methylguanosine-3'-phosphate
  modified_base 20: mod_base = OTHER; note = 2'-O-methyladenosine-3'-phosphate
  modified_base 21: mod_base = OTHER; note = 2'-O-methyladenosine-3'-phosphorothioate
  modified_base 22: mod_base = OTHER; note = 2'-O-methylcytidine-3'-phosphorothioate
  modified_base 23: mod_base = OTHER; note = 2'-O-methyladenosine
gtatctcgaggacatcttgaaca

SEQ ID NO: 2576 - RNA, 21 nt, synthetic construct
  source 1..21: mol_type = other RNA
  modified_base 1: mod_base = OTHER; note = 2'-O-methylguanosine-3'-phosphorothioate
  modified_base 2: mod_base = OTHER; note = 2'-O-methyluridine-3'-phosphorothioate
  modified_base 3: mod_base = OTHER; note = 2'-O-methyluridine-3'-phosphate
  modified_base 4: mod_base = OTHER; note = 2'-O-methylcytidine-3'-phosphate
  modified_base 5: mod_base = OTHER; note = 2'-O-methyladenosine-3'-phosphate
  modified_base 6: mod_base = OTHER; note = 2'-O-methyladenosine-3'-phosphate
  modified_base 7: mod_base = OTHER; note = 2'-deoxy-2'-fluoroguanosine-3'-phosphate
  modified_base 8: mod_base = OTHER; note = 2'-O-methyladenosine-3'-phosphate
  modified_base 9: mod_base = OTHER; note = 2'-deoxy-2'-fluorouridine-3'-phosphate
  modified_base 10: mod_base = OTHER; note = 2'-deoxy-2'-fluoroguanosine-3'-phosphate
  modified_base 11: mod_base = OTHER; note = 2'-deoxy-2'-fluorouridine-3'-phosphate
  modified_base 12: mod_base = OTHER; note = 2'-O-methylcytidine-3'-phosphate
  modified_base 13: mod_base = OTHER; note = 2'-O-methylcytidine-3'-phosphate
  modified_base 14: mod_base = OTHER; note = 2'-O-methyluridine-3'-phosphate
  modified_base 15: mod_base = OTHER; note = 2'-O-methylcytidine-3'-phosphate
  modified_base 16: mod_base = OTHER; note = 2'-O-methylguanosine-3'-phosphate
  modified_base 17: mod_base = OTHER; note = 2'-O-methyladenosine-3'-phosphate
  modified_base 18: mod_base = OTHER; note = 2'-O-methylguanosine-3'-phosphate
  modified_base 19: mod_base = OTHER; note = 2'-O-methyladenosine-3'-phosphate
  modified_base 20: mod_base = OTHER; note = 2'-O-methyluridine-3'-phosphate
  modified_base 21: mod_base = OTHER; note = 2'-O-methyladenosine-3'-phosphate ((2S,4R)-1-[29-[[2-(acetylamino)-2-deoxy-beta-D-galactopyra nosyl]oxy]-14,14-bis[[3-[[3-[[5-[[2-(acetylamino)-2-deoxy-b eta-D-galactopyranosyl]oxy]-1-oxopentyl]amino]propyl]amino] -3-oxopropoxy]methyl]-1,12,19,25-tetraoxo-16-oxa-13,20,24-t riazanonacos-1-yl]-4-hydroxy-2-pyrrolidinyl)methyl ester
gttcaagatgtcctcgagata

SEQ ID NO: 2577 - RNA, 23 nt, synthetic construct
  source 1..23: mol_type = other RNA
  modified_base 1: mod_base = OTHER; note = 2'-O-methyluridine-3'-phosphorothioate
  modified_base 2: mod_base = OTHER; note = 2'-deoxy-2'-fluoroadenosine-3'-phosphorothioate
  modified_base 3: mod_base = OTHER; note = 2'-O-methyluridine-3'-phosphate
  modified_base 4: mod_base = OTHER; note = 2'-O-methylcytidine-3'-phosphate
  modified_base 5: mod_base = OTHER; note = 2'-O-methyluridine-3'-phosphate
  modified_base 6: mod_base = OTHER; note = 2'-deoxy-2'-fluorocytidine-3'-phosphate
  modified_base 7: mod_base = OTHER; note = 2'-O-methylguanosine-3'-phosphate
  modified_base 8: mod_base = OTHER; note = 2'-deoxy-2'-fluoroadenosine-3'-phosphate
  modified_base 9: mod_base = OTHER; note = 2'-deoxy-2'-fluoroguanosine-3'-phosphate
  modified_base 10: mod_base = OTHER; note = 2'-O-methylguanosine-3'-phosphate
  modified_base 11: mod_base = OTHER; note = 2'-O-methyladenosine-3'-phosphate
  modified_base 12: mod_base = OTHER; note = 2'-O-methylcytidine-3'-phosphate
  modified_base 13: mod_base = OTHER; note = 2'-O-methyladenosine-3'-phosphate
  modified_base 14: mod_base = OTHER; note = 2'-deoxy-2'-fluorouridine-3'-phosphate
  modified_base 15: mod_base = OTHER; note = 2'-O-methylcytidine-3'-phosphate
  modified_base 16: mod_base = OTHER; note = 2'-deoxy-2'-fluorouridine-3'-phosphate
  modified_base 17: mod_base = OTHER; note = 2'-O-methyluridine-3'-phosphate
  modified_base 18: mod_base = OTHER; note = 2'-O-methylguanosine-3'-phosphate
  modified_base 19: mod_base = OTHER; note = 2'-O-methyladenosine-3'-phosphate
  modified_base 20: mod_base = OTHER; note = 2'-O-methyladenosine-3'-phosphate
  modified_base 21: mod_base = OTHER; note = 2'-O-methylcytidine-3'-phosphorothioate
  modified_base 22: mod_base = OTHER; note = 2'-O-methyladenosine-3'-phosphorothioate
  modified_base 23: mod_base = OTHER; note = 2'-O-methylcytidine
tatctcgaggacatcttgaacac

SEQ ID NO: 2578 - RNA, 21 nt, synthetic construct
  source 1..21: mol_type = other RNA
  modified_base 1: mod_base = OTHER; note = 2'-O-methylguanosine-3'-phosphorothioate
  modified_base 2: mod_base = OTHER; note = 2'-O-methyluridine-3'-phosphorothioate
  modified_base 3: mod_base = OTHER; note = 2'-O-methylguanosine-3'-phosphate
  modified_base 4: mod_base = OTHER; note = 2'-O-methylguanosine-3'-phosphate
  modified_base 5: mod_base = OTHER; note = 2'-O-methyladenosine-3'-phosphate
  modified_base 6: mod_base = OTHER; note = 2'-O-methylcytidine-3'-phosphate
  modified_base 7: mod_base = OTHER; note = 2'-deoxy-2'-fluorouridine-3'-phosphate
  modified_base 8: mod_base = OTHER; note = 2'-O-methyluridine-3'-phosphate
  modified_base 9: mod_base = OTHER; note = 2'-deoxy-2'-fluoroguanosine-3'-phosphate
  modified_base 10: mod_base = OTHER; note = 2'-deoxy-2'-fluorocytidine-3'-phosphate
  modified_base 11: mod_base = OTHER; note = 2'-deoxy-2'-fluorouridine-3'-phosphate
  modified_base 12: mod_base = OTHER; note = 2'-O-methylguanosine-3'-phosphate
  modified_base 13: mod_base = OTHER; note = 2'-O-methylcytidine-3'-phosphate
  modified_base 14: mod_base = OTHER; note = 2'-O-methyladenosine-3'-phosphate
  modified_base 15: mod_base = OTHER; note = 2'-O-methyluridine-3'-phosphate
  modified_base 16: mod_base = OTHER; note = 2'-O-methyladenosine-3'-phosphate
  modified_base 17: mod_base = OTHER; note = 2'-O-methyluridine-3'-phosphate
  modified_base 18: mod_base = OTHER; note = 2'-O-methylguanosine-3'-phosphate
  modified_base 19: mod_base = OTHER; note = 2'-O-methyluridine-3'-phosphate
  modified_base 20: mod_base = OTHER; note = 2'-O-methylguanosine-3'-phosphate
  modified_base 21: mod_base = OTHER; note = 2'-O-methylguanosine-3'-phosphate ((2S,4R)-1-[29-[[2-(acetylamino)-2-deoxy-beta-D-galactopyra nosyl]oxy]-14,14-bis[[3-[[3-[[5-[[2-(acetylamino)-2-deoxy-b eta-D-galactopyranosyl]oxy]-1-oxopentyl]amino]propyl]amino] -3-oxopropoxy]methyl]-1,12,19,25-tetraoxo-16-oxa-13,20,24-t riazanonacos-1-yl]-4-hydroxy-2-pyrrolidinyl)methyl ester
gtggacttgctgcatatgtgg

SEQ ID NO: 2579 - RNA, 23 nt, synthetic construct
  source 1..23: mol_type = other RNA
  modified_base 1: mod_base = OTHER; note = 2'-O-methylcytidine-3'-phosphorothioate
  modified_base 2: mod_base = OTHER; note = 2'-deoxy-2'-fluorocytidine-3'-phosphorothioate
  modified_base 3: mod_base = OTHER; note = 2'-O-methyladenosine-3'-phosphate
  modified_base 4: mod_base = OTHER; note = 2'-O-methylcytidine-3'-phosphate
  modified_base 5: mod_base = OTHER; note = 2'-O-methyladenosine-3'-phosphate
  modified_base 6: mod_base = OTHER; note = 2'-deoxy-2'-fluorouridine-3'-phosphate
  modified_base 7: mod_base = OTHER; note = 2'-O-methyladenosine-3'-phosphate
  modified_base 8: mod_base = OTHER; note = 2'-deoxy-2'-fluorouridine-3'-phosphate
  modified_base 9: mod_base = OTHER; note = 2'-deoxy-2'-fluoroguanosine-3'-phosphate
  modified_base 10: mod_base = OTHER; note = 2'-O-methylcytidine-3'-phosphate
  modified_base 11: mod_base = OTHER; note = 2'-O-methyladenosine-3'-phosphate
  modified_base 12: mod_base = OTHER; note = 2'-O-methylguanosine-3'-phosphate
  modified_base 13: mod_base = OTHER; note = 2'-O-methylcytidine-3'-phosphate
  modified_base 14: mod_base = OTHER; note = 2'-deoxy-2'-fluoroadenosine-3'-phosphate
  modified_base 15: mod_base = OTHER; note = 2'-O-methyladenosine-3'-phosphate
  modified_base 16: mod_base = OTHER; note = 2'-deoxy-2'-fluoroguanosine-3'-phosphate
  modified_base 17: mod_base = OTHER; note = 2'-O-methyluridine-3'-phosphate
  modified_base 18: mod_base = OTHER; note = 2'-O-methylcytidine-3'-phosphate
  modified_base 19: mod_base = OTHER; note = 2'-O-methylcytidine-3'-phosphate
  modified_base 20: mod_base = OTHER; note = 2'-O-methyladenosine-3'-phosphate
  modified_base 21: mod_base = OTHER; note = 2'-O-methylcytidine-3'-phosphorothioate
  modified_base 22: mod_base = OTHER; note = 2'-O-methyluridine-3'-phosphorothioate
  modified_base 23: mod_base = OTHER; note = 2'-O-methylguanosine
ccacatatgcagcaagtccactg

SEQ ID NO: 2580 - RNA, 21 nt, synthetic construct
  source 1..21: mol_type = other RNA
  modified_base 1: mod_base = OTHER; note = 2'-O-methyluridine-3'-phosphorothioate
  modified_base 2: mod_base = OTHER; note = 2'-O-methylguanosine-3'-phosphorothioate
  modified_base 3: mod_base = OTHER; note = 2'-O-methylguanosine-3'-phosphate
  modified_base 4: mod_base = OTHER; note = 2'-O-methyladenosine-3'-phosphate
  modified_base 5: mod_base = OTHER; note = 2'-O-methylcytidine-3'-phosphate
  modified_base 6: mod_base = OTHER; note = 2'-O-methyluridine-3'-phosphate
  modified_base 7: mod_base = OTHER; note = 2'-deoxy-2'-fluorouridine-3'-phosphate
  modified_base 8: mod_base = OTHER; note = 2'-O-methylguanosine-3'-phosphate
  modified_base 9: mod_base = OTHER; note = 2'-deoxy-2'-fluorocytidine-3'-phosphate
  modified_base 10: mod_base = OTHER; note = 2'-deoxy-2'-fluorouridine-3'-phosphate
  modified_base 11: mod_base = OTHER; note = 2'-deoxy-2'-fluoroguanosine-3'-phosphate
  modified_base 12: mod_base = OTHER; note = 2'-O-methylcytidine-3'-phosphate
  modified_base 13: mod_base = OTHER; note = 2'-O-methyladenosine-3'-phosphate
  modified_base 14: mod_base = OTHER; note = 2'-O-methyluridine-3'-phosphate
  modified_base 15: mod_base = OTHER; note = 2'-O-methyladenosine-3'-phosphate
  modified_base 16: mod_base = OTHER; note = 2'-O-methyluridine-3'-phosphate
  modified_base 17: mod_base = OTHER; note = 2'-O-methylguanosine-3'-phosphate
  modified_base 18: mod_base = OTHER; note = 2'-O-methyluridine-3'-phosphate
  modified_base 19: mod_base = OTHER; note = 2'-O-methylguanosine-3'-phosphate
  modified_base 20: mod_base = OTHER; note = 2'-O-methylguanosine-3'-phosphate
  modified_base 21: mod_base = OTHER; note = 2'-O-methylcytidine-3'-phosphate ((2S,4R)-1-[29-[[2-(acetylamino)-2-deoxy-beta-D-galactopyra nosyl]oxy]-14,14-bis[[3-[[3-[[5-[[2-(acetylamino)-2-deoxy-b eta-D-galactopyranosyl]oxy]-1-oxopentyl]amino]propyl]amino] -3-oxopropoxy]methyl]-1,12,19,25-tetraoxo-16-oxa-13,20,24-t riazanonacos-1-yl]-4-hydroxy-2-pyrrolidinyl)methyl ester
tggacttgctgcatatgtggc

SEQ ID NO: 2581 - RNA, 23 nt, synthetic construct
  source 1..23: mol_type = other RNA
  modified_base 1: mod_base = OTHER; note = 2'-O-methylguanosine-3'-phosphorothioate
  modified_base 2: mod_base = OTHER; note = 2'-deoxy-2'-fluorocytidine-3'-phosphorothioate
  modified_base 3: mod_base = OTHER; note = 2'-O-methylcytidine-3'-phosphate
  modified_base 4: mod_base = OTHER; note = 2'-O-methyladenosine-3'-phosphate
  modified_base 5: mod_base = OTHER; note = 2'-O-methylcytidine-3'-phosphate
  modified_base 6: mod_base = OTHER; note = 2'-deoxy-2'-fluoroadenosine-3'-phosphate
  modified_base 7: mod_base = OTHER; note = 2'-O-methyluridine-3'-phosphate
  modified_base 8: mod_base = OTHER; note = 2'-deoxy-2'-fluoroadenosine-3'-phosphate
  modified_base 9: mod_base = OTHER; note = 2'-deoxy-2'-fluorouridine-3'-phosphate
  modified_base 10: mod_base = OTHER; note = 2'-O-methylguanosine-3'-phosphate
  modified_base 11: mod_base = OTHER; note = 2'-O-methylcytidine-3'-phosphate
  modified_base 12: mod_base = OTHER; note = 2'-O-methyladenosine-3'-phosphate
  modified_base 13: mod_base = OTHER; note = 2'-O-methylguanosine-3'-phosphate
  modified_base 14: mod_base = OTHER; note = 2'-deoxy-2'-fluorocytidine-3'-phosphate
  modified_base 15: mod_base = OTHER; note = 2'-O-methyladenosine-3'-phosphate
  modified_base 16: mod_base = OTHER; note = 2'-deoxy-2'-fluoroadenosine-3'-phosphate
  modified_base 17: mod_base = OTHER; note = 2'-O-methylguanosine-3'-phosphate
  modified_base 18: mod_base = OTHER; note = 2'-O-methyluridine-3'-phosphate
  modified_base 19: mod_base = OTHER; note = 2'-O-methylcytidine-3'-phosphate
  modified_base 20: mod_base = OTHER; note = 2'-O-methylcytidine-3'-phosphate
  modified_base 21: mod_base = OTHER; note = 2'-O-methyladenosine-3'-phosphorothioate
  modified_base 22: mod_base = OTHER; note = 2'-O-methylcytidine-3'-phosphorothioate
  modified_base 23: mod_base = OTHER; note = 2'-O-methyluridine
gccacatatgcagcaagtccact

SEQ ID NO: 2582 - RNA, 21 nt, synthetic construct
  source 1..21: mol_type = other RNA
  modified_base 1: mod_base = OTHER; note = 2'-O-methylguanosine-3'-phosphorothioate
  modified_base 2: mod_base = OTHER; note = 2'-O-methyladenosine-3'-phosphorothioate
  modified_base 3: mod_base = OTHER; note = 2'-O-methylcytidine-3'-phosphate
  modified_base 4: mod_base = OTHER; note = 2'-O-methyladenosine-3'-phosphate
  modified_base 5: mod_base = OTHER; note = 2'-O-methylguanosine-3'-phosphate
  modified_base 6: mod_base = OTHER; note = 2'-O-methyluridine-3'-phosphate
  modified_base 7: mod_base = OTHER; note = 2'-deoxy-2'-fluoroguanosine-3'-phosphate
  modified_base 8: mod_base = OTHER; note = 2'-O-methylguanosine-3'-phosphate
  modified_base 9: mod_base = OTHER; note = 2'-deoxy-2'-fluoroadenosine-3'-phosphate
  modified_base 10: mod_base = OTHER; note = 2'-deoxy-2'-fluorocytidine-3'-phosphate
  modified_base 11: mod_base = OTHER; note = 2'-deoxy-2'-fluorouridine-3'-phosphate
  modified_base 12: mod_base = OTHER; note = 2'-O-methyluridine-3'-phosphate
  modified_base 13: mod_base = OTHER; note = 2'-O-methylguanosine-3'-phosphate
  modified_base 14: mod_base = OTHER; note = 2'-O-methylcytidine-3'-phosphate
  modified_base 15: mod_base = OTHER; note = 2'-O-methyluridine-3'-phosphate
  modified_base 16: mod_base = OTHER; note = 2'-O-methylguanosine-3'-phosphate
  modified_base 17: mod_base = OTHER; note = 2'-O-methylcytidine-3'-phosphate
  modified_base 18: mod_base = OTHER; note = 2'-O-methyladenosine-3'-phosphate
  modified_base 19: mod_base = OTHER; note = 2'-O-methyluridine-3'-phosphate
  modified_base 20: mod_base = OTHER; note = 2'-O-methyladenosine-3'-phosphate
  modified_base 21: mod_base = OTHER; note = 2'-O-methyluridine-3'-phosphate ((2S,4R)-1-[29-[[2-(acetylamino)-2-deoxy-beta-D-galactopyra nosyl]oxy]-14,14-bis[[3-[[3-[[5-[[2-(acetylamino)-2-deoxy-b eta-D-galactopyranosyl]oxy]-1-oxopentyl]amino]propyl]amino] -3-oxopropoxy]methyl]-1,12,19,25-tetraoxo-16-oxa-13,20,24-t riazanonacos-1-yl]-4-hydroxy-2-pyrrolidinyl)methyl ester
gacagtggacttgctgcatat

SEQ ID NO: 2583 - RNA, 23 nt, synthetic construct
  source 1..23: mol_type = other RNA
  modified_base 1: mod_base = OTHER; note = 2'-O-methyladenosine-3'-phosphorothioate
  modified_base 2: mod_base = OTHER; note = 2'-deoxy-2'-fluorouridine-3'-phosphorothioate
  modified_base 3: mod_base = OTHER; note = 2'-O-methyladenosine-3'-phosphate
  modified_base 4: mod_base = OTHER; note = 2'-O-methyluridine-3'-phosphate
  modified_base 5: mod_base = OTHER; note = 2'-O-methylguanosine-3'-phosphate
  modified_base 6: mod_base = OTHER; note = 2'-deoxy-2'-fluorocytidine-3'-phosphate
  modified_base 7: mod_base = OTHER; note = 2'-O-methyladenosine-3'-phosphate
  modified_base 8: mod_base = OTHER; note = 2'-deoxy-2'-fluoroguanosine-3'-phosphate
  modified_base 9: mod_base = OTHER; note = 2'-deoxy-2'-fluorocytidine-3'-phosphate
  modified_base 10: mod_base = OTHER; note = 2'-O-methyladenosine-3'-phosphate
  modified_base 11: mod_base = OTHER; note = 2'-O-methyladenosine-3'-phosphate
  modified_base 12: mod_base = OTHER; note = 2'-O-methylguanosine-3'-phosphate
  modified_base 13: mod_base = OTHER; note = 2'-O-methyluridine-3'-phosphate
  modified_base 14: mod_base = OTHER; note = 2'-deoxy-2'-fluorocytidine-3'-phosphate
  modified_base 15: mod_base = OTHER; note = 2'-O-methylcytidine-3'-phosphate
  modified_base 16: mod_base = OTHER; note = 2'-deoxy-2'-fluoroadenosine-3'-phosphate
  modified_base 17: mod_base = OTHER; note = 2'-O-methylcytidine-3'-phosphate
  modified_base 18: mod_base = OTHER; note = 2'-O-methyluridine-3'-phosphate
  modified_base 19: mod_base = OTHER; note = 2'-O-methylguanosine-3'-phosphate
  modified_base 20: mod_base = OTHER; note = 2'-O-methyluridine-3'-phosphate
  modified_base 21: mod_base = OTHER; note = 2'-O-methylcytidine-3'-phosphorothioate
  modified_base 22: mod_base = OTHER; note = 2'-O-methylguanosine-3'-phosphorothioate
  modified_base 23: mod_base = OTHER; note = 2'-O-methyluridine
atatgcagcaagtccactgtcgt

SEQ ID NO: 2584 - RNA, 21 nt, synthetic construct
  source 1..21: mol_type = other RNA
  modified_base 1: mod_base = OTHER; note = 2'-O-methylcytidine-3'-phosphorothioate
  modified_base 2: mod_base = OTHER; note = 2'-O-methylguanosine-3'-phosphorothioate
  modified_base 3: mod_base = OTHER; note = 2'-O-methyladenosine-3'-phosphate
  modified_base 4: mod_base = OTHER; note = 2'-O-methylcytidine-3'-phosphate
  modified_base 5: mod_base = OTHER; note = 2'-O-methyladenosine-3'-phosphate
  modified_base 6: mod_base = OTHER; note = 2'-O-methylguanosine-3'-phosphate
  modified_base 7: mod_base = OTHER; note = 2'-deoxy-2'-fluorouridine-3'-phosphate
  modified_base 8: mod_base = OTHER; note = 2'-O-methylguanosine-3'-phosphate
  modified_base 9: mod_base = OTHER; note = 2'-deoxy-2'-fluoroguanosine-3'-phosphate
  modified_base 10: mod_base = OTHER; note = 2'-deoxy-2'-fluoroadenosine-3'-phosphate
  modified_base 11: mod_base = OTHER; note = 2'-deoxy-2'-fluorocytidine-3'-phosphate
  modified_base 12: mod_base = OTHER; note = 2'-O-methyluridine-3'-phosphate
  modified_base 13: mod_base = OTHER; note = 2'-O-methyluridine-3'-phosphate
  modified_base 14: mod_base = OTHER; note = 2'-O-methylguanosine-3'-phosphate
  modified_base 15: mod_base = OTHER; note = 2'-O-methylcytidine-3'-phosphate
  modified_base 16: mod_base = OTHER; note = 2'-O-methyluridine-3'-phosphate
  modified_base 17: mod_base = OTHER; note = 2'-O-methylguanosine-3'-phosphate
  modified_base 18: mod_base = OTHER; note = 2'-O-methylcytidine-3'-phosphate
  modified_base 19: mod_base = OTHER; note = 2'-O-methyladenosine-3'-phosphate
  modified_base 20: mod_base = OTHER; note = 2'-O-methyluridine-3'-phosphate
  modified_base 21: mod_base = OTHER; note = 2'-O-methyladenosine-3'-phosphate ((2S,4R)-1-[29-[[2-(acetylamino)-2-deoxy-beta-D-galactopyra nosyl]oxy]-14,14-bis[[3-[[3-[[5-[[2-(acetylamino)-2-deoxy-b eta-D-galactopyranosyl]oxy]-1-oxopentyl]amino]propyl]amino] -3-oxopropoxy]methyl]-1,12,19,25-tetraoxo-16-oxa-13,20,24-t riazanonacos-1-yl]-4-hydroxy-2-pyrrolidinyl)methyl ester
cgacagtggacttgctgcata

SEQ ID NO: 2585 - RNA, 23 nt, synthetic construct
  source 1..23: mol_type = other RNA
  modified_base 1: mod_base = OTHER; note = 2'-O-methyluridine-3'-phosphorothioate
  modified_base 2: mod_base = OTHER; note = 2'-deoxy-2'-fluoroadenosine-3'-phosphorothioate
  modified_base 3: mod_base = OTHER; note = 2'-O-methyluridine-3'-phosphate
  modified_base 4: mod_base = OTHER; note = 2'-O-methylguanosine-3'-phosphate
  modified_base 5: mod_base = OTHER; note = 2'-O-methylcytidine-3'-phosphate
  modified_base 6: mod_base = OTHER; note = 2'-deoxy-2'-fluoroadenosine-3'-phosphate
  modified_base 7: mod_base = OTHER; note = 2'-O-methylguanosine-3'-phosphate
  modified_base 8: mod_base = OTHER; note = 2'-deoxy-2'-fluorocytidine-3'-phosphate
  modified_base 9: mod_base = OTHER; note = 2'-deoxy-2'-fluoroadenosine-3'-phosphate
  modified_base 10: mod_base = OTHER; note = 2'-O-methyladenosine-3'-phosphate
  modified_base 11: mod_base = OTHER; note = 2'-O-methylguanosine-3'-phosphate
  modified_base 12: mod_base = OTHER; note = 2'-O-methyluridine-3'-phosphate
  modified_base 13: mod_base = OTHER; note = 2'-O-methylcytidine-3'-phosphate
  modified_base 14: mod_base = OTHER; note = 2'-deoxy-2'-fluorocytidine-3'-phosphate
  modified_base 15: mod_base = OTHER; note = 2'-O-methyladenosine-3'-phosphate
  modified_base 16: mod_base = OTHER; note = 2'-deoxy-2'-fluorocytidine-3'-phosphate
  modified_base 17: mod_base = OTHER; note = 2'-O-methyluridine-3'-phosphate
  modified_base 18: mod_base = OTHER; note = 2'-O-methylguanosine-3'-phosphate
  modified_base 19: mod_base = OTHER; note = 2'-O-methyluridine-3'-phosphate
  modified_base 20: mod_base = OTHER; note = 2'-O-methylcytidine-3'-phosphate
  modified_base 21: mod_base = OTHER; note = 2'-O-methylguanosine-3'-phosphorothioate
  modified_base 22: mod_base = OTHER; note = 2'-O-methyluridine-3'-phosphorothioate
  modified_base 23: mod_base = OTHER; note = 2'-O-methylcytidine
tatgcagcaagtccactgtcgtc

SEQ ID NO: 2586 - RNA, 21 nt, synthetic construct
  source 1..21: mol_type = other RNA
  modified_base 1: mod_base = OTHER; note = 2'-O-methyladenosine-3'-phosphorothioate
  modified_base 2: mod_base = OTHER; note = 2'-O-methyladenosine-3'-phosphorothioate
  modified_base 3: mod_base = OTHER; note = 2'-O-methylcytidine-3'-phosphate
  modified_base 4: mod_base = OTHER; note = 2'-O-methylcytidine-3'-phosphate
  modified_base 5: mod_base = OTHER; note = 2'-O-methyladenosine-3'-phosphate
  modified_base 6: mod_base = OTHER; note = 2'-O-methylguanosine-3'-phosphate
  modified_base 7: mod_base = OTHER; note = 2'-deoxy-2'-fluorouridine-3'-phosphate
  modified_base 8: mod_base = OTHER; note = 2'-O-methyladenosine-3'-phosphate
  modified_base 9: mod_base = OTHER; note = 2'-deoxy-2'-fluorocytidine-3'-phosphate
  modified_base 10: mod_base = OTHER; note = 2'-deoxy-2'-fluorouridine-3'-phosphate
  modified_base 11: mod_base = OTHER; note = 2'-deoxy-2'-fluorouridine-3'-phosphate
  modified_base 12: mod_base = OTHER; note = 2'-O-methyluridine-3'-phosphate
  modified_base 13: mod_base = OTHER; note = 2'-O-methyladenosine-3'-phosphate
  modified_base 14: mod_base = OTHER; note = 2'-O-methyluridine-3'-phosphate
  modified_base 15: mod_base = OTHER; note = 2'-O-methylcytidine-3'-phosphate
  modified_base 16: mod_base = OTHER; note = 2'-O-methyladenosine-3'-phosphate
  modified_base 17: mod_base = OTHER; note = 2'-O-methyluridine-3'-phosphate
  modified_base 18: mod_base = OTHER; note = 2'-O-methyluridine-3'-phosphate
  modified_base 19: mod_base = OTHER; note = 2'-O-methyluridine-3'-phosphate
  modified_base 20: mod_base = OTHER; note = 2'-O-methyluridine-3'-phosphate
  modified_base 21: mod_base = OTHER; note = 2'-O-methylcytidine-3'-phosphate ((2S,4R)-1-[29-[[2-(acetylamino)-2-deoxy-beta-D-galactopyra nosyl]oxy]-14,14-bis[[3-[[3-[[5-[[2-(acetylamino)-2-deoxy-b eta-D-galactopyranosyl]oxy]-1-oxopentyl]amino]propyl]amino] -3-oxopropoxy]methyl]-1,12,19,25-tetraoxo-16-oxa-13,20,24-t riazanonacos-1-yl]-4-hydroxy-2-pyrrolidinyl)methyl ester
aaccagtactttatcattttc

SEQ ID NO: 2587 - RNA, 23 nt, synthetic construct
  source 1..23: mol_type = other RNA
  modified_base 1: mod_base = OTHER; note = 2'-O-methylguanosine-3'-phosphorothioate
  modified_base 2: mod_base = OTHER; note = 2'-deoxy-2'-fluoroadenosine-3'-phosphorothioate
  modified_base 3: mod_base = OTHER; note = 2'-O-methyladenosine-3'-phosphate
  modified_base 4: mod_base = OTHER; note = 2'-O-methyladenosine-3'-phosphate
  modified_base 5: mod_base = OTHER; note = 2'-O-methyladenosine-3'-phosphate
  modified_base 6: mod_base = OTHER; note = 2'-deoxy-2'-fluorouridine-3'-phosphate
  modified_base 7: mod_base = OTHER; note = 2'-O-methylguanosine-3'-phosphate
  modified_base 8: mod_base = OTHER; note = 2'-deoxy-2'-fluoroadenosine-3'-phosphate
  modified_base 9: mod_base = OTHER; note = 2'-deoxy-2'-fluorouridine-3'-phosphate
  modified_base 10: mod_base = OTHER; note = 2'-O-methyladenosine-3'-phosphate
  modified_base 11: mod_base = OTHER; note = 2'-O-methyladenosine-3'-phosphate
  modified_base 12: mod_base = OTHER; note = 2'-O-methyladenosine-3'-phosphate
  modified_base 13: mod_base = OTHER; note = 2'-O-methylguanosine-3'-phosphate
  modified_base 14: mod_base = OTHER; note = 2'-deoxy-2'-fluorouridine-3'-phosphate
  modified_base 15: mod_base = OTHER; note = 2'-O-methyladenosine-3'-phosphate
  modified_base 16: mod_base = OTHER; note = 2'-deoxy-2'-fluorocytidine-3'-phosphate
  modified_base 17: mod_base = OTHER; note = 2'-O-methyluridine-3'-phosphate
  modified_base 18: mod_base = OTHER; note = 2'-O-methylguanosine-3'-phosphate
  modified_base 19: mod_base = OTHER; note = 2'-O-methylguanosine-3'-phosphate
  modified_base 20: mod_base = OTHER; note = 2'-O-methyluridine-3'-phosphate
  modified_base 21: mod_base = OTHER; note = 2'-O-methyluridine-3'-phosphorothioate
  modified_base 22: mod_base = OTHER; note = 2'-O-methyluridine-3'-phosphorothioate
  modified_base 23: mod_base = OTHER; note = 2'-O-methylcytidine
gaaaatgataaagtactggtttc

SEQ ID NO: 2588 - RNA, 21 nt, synthetic construct
  source 1..21: mol_type = other RNA
  modified_base 1: mod_base = OTHER; note = 2'-O-methyladenosine-3'-phosphorothioate
  modified_base 2: mod_base = OTHER; note = 2'-O-methylcytidine-3'-phosphorothioate
  modified_base 3: mod_base = OTHER; note = 2'-O-methylcytidine-3'-phosphate
  modified_base 4: mod_base = OTHER; note = 2'-O-methyladenosine-3'-phosphate
  modified_base 5: mod_base = OTHER; note = 2'-O-methylguanosine-3'-phosphate
  modified_base 6: mod_base = OTHER; note = 2'-O-methyluridine-3'-phosphate
  modified_base 7: mod_base = OTHER; note = 2'-deoxy-2'-fluoroadenosine-3'-phosphate
  modified_base 8: mod_base = OTHER; note = 2'-O-methylcytidine-3'-phosphate
  modified_base 9: mod_base = OTHER; note = 2'-deoxy-2'-fluorouridine-3'-phosphate
  modified_base 10: mod_base = OTHER; note = 2'-deoxy-2'-fluorouridine-3'-phosphate
  modified_base 11: mod_base = OTHER; note = 2'-deoxy-2'-fluorouridine-3'-phosphate
  modified_base 12: mod_base = OTHER; note = 2'-O-methyladenosine-3'-phosphate
  modified_base 13: mod_base = OTHER; note = 2'-O-methyluridine-3'-phosphate
  modified_base 14: mod_base = OTHER; note = 2'-O-methylcytidine-3'-phosphate
  modified_base 15: mod_base = OTHER; note = 2'-O-methyladenosine-3'-phosphate
  modified_base 16: mod_base = OTHER; note = 2'-O-methyluridine-3'-phosphate
  modified_base 17: mod_base = OTHER; note = 2'-O-methyluridine-3'-phosphate
  modified_base 18: mod_base = OTHER; note = 2'-O-methyluridine-3'-phosphate
  modified_base 19: mod_base = OTHER; note = 2'-O-methyluridine-3'-phosphate
  modified_base 20: mod_base = OTHER; note = 2'-O-methylcytidine-3'-phosphate
  modified_base 21: mod_base = OTHER; note = 2'-O-methyluridine-3'-phosphate ((2S,4R)-1-[29-[[2-(acetylamino)-2-deoxy-beta-D-galactopyra nosyl]oxy]-14,14-bis[[3-[[3-[[5-[[2-(acetylamino)-2-deoxy-b eta-D-galactopyranosyl]oxy]-1-oxopentyl]amino]propyl]amino] -3-oxopropoxy]methyl]-1,12,19,25-tetraoxo-16-oxa-13,20,24-t riazanonacos-1-yl]-4-hydroxy-2-pyrrolidinyl)methyl ester
accagtactttatcattttct

SEQ ID NO: 2589 - RNA, 23 nt, synthetic construct
  source 1..23: mol_type = other RNA
  modified_base 1: mod_base = OTHER; note = 2'-O-methyladenosine-3'-phosphorothioate
  modified_base 2: mod_base = OTHER; note = 2'-deoxy-2'-fluoroguanosine-3'-phosphorothioate
  modified_base 3: mod_base = OTHER; note = 2'-O-methyladenosine-3'-phosphate
  modified_base 4: mod_base = OTHER; note = 2'-O-methyladenosine-3'-phosphate
  modified_base 5: mod_base = OTHER; note = 2'-O-methyladenosine-3'-phosphate
  modified_base 6: mod_base = OTHER; note = 2'-deoxy-2'-fluoroadenosine-3'-phosphate
  modified_base 7: mod_base = OTHER; note = 2'-O-methyluridine-3'-phosphate
  modified_base 8: mod_base = OTHER; note = 2'-deoxy-2'-fluoroguanosine-3'-phosphate
  modified_base 9: mod_base = OTHER; note = 2'-deoxy-2'-fluoroadenosine-3'-phosphate
  modified_base 10: mod_base = OTHER; note = 2'-O-methyluridine-3'-phosphate
  modified_base 11: mod_base = OTHER; note = 2'-O-methyladenosine-3'-phosphate
  modified_base 12: mod_base = OTHER; note = 2'-O-methyladenosine-3'-phosphate
  modified_base 13: mod_base = OTHER; note = 2'-O-methyladenosine-3'-phosphate
  modified_base 14: mod_base = OTHER; note = 2'-deoxy-2'-fluoroguanosine-3'-phosphate
  modified_base 15: mod_base = OTHER; note = 2'-O-methyluridine-3'-phosphate
  modified_base 16: mod_base = OTHER; note = 2'-deoxy-2'-fluoroadenosine-3'-phosphate
  modified_base 17: mod_base = OTHER; note = 2'-O-methylcytidine-3'-phosphate
  modified_base 18: mod_base = OTHER; note = 2'-O-methyluridine-3'-phosphate
  modified_base 19: mod_base = OTHER; note = 2'-O-methylguanosine-3'-phosphate
  modified_base 20: mod_base = OTHER; note = 2'-O-methylguanosine-3'-phosphate
  modified_base 21: mod_base = OTHER; note = 2'-O-methyluridine-3'-phosphorothioate
  modified_base 22: mod_base = OTHER; note = 2'-O-methyluridine-3'-phosphorothioate
  modified_base 23: mod_base = OTHER; note = 2'-O-methyluridine
agaaaatgataaagtactggttt

SEQ ID NO: 2590 - RNA, 21 nt, synthetic construct
  source 1..21: mol_type = other RNA
  modified_base 1: mod_base = OTHER; note = 2'-O-methyluridine-3'-phosphorothioate
  modified_base 2: mod_base = OTHER; note = 2'-O-methyluridine-3'-phosphorothioate
  modified_base 3: mod_base = OTHER; note = 2'-O-methylguanosine-3'-phosphate
  modified_base 4: mod_base = OTHER; note = 2'-O-methyladenosine-3'-phosphate
  modified_base 5: mod_base = OTHER; note = 2'-O-methyladenosine-3'-phosphate
  modified_base 6: mod_base = OTHER; note = 2'-O-methyladenosine-3'-phosphate
  modified_base 7: mod_base = OTHER; note = 2'-deoxy-2'-fluorocytidine-3'-phosphate
  modified_base 8: mod_base = OTHER; note = 2'-O-methylcytidine-3'-phosphate
  modified_base 9: mod_base = OTHER; note = 2'-deoxy-2'-fluoroadenosine-3'-phosphate
  modified_base 10: mod_base = OTHER; note = 2'-deoxy-2'-fluoroguanosine-3'-phosphate
  modified_base 11: mod_base = OTHER; note = 2'-deoxy-2'-fluorouridine-3'-phosphate
  modified_base 12: mod_base = OTHER; note = 2'-O-methyladenosine-3'-phosphate
  modified_base 13: mod_base = OTHER; note = 2'-O-methylcytidine-3'-phosphate
  modified_base 14: mod_base = OTHER; note = 2'-O-methyluridine-3'-phosphate
  modified_base 15: mod_base = OTHER; note = 2'-O-methyluridine-3'-phosphate
  modified_base 16: mod_base = OTHER; note = 2'-O-methyluridine-3'-phosphate
  modified_base 17: mod_base = OTHER; note = 2'-O-methyladenosine-3'-phosphate
  modified_base 18: mod_base = OTHER; note = 2'-O-methyluridine-3'-phosphate
  modified_base 19: mod_base = OTHER; note = 2'-O-methylcytidine-3'-phosphate
  modified_base 20: mod_base = OTHER; note = 2'-O-methyladenosine-3'-phosphate
  modified_base 21: mod_base = OTHER; note = 2'-O-methyluridine-3'-phosphate ((2S,4R)-1-[29-[[2-(acetylamino)-2-deoxy-beta-D-galactopyra nosyl]oxy]-14,14-bis[[3-[[3-[[5-[[2-(acetylamino)-2-deoxy-b eta-D-galactopyranosyl]oxy]-1-oxopentyl]amino]propyl]amino] -3-oxopropoxy]methyl]-1,12,19,25-tetraoxo-16-oxa-13,20,24-t riazanonacos-1-yl]-4-hydroxy-2-pyrrolidinyl)methyl ester
ttgaaaccagtactttatcat

SEQ ID NO: 2591 - RNA, 23 nt, synthetic construct
  source 1..23: mol_type = other RNA
  modified_base 1: mod_base = OTHER; note = 2'-O-methyladenosine-3'-phosphorothioate
  modified_base 2: mod_base = OTHER; note = 2'-deoxy-2'-fluorouridine-3'-phosphorothioate
  modified_base 3: mod_base = OTHER; note = 2'-O-methylguanosine-3'-phosphate
  modified_base 4: mod_base = OTHER; note = 2'-O-methyladenosine-3'-phosphate
  modified_base 5: mod_base = OTHER; note = 2'-O-methyluridine-3'-phosphate
  modified_base 6: mod_base = OTHER; note = 2'-deoxy-2'-fluoroadenosine-3'-phosphate
  modified_base 7: mod_base = OTHER; note = 2'-O-methyladenosine-3'-phosphate
  modified_base 8: mod_base = OTHER; note = 2'-deoxy-2'-fluoroadenosine-3'-phosphate
  modified_base 9: mod_base = OTHER; note = 2'-deoxy-2'-fluoroguanosine-3'-phosphate
  modified_base 10: mod_base = OTHER; note = 2'-O-methyluridine-3'-phosphate
  modified_base 11: mod_base = OTHER; note = 2'-O-methyladenosine-3'-phosphate
  modified_base 12: mod_base = OTHER; note = 2'-O-methylcytidine-3'-phosphate
  modified_base 13: mod_base = OTHER; note = 2'-O-methyluridine-3'-phosphate
  modified_base 14: mod_base = OTHER; note = 2'-deoxy-2'-fluoroguanosine-3'-phosphate
  modified_base 15: mod_base = OTHER; note = 2'-O-methylguanosine-3'-phosphate
  modified_base 16: mod_base = OTHER; note = 2'-deoxy-2'-fluorouridine-3'-phosphate
  modified_base 17: mod_base = OTHER; note = 2'-O-methyluridine-3'-phosphate
  modified_base 18: mod_base = OTHER; note = 2'-O-methyluridine-3'-phosphate
  modified_base 19: mod_base = OTHER; note = 2'-O-methylcytidine-3'-phosphate
  modified_base 20: mod_base = OTHER; note = 2'-O-methyladenosine-3'-phosphate
  modified_base 21: mod_base = OTHER; note = 2'-O-methyladenosine-3'-phosphorothioate
  modified_base 22: mod_base = OTHER; note = 2'-O-methyladenosine-3'-phosphorothioate
  modified_base 23: mod_base = OTHER; note = 2'-O-methyladenosine
atgataaagtactggtttcaaaa

SEQ ID NO: 2592 - RNA, 21 nt, synthetic construct
  source 1..21: mol_type = other RNA
  modified_base 1: mod_base = OTHER; note = 2'-O-methyluridine-3'-phosphorothioate
  modified_base 2: mod_base = OTHER; note = 2'-O-methyluridine-3'-phosphorothioate
  modified_base 3: mod_base = OTHER; note = 2'-O-methyluridine-3'-phosphate
  modified_base 4: mod_base = OTHER; note = 2'-O-methylguanosine-3'-phosphate
  modified_base 5: mod_base = OTHER; note = 2'-O-methyladenosine-3'-phosphate
  modified_base 6: mod_base = OTHER; note = 2'-O-methyladenosine-3'-phosphate
  modified_base 7: mod_base = OTHER; note = 2'-deoxy-2'-fluoroadenosine-3'-phosphate
  modified_base 8: mod_base = OTHER; note = 2'-O-methylcytidine-3'-phosphate
  modified_base 9: mod_base = OTHER; note = 2'-deoxy-2'-fluorocytidine-3'-phosphate
  modified_base 10: mod_base = OTHER; note = 2'-deoxy-2'-fluoroadenosine-3'-phosphate
  modified_base 11: mod_base = OTHER; note = 2'-deoxy-2'-fluoroguanosine-3'-phosphate
  modified_base 12: mod_base = OTHER; note = 2'-O-methyluridine-3'-phosphate
  modified_base 13: mod_base = OTHER; note = 2'-O-methyladenosine-3'-phosphate
  modified_base 14: mod_base = OTHER; note = 2'-O-methylcytidine-3'-phosphate
  modified_base 15: mod_base = OTHER; note = 2'-O-methyluridine-3'-phosphate
  modified_base 16: mod_base = OTHER; note = 2'-O-methyluridine-3'-phosphate
  modified_base 17: mod_base = OTHER; note = 2'-O-methyluridine-3'-phosphate
  modified_base 18: mod_base = OTHER; note = 2'-O-methyladenosine-3'-phosphate
  modified_base 19: mod_base = OTHER; note = 2'-O-methyluridine-3'-phosphate
  modified_base 20: mod_base = OTHER; note = 2'-O-methylcytidine-3'-phosphate
  modified_base 21: mod_base = OTHER; note = 2'-O-methyladenosine-3'-phosphate ((2S,4R)-1-[29-[[2-(acetylamino)-2-deoxy-beta-D-galactopyra nosyl]oxy]-14,14-bis[[3-[[3-[[5-[[2-(acetylamino)-2-deoxy-b eta-D-galactopyranosyl]oxy]-1-oxopentyl]amino]propyl]amino] -3-oxopropoxy]methyl]-1,12,19,25-tetraoxo-16-oxa-13,20,24-t riazanonacos-1-yl]-4-hydroxy-2-pyrrolidinyl)methyl ester
tttgaaaccagtactttatca

SEQ ID NO: 2593 - RNA, 23 nt, synthetic construct
  source 1..23: mol_type = other RNA
  modified_base 1: mod_base = OTHER; note = 2'-O-methyluridine-3'-phosphorothioate
  modified_base 2: mod_base = OTHER; note = 2'-deoxy-2'-fluoroguanosine-3'-phosphorothioate
  modified_base 3: mod_base = OTHER; note = 2'-O-methyladenosine-3'-phosphate
  modified_base 4: mod_base = OTHER; note = 2'-O-methyluridine-3'-phosphate
  modified_base 5: mod_base = OTHER; note = 2'-O-methyladenosine-3'-phosphate
  modified_base 6: mod_base = OTHER; note = 2'-deoxy-2'-fluoroadenosine-3'-phosphate
  modified_base 7: mod_base = OTHER; note = 2'-O-methyladenosine-3'-phosphate
  modified_base 8: mod_base = OTHER; note = 2'-deoxy-2'-fluoroguanosine-3'-phosphate
  modified_base 9: mod_base = OTHER; note = 2'-deoxy-2'-fluorouridine-3'-phosphate
  modified_base 10: mod_base = OTHER; note = 2'-O-methyladenosine-3'-phosphate
  modified_base 11: mod_base = OTHER; note = 2'-O-methylcytidine-3'-phosphate
  modified_base 12: mod_base = OTHER; note = 2'-O-methyluridine-3'-phosphate
  modified_base 13: mod_base = OTHER; note = 2'-O-methylguanosine-3'-phosphate
  modified_base 14: mod_base = OTHER; note = 2'-deoxy-2'-fluoroguanosine-3'-phosphate
  modified_base 15: mod_base = OTHER; note = 2'-O-methyluridine-3'-phosphate
  modified_base 16: mod_base = OTHER; note = 2'-deoxy-2'-fluorouridine-3'-phosphate
  modified_base 17: mod_base = OTHER; note = 2'-O-methyluridine-3'-phosphate
  modified_base 18: mod_base = OTHER; note = 2'-O-methylcytidine-3'-phosphate
  modified_base 19: mod_base = OTHER; note = 2'-O-methyladenosine-3'-phosphate
  modified_base 20: mod_base = OTHER; note = 2'-O-methyladenosine-3'-phosphate
  modified_base 21: mod_base = OTHER; note = 2'-O-methyladenosine-3'-phosphorothioate
  modified_base 22: mod_base = OTHER; note = 2'-O-methyladenosine-3'-phosphorothioate
  modified_base 23: mod_base = OTHER; note = 2'-O-methyluridine
tgataaagtactggtttcaaaat

SEQ ID NO: 2594 - RNA, 21 nt, synthetic construct
  source 1..21: mol_type = other RNA
  modified_base 1: mod_base = OTHER; note = 2'-O-methylcytidine-3'-phosphorothioate
  modified_base 2: mod_base = OTHER; note = 2'-O-methylguanosine-3'-phosphorothioate
  modified_base 3: mod_base = OTHER; note = 2'-O-methyladenosine-3'-phosphate
  modified_base 4: mod_base = OTHER; note = 2'-O-methylguanosine-3'-phosphate
  modified_base 5: mod_base = OTHER; note = 2'-O-methyladenosine-3'-phosphate
  modified_base 6: mod_base = OTHER; note = 2'-O-methyladenosine-3'-phosphate
  modified_base 7: mod_base = OTHER; note = 2'-deoxy-2'-fluoroguanosine-3'-phosphate
  modified_base 8: mod_base = OTHER; note = 2'-O-methyluridine-3'-phosphate
  modified_base 9: mod_base = OTHER; note = 2'-deoxy-2'-fluorocytidine-3'-phosphate
  modified_base 10: mod_base = OTHER; note = 2'-deoxy-2'-fluoroadenosine-3'-phosphate
  modified_base 11: mod_base = OTHER; note = 2'-deoxy-2'-fluorocytidine-3'-phosphate
  modified_base 12: mod_base = OTHER; note = 2'-O-methylcytidine-3'-phosphate
  modified_base 13: mod_base = OTHER; note = 2'-O-methyladenosine-3'-phosphate
  modified_base 14: mod_base = OTHER; note = 2'-O-methyladenosine-3'-phosphate
  modified_base 15: mod_base = OTHER; note = 2'-O-methylguanosine-3'-phosphate
  modified_base 16: mod_base = OTHER; note = 2'-O-methyladenosine-3'-phosphate
  modified_base 17: mod_base = OTHER; note = 2'-O-methyladenosine-3'-phosphate
  modified_base 18: mod_base = OTHER; note = 2'-O-methylguanosine-3'-phosphate
  modified_base 19: mod_base = OTHER; note = 2'-O-methylcytidine-3'-phosphate
  modified_base 20: mod_base = OTHER; note = 2'-O-methyluridine-3'-phosphate
  modified_base 21: mod_base = OTHER; note = 2'-O-methyladenosine-3'-phosphate ((2S,4R)-1-[29-[[2-(acetylamino)-2-deoxy-beta-D-galactopyra nosyl]oxy]-14,14-bis[[3-[[3-[[5-[[2-(acetylamino)-2-deoxy-b eta-D-galactopyranosyl]oxy]-1-oxopentyl]amino]propyl]amino] -3-oxopropoxy]methyl]-1,12,19,25-tetraoxo-16-oxa-13,20,24-t riazanonacos-1-yl]-4-hydroxy-2-pyrrolidinyl)methyl ester
cgagaagtcaccaagaagcta

SEQ ID NO: 2595 - RNA, 23 nt, synthetic construct
  source 1..23: mol_type = other RNA
  modified_base 1: mod_base = OTHER; note = 2'-O-methyluridine-3'-phosphorothioate
  modified_base 2: mod_base = OTHER; note = 2'-deoxy-2'-fluoroadenosine-3'-phosphorothioate
  modified_base 3: mod_base = OTHER; note = 2'-O-methylguanosine-3'-phosphate
  modified_base 4: mod_base = OTHER; note = 2'-O-methylcytidine-3'-phosphate
  modified_base 5: mod_base = OTHER; note = 2'-O-methyluridine-3'-phosphate
  modified_base 6: mod_base = OTHER; note = 2'-deoxy-2'-fluorouridine-3'-phosphate
  modified_base 7: mod_base = OTHER; note = 2'-O-methylcytidine-3'-phosphate
  modified_base 8: mod_base = OTHER; note = 2'-deoxy-2'-fluorouridine-3'-phosphate
  modified_base 9: mod_base = OTHER; note = 2'-deoxy-2'-fluorouridine-3'-phosphate
  modified_base 10: mod_base = OTHER; note = 2'-O-methylguanosine-3'-phosphate
  modified_base 11: mod_base = OTHER; note = 2'-O-methylguanosine-3'-phosphate
  modified_base 12: mod_base = OTHER; note = 2'-O-methyluridine-3'-phosphate
  modified_base 13: mod_base = OTHER; note = 2'-O-methylguanosine-3'-phosphate
  modified_base 14: mod_base = OTHER; note = 2'-deoxy-2'-fluoroadenosine-3'-phosphate
  modified_base 15: mod_base = OTHER; note = 2'-O-methylcytidine-3'-phosphate
  modified_base 16: mod_base = OTHER; note = 2'-deoxy-2'-fluorouridine-3'-phosphate
  modified_base 17: mod_base = OTHER; note = 2'-O-methyluridine-3'-phosphate
  modified_base 18: mod_base = OTHER; note = 2'-O-methylcytidine-3'-phosphate
  modified_base 19: mod_base = OTHER; note = 2'-O-methyluridine-3'-phosphate
  modified_base 20: mod_base = OTHER; note = 2'-O-methylcytidine-3'-phosphate
  modified_base 21: mod_base = OTHER; note = 2'-O-methylguanosine-3'-phosphorothioate
  modified_base 22: mod_base = OTHER; note = 2'-O-methylguanosine-3'-phosphorothioate
  modified_base 23: mod_base = OTHER; note = 2'-O-methyluridine
tagcttcttggtgacttctcggt

SEQ ID NO: 2596 - RNA, 21 nt, synthetic construct
  source 1..21: mol_type = other RNA
  modified_base 1: mod_base = OTHER; note = 2'-O-methylguanosine-3'-phosphorothioate
  modified_base 2: mod_base = OTHER; note = 2'-O-methyladenosine-3'-phosphorothioate
  modified_base 3: mod_base = OTHER; note = 2'-O-methylguanosine-3'-phosphate
  modified_base 4: mod_base = OTHER; note = 2'-O-methyladenosine-3'-phosphate
  modified_base 5: mod_base = OTHER; note = 2'-O-methyladenosine-3'-phosphate
  modified_base 6: mod_base = OTHER; note = 2'-O-methylguanosine-3'-phosphate
  modified_base 7: mod_base = OTHER; note = 2'-deoxy-2'-fluorouridine-3'-phosphate
  modified_base 8: mod_base = OTHER; note = 2'-O-methylcytidine-3'-phosphate
  modified_base 9: mod_base = OTHER; note = 2'-deoxy-2'-fluoroadenosine-3'-phosphate
  modified_base 10: mod_base = OTHER; note = 2'-deoxy-2'-fluorocytidine-3'-phosphate
  modified_base 11: mod_base = OTHER; note = 2'-deoxy-2'-fluorocytidine-3'-phosphate
  modified_base 12: mod_base = OTHER; note = 2'-O-methyladenosine-3'-phosphate
  modified_base 13: mod_base = OTHER; note = 2'-O-methyladenosine-3'-phosphate
  modified_base 14: mod_base = OTHER; note = 2'-O-methylguanosine-3'-phosphate
  modified_base 15: mod_base = OTHER; note = 2'-O-methyladenosine-3'-phosphate
  modified_base 16: mod_base = OTHER; note = 2'-O-methyladenosine-3'-phosphate
  modified_base 17: mod_base = OTHER; note = 2'-O-methylguanosine-3'-phosphate
  modified_base 18: mod_base = OTHER; note = 2'-O-methylcytidine-3'-phosphate
  modified_base 19: mod_base = OTHER; note = 2'-O-methyluridine-3'-phosphate
  modified_base 20: mod_base = OTHER; note = 2'-O-methyladenosine-3'-phosphate
  modified_base 21: mod_base = OTHER; note = 2'-O-methylguanosine-3'-phosphate ((2S,4R)-1-[29-[[2-(acetylamino)-2-deoxy-beta-D-galactopyra nosyl]oxy]-14,14-bis[[3-[[3-[[5-[[2-(acetylamino)-2-deoxy-b eta-D-galactopyranosyl]oxy]-1-oxopentyl]amino]propyl]amino] -3-oxopropoxy]methyl]-1,12,19,25-tetraoxo-16-oxa-13,20,24-t riazanonacos-1-yl]-4-hydroxy-2-pyrrolidinyl)methyl ester
gagaagtcaccaagaagctag

SEQ ID NO: 2597 - RNA, 23 nt, synthetic construct
  source 1..23: mol_type = other RNA
  modified_base 1: mod_base = OTHER; note = 2'-O-methylcytidine-3'-phosphorothioate
  modified_base 2: mod_base = OTHER; note = 2'-deoxy-2'-fluorouridine-3'-phosphorothioate
  modified_base 3: mod_base = OTHER; note = 2'-O-methyladenosine-3'-phosphate
  modified_base 4: mod_base = OTHER; note = 2'-O-methylguanosine-3'-phosphate
  modified_base 5: mod_base = OTHER; note = 2'-O-methylcytidine-3'-phosphate
  modified_base 6: mod_base = OTHER; note = 2'-deoxy-2'-fluorouridine-3'-phosphate
  modified_base 7: mod_base = OTHER; note = 2'-O-methyluridine-3'-phosphate
  modified_base 8: mod_base = OTHER; note = 2'-deoxy-2'-fluorocytidine-3'-phosphate
  modified_base 9: mod_base = OTHER; note = 2'-deoxy-2'-fluorouridine-3'-phosphate
  modified_base 10: mod_base = OTHER; note = 2'-O-methyluridine-3'-phosphate
  modified_base 11: mod_base = OTHER; note = 2'-O-methylguanosine-3'-phosphate
  modified_base 12: mod_base = OTHER; note = 2'-O-methylguanosine-3'-phosphate
  modified_base 13: mod_base = OTHER; note = 2'-O-methyluridine-3'-phosphate
  modified_base 14: mod_base = OTHER; note = 2'-deoxy-2'-fluoroguanosine-3'-phosphate
  modified_base 15: mod_base = OTHER; note = 2'-O-methyladenosine-3'-phosphate
  modified_base 16: mod_base = OTHER; note = 2'-deoxy-2'-fluorocytidine-3'-phosphate
  modified_base 17: mod_base = OTHER; note = 2'-O-methyluridine-3'-phosphate
  modified_base 18: mod_base = OTHER; note = 2'-O-methyluridine-3'-phosphate
  modified_base 19: mod_base = OTHER; note = 2'-O-methylcytidine-3'-phosphate
  modified_base 20: mod_base = OTHER; note = 2'-O-methyluridine-3'-phosphate
  modified_base 21: mod_base = OTHER; note = 2'-O-methylcytidine-3'-phosphorothioate
  modified_base 22: mod_base = OTHER; note = 2'-O-methylguanosine-3'-phosphorothioate
  modified_base 23: mod_base = OTHER; note = 2'-O-methylguanosine
ctagcttcttggtgacttctcgg

SEQ ID NO: 2598 - RNA, 21 nt, synthetic construct
  source 1..21: mol_type = other RNA
  modified_base 1: mod_base = OTHER; note = 2'-O-methylguanosine-3'-phosphorothioate
  modified_base 2: mod_base = OTHER; note = 2'-O-methylguanosine-3'-phosphorothioate
  modified_base 3: mod_base = OTHER; note = 2'-O-methyladenosine-3'-phosphate
  modified_base 4: mod_base = OTHER; note = 2'-O-methylcytidine-3'-phosphate
  modified_base 5: mod_base = OTHER; note = 2'-O-methylcytidine-3'-phosphate
  modified_base 6: mod_base = OTHER; note = 2'-O-methylguanosine-3'-phosphate
  modified_base 7: mod_base = OTHER; note = 2'-deoxy-2'-fluoroadenosine-3'-phosphate
  modified_base 8: mod_base = OTHER; note = 2'-O-methylguanosine-3'-phosphate
  modified_base 9: mod_base = OTHER; note = 2'-deoxy-2'-fluoroadenosine-3'-phosphate
  modified_base 10: mod_base = OTHER; note = 2'-deoxy-2'-fluoroadenosine-3'-phosphate
  modified_base 11: mod_base = OTHER; note = 2'-deoxy-2'-fluoroguanosine-3'-phosphate
  modified_base 12: mod_base = OTHER; note = 2'-O-methyluridine-3'-phosphate
  modified_base 13: mod_base = OTHER; note = 2'-O-methylcytidine-3'-phosphate
  modified_base 14: mod_base = OTHER; note = 2'-O-methyladenosine-3'-phosphate
  modified_base 15: mod_base = OTHER; note = 2'-O-methylcytidine-3'-phosphate
  modified_base 16: mod_base = OTHER; note = 2'-O-methylcytidine-3'-phosphate
  modified_base 17: mod_base = OTHER; note = 2'-O-methyladenosine-3'-phosphate
  modified_base 18: mod_base = OTHER; note = 2'-O-methyladenosine-3'-phosphate
  modified_base 19: mod_base = OTHER; note = 2'-O-methylguanosine-3'-phosphate
  modified_base 20: mod_base = OTHER; note = 2'-O-methyladenosine-3'-phosphate
  modified_base 21: mod_base = OTHER; note = 2'-O-methyladenosine-3'-phosphate ((2S,4R)-1-[29-[[2-(acetylamino)-2-deoxy-beta-D-galactopyra nosyl]oxy]-14,14-bis[[3-[[3-[[5-[[2-(acetylamino)-2-deoxy-b eta-D-galactopyranosyl]oxy]-1-oxopentyl]amino]propyl]amino] -3-oxopropoxy]methyl]-1,12,19,25-tetraoxo-16-oxa-13,20,24-t riazanonacos-1-yl]-4-hydroxy-2-pyrrolidinyl)methyl ester
ggaccgagaagtcaccaagaa

SEQ ID NO: 2599 - RNA, 23 nt, synthetic construct
  source 1..23: mol_type = other RNA
  modified_base 1: mod_base = OTHER; note = 2'-O-methyluridine-3'-phosphorothioate
  modified_base 2: mod_base = OTHER; note = 2'-deoxy-2'-fluorouridine-3'-phosphorothioate
  modified_base 3: mod_base = OTHER; note = 2'-O-methylcytidine-3'-phosphate
  modified_base 4: mod_base = OTHER; note = 2'-O-methyluridine-3'-phosphate
  modified_base 5: mod_base = OTHER; note = 2'-O-methyluridine-3'-phosphate
  modified_base 6: mod_base = OTHER; note = 2'-deoxy-2'-fluoroguanosine-3'-phosphate
  modified_base 7: mod_base = OTHER; note = 2'-O-methylguanosine-3'-phosphate
  modified_base 8: mod_base = OTHER; note = 2'-deoxy-2'-fluorouridine-3'-phosphate
  modified_base 9: mod_base = OTHER; note = 2'-deoxy-2'-fluoroguanosine-3'-phosphate
  modified_base 10: mod_base = OTHER; note = 2'-O-methyladenosine-3'-phosphate
  modified_base 11: mod_base = OTHER; note = 2'-O-methylcytidine-3'-phosphate
  modified_base 12: mod_base = OTHER; note = 2'-O-methyluridine-3'-phosphate
  modified_base 13: mod_base = OTHER; note = 2'-O-methyluridine-3'-phosphate
  modified_base 14: mod_base = OTHER; note = 2'-deoxy-2'-fluorocytidine-3'-phosphate
  modified_base 15: mod_base = OTHER; note = 2'-O-methyluridine-3'-phosphate
  modified_base 16: mod_base = OTHER; note = 2'-deoxy-2'-fluorocytidine-3'-phosphate
  modified_base 17: mod_base = OTHER; note = 2'-O-methylguanosine-3'-phosphate
  modified_base 18: mod_base = OTHER; note = 2'-O-methylguanosine-3'-phosphate
  modified_base 19: mod_base = OTHER; note = 2'-O-methyluridine-3'-phosphate
  modified_base 20: mod_base = OTHER; note = 2'-O-methylcytidine-3'-phosphate
  modified_base 21: mod_base = OTHER; note = 2'-O-methylcytidine-3'-phosphorothioate
  modified_base 22: mod_base = OTHER; note = 2'-O-methyluridine-3'-phosphorothioate
  modified_base 23: mod_base = OTHER; note = 2'-O-methyluridine
ttcttggtgacttctcggtcctt

SEQ ID NO: 2600 - RNA, 21 nt, synthetic construct
  source 1..21: mol_type = other RNA
  modified_base 1: mod_base = OTHER; note = 2'-O-methyladenosine-3'-phosphorothioate
  modified_base 2: mod_base = OTHER; note = 2'-O-methylguanosine-3'-phosphorothioate
  modified_base 3: mod_base = OTHER; note = 2'-O-methylguanosine-3'-phosphate
  modified_base 4: mod_base = OTHER; note = 2'-O-methyladenosine-3'-phosphate
  modified_base 5: mod_base = OTHER; note = 2'-O-methylcytidine-3'-phosphate
  modified_base 6: mod_base = OTHER; note = 2'-O-methylcytidine-3'-phosphate
  modified_base 7: mod_base = OTHER; note = 2'-deoxy-2'-fluoroguanosine-3'-phosphate
  modified_base 8: mod_base = OTHER; note = 2'-O-methyladenosine-3'-phosphate
  modified_base 9: mod_base = OTHER; note = 2'-deoxy-2'-fluoroguanosine-3'-phosphate
  modified_base 10: mod_base = OTHER; note = 2'-deoxy-2'-fluoroadenosine-3'-phosphate
  modified_base 11: mod_base = OTHER; note = 2'-deoxy-2'-fluoroadenosine-3'-phosphate
  modified_base 12: mod_base = OTHER; note = 2'-O-methylguanosine-3'-phosphate
  modified_base 13: mod_base = OTHER; note = 2'-O-methyluridine-3'-phosphate
  modified_base 14: mod_base = OTHER; note = 2'-O-methylcytidine-3'-phosphate
  modified_base 15: mod_base = OTHER; note = 2'-O-methyladenosine-3'-phosphate
  modified_base 16: mod_base = OTHER; note = 2'-O-methylcytidine-3'-phosphate
  modified_base 17: mod_base = OTHER; note = 2'-O-methylcytidine-3'-phosphate
  modified_base 18: mod_base = OTHER; note = 2'-O-methyladenosine-3'-phosphate
  modified_base 19: mod_base = OTHER; note = 2'-O-methyladenosine-3'-phosphate
  modified_base 20: mod_base = OTHER; note = 2'-O-methylguanosine-3'-phosphate
  modified_base 21: mod_base = OTHER; note = 2'-O-methyladenosine-3'-phosphate ((2S,4R)-1-[29-[[2-(acetylamino)-2-deoxy-beta-D-galactopyra nosyl]oxy]-14,14-bis[[3-[[3-[[5-[[2-(acetylamino)-2-deoxy-b eta-D-galactopyranosyl]oxy]-1-oxopentyl]amino]propyl]amino] -3-oxopropoxy]methyl]-1,12,19,25-tetraoxo-16-oxa-13,20,24-t riazanonacos-1-yl]-4-hydroxy-2-pyrrolidinyl)methyl ester
aggaccgagaagtcaccaaga

SEQ ID NO: 2601 - RNA, 23 nt, synthetic construct
  source 1..23: mol_type = other RNA
  modified_base 1: mod_base = OTHER; note = 2'-O-methyluridine-3'-phosphorothioate
  modified_base 2: mod_base = OTHER; note = 2'-deoxy-2'-fluorocytidine-3'-phosphorothioate
  modified_base 3: mod_base = OTHER; note = 2'-O-methyluridine-3'-phosphate
  modified_base 4: mod_base = OTHER; note = 2'-O-methyluridine-3'-phosphate
  modified_base 5: mod_base = OTHER; note = 2'-O-methylguanosine-3'-phosphate
  modified_base 6: mod_base = OTHER; note = 2'-deoxy-2'-fluoroguanosine-3'-phosphate
  modified_base 7: mod_base = OTHER; note = 2'-O-methyluridine-3'-phosphate
  modified_base 8: mod_base = OTHER; note = 2'-deoxy-2'-fluoroguanosine-3'-phosphate
  modified_base 9: mod_base = OTHER; note = 2'-deoxy-2'-fluoroadenosine-3'-phosphate
  modified_base 10: mod_base = OTHER; note = 2'-O-methylcytidine-3'-phosphate
  modified_base 11: mod_base = OTHER; note = 2'-O-methyluridine-3'-phosphate
  modified_base 12: mod_base = OTHER; note = 2'-O-methyluridine-3'-phosphate
  modified_base 13: mod_base = OTHER; note = 2'-O-methylcytidine-3'-phosphate
  modified_base 14: mod_base = OTHER; note = 2'-deoxy-2'-fluorouridine-3'-phosphate
  modified_base 15: mod_base = OTHER; note = 2'-O-methylcytidine-3'-phosphate
  modified_base 16: mod_base = OTHER; note = 2'-deoxy-2'-fluoroguanosine-3'-phosphate
  modified_base 17: mod_base = OTHER; note = 2'-O-methylguanosine-3'-phosphate
  modified_base 18: mod_base = OTHER; note = 2'-O-methyluridine-3'-phosphate
  modified_base 19: mod_base = OTHER; note = 2'-O-methylcytidine-3'-phosphate
  modified_base 20: mod_base = OTHER; note = 2'-O-methylcytidine-3'-phosphate
  modified_base 21: mod_base = OTHER; note = 2'-O-methyluridine-3'-phosphorothioate
  modified_base 22: mod_base = OTHER; note = 2'-O-methyluridine-3'-phosphorothioate
  modified_base 23: mod_base = OTHER; note = 2'-O-methylguanosine
tcttggtgacttctcggtccttg

SEQ ID NO: 2602 - RNA, 21 nt, synthetic construct
  source 1..21: mol_type = other RNA
  modified_base 1: mod_base = OTHER; note = 2'-O-methyluridine-3'-phosphorothioate
  modified_base 2: mod_base = OTHER; note = 2'-O-methylcytidine-3'-phosphorothioate
  modified_base 3: mod_base = OTHER; note = 2'-O-methyladenosine-3'-phosphate
  modified_base 4: mod_base = OTHER; note = 2'-O-methyladenosine-3'-phosphate
  modified_base 5: mod_base = OTHER; note = 2'-O-methyladenosine-3'-phosphate
  modified_base 6: mod_base = OTHER; note = 2'-O-methylguanosine-3'-phosphate
  modified_base 7: mod_base = OTHER; note = 2'-deoxy-2'-fluorouridine-3'-phosphate
  modified_base 8: mod_base = OTHER; note = 2'-O-methylguanosine-3'-phosphate
  modified_base 9: mod_base = OTHER; note = 2'-deoxy-2'-fluorouridine-3'-phosphate
  modified_base 10: mod_base = OTHER; note = 2'-deoxy-2'-fluorouridine-3'-phosphate
  modified_base 11: mod_base = OTHER; note = 2'-deoxy-2'-fluoroguanosine-3'-phosphate
  modified_base 12: mod_base = OTHER; note = 2'-O-methylguanosine-3'-phosphate
  modified_base 13: mod_base = OTHER; note = 2'-O-methyluridine-3'-phosphate
  modified_base 14: mod_base = OTHER; note = 2'-O-methyladenosine-3'-phosphate
  modified_base 15: mod_base = OTHER; note = 2'-O-methyladenosine-3'-phosphate
  modified_base 16: mod_base = OTHER; note = 2'-O-methyluridine-3'-phosphate
  modified_base 17: mod_base = OTHER; note = 2'-O-methylguanosine-3'-phosphate
  modified_base 18: mod_base = OTHER; note = 2'-O-methylcytidine-3'-phosphate
  modified_base 19: mod_base = OTHER; note = 2'-O-methylcytidine-3'-phosphate
  modified_base 20: mod_base = OTHER; note = 2'-O-methyluridine-3'-phosphate
  modified_base 21: mod_base = OTHER; note = 2'-O-methylguanosine-3'-phosphate ((2S,4R)-1-[29-[[2-(acetylamino)-2-deoxy-beta-D-galactopyra nosyl]oxy]-14,14-bis[[3-[[3-[[5-[[2-(acetylamino)-2-deoxy-b eta-D-galactopyranosyl]oxy]-1-oxopentyl]amino]propyl]amino] -3-oxopropoxy]methyl]-1,12,19,25-tetraoxo-16-oxa-13,20,24-t riazanonacos-1-yl]-4-hydroxy-2-pyrrolidinyl)methyl ester
tcaaagtgttggtaatgcctg

SEQ ID NO: 2603 - RNA, 23 nt, synthetic construct
  source 1..23: mol_type = other RNA
  modified_base 1: mod_base = OTHER; note = 2'-O-methylcytidine-3'-phosphorothioate
  modified_base 2: mod_base = OTHER; note = 2'-deoxy-2'-fluoroadenosine-3'-phosphorothioate
  modified_base 3: mod_base = OTHER; note = 2'-O-methylguanosine-3'-phosphate
  modified_base 4: mod_base = OTHER; note = 2'-O-methylguanosine-3'-phosphate
  modified_base 5: mod_base = OTHER; note = 2'-O-methylcytidine-3'-phosphate
  modified_base 6: mod_base = OTHER; note = 2'-deoxy-2'-fluoroadenosine-3'-phosphate
  modified_base 7: mod_base = OTHER; note = 2'-O-methyluridine-3'-phosphate
  modified_base 8: mod_base = OTHER; note = 2'-deoxy-2'-fluorouridine-3'-phosphate
  modified_base 9: mod_base = OTHER; note = 2'-deoxy-2'-fluoroadenosine-3'-phosphate
  modified_base 10: mod_base = OTHER; note = 2'-O-methylcytidine-3'-phosphate
  modified_base 11: mod_base = OTHER; note = 2'-O-methylcytidine-3'-phosphate
  modified_base 12: mod_base = OTHER; note = 2'-O-methyladenosine-3'-phosphate
  modified_base 13: mod_base = OTHER; note = 2'-O-methyladenosine-3'-phosphate
  modified_base 14: mod_base = OTHER; note = 2'-deoxy-2'-fluorocytidine-3'-phosphate
  modified_base 15: mod_base = OTHER; note = 2'-O-methyladenosine-3'-phosphate
  modified_base 16: mod_base = OTHER; note = 2'-deoxy-2'-fluorocytidine-3'-phosphate
  modified_base 17: mod_base = OTHER; note = 2'-O-methyluridine-3'-phosphate
  modified_base 18: mod_base = OTHER; note = 2'-O-methyluridine-3'-phosphate
  modified_base 19: mod_base = OTHER; note = 2'-O-methyluridine-3'-phosphate
  modified_base 20: mod_base = OTHER; note = 2'-O-methylguanosine-3'-phosphate
  modified_base 21: mod_base = OTHER; note = 2'-O-methyladenosine-3'-phosphorothioate
  modified_base 22: mod_base = OTHER; note = 2'-O-methyladenosine-3'-phosphorothioate
  modified_base 23: mod_base = OTHER; note = 2'-O-methylcytidine
caggcattaccaacactttgaac

SEQ ID NO: 2604 - RNA, 21 nt, synthetic construct
  source 1..21: mol_type = other RNA
  modified_base 1: mod_base = OTHER; note = 2'-O-methylcytidine-3'-phosphorothioate
  modified_base 2: mod_base = OTHER; note = 2'-O-methyladenosine-3'-phosphorothioate
  modified_base 3: mod_base = OTHER; note = 2'-O-methyladenosine-3'-phosphate
  modified_base 4: mod_base = OTHER; note = 2'-O-methyladenosine-3'-phosphate
  modified_base 5: mod_base = OTHER; note = 2'-O-methylguanosine-3'-phosphate
  modified_base 6: mod_base = OTHER; note = 2'-O-methyluridine-3'-phosphate
  modified_base 7: mod_base = OTHER; note = 2'-deoxy-2'-fluoroguanosine-3'-phosphate
  modified_base 8: mod_base = OTHER; note = 2'-O-methyluridine-3'-phosphate
  modified_base 9: mod_base = OTHER; note = 2'-deoxy-2'-fluorouridine-3'-phosphate
  modified_base 10: mod_base = OTHER; note = 2'-deoxy-2'-fluoroguanosine-3'-phosphate
  modified_base 11: mod_base = OTHER; note = 2'-deoxy-2'-fluoroguanosine-3'-phosphate
  modified_base 12: mod_base = OTHER; note = 2'-O-methyluridine-3'-phosphate
  modified_base 13: mod_base = OTHER; note = 2'-O-methyladenosine-3'-phosphate
  modified_base 14: mod_base = OTHER; note = 2'-O-methyladenosine-3'-phosphate
  modified_base 15: mod_base = OTHER; note = 2'-O-methyluridine-3'-phosphate
  modified_base 16: mod_base = OTHER; note = 2'-O-methylguanosine-3'-phosphate
  modified_base 17: mod_base = OTHER; note = 2'-O-methylcytidine-3'-phosphate
  modified_base 18: mod_base = OTHER; note = 2'-O-methylcytidine-3'-phosphate
  modified_base 19: mod_base = OTHER; note = 2'-O-methyluridine-3'-phosphate
  modified_base 20: mod_base = OTHER; note = 2'-O-methylguanosine-3'-phosphate
  modified_base 21: mod_base = OTHER; note = 2'-O-methyladenosine-3'-phosphate ((2S,4R)-1-[29-[[2-(acetylamino)-2-deoxy-beta-D-galactopyra nosyl]oxy]-14,14-bis[[3-[[3-[[5-[[2-(acetylamino)-2-deoxy-b eta-D-galactopyranosyl]oxy]-1-oxopentyl]amino]propyl]amino] -3-oxopropoxy]methyl]-1,12,19,25-tetraoxo-16-oxa-13,20,24-t riazanonacos-1-yl]-4-hydroxy-2-pyrrolidinyl)methyl ester
caaagtgttggtaatgcctga

SEQ ID NO: 2605 - RNA, 23 nt, synthetic construct
  source 1..23: mol_type = other RNA
  modified_base 1: mod_base = OTHER; note = 2'-O-methyluridine-3'-phosphorothioate
  modified_base 2: mod_base = OTHER; note = 2'-deoxy-2'-fluorocytidine-3'-phosphorothioate
  modified_base 3: mod_base = OTHER; note = 2'-O-methyladenosine-3'-phosphate
  modified_base 4: mod_base = OTHER; note = 2'-O-methylguanosine-3'-phosphate
  modified_base 5: mod_base = OTHER; note = 2'-O-methylguanosine-3'-phosphate
  modified_base 6: mod_base = OTHER; note = 2'-deoxy-2'-fluorocytidine-3'-phosphate
  modified_base 7: mod_base = OTHER; note = 2'-O-methyladenosine-3'-phosphate
  modified_base 8: mod_base = OTHER; note = 2'-deoxy-2'-fluorouridine-3'-phosphate
  modified_base 9: mod_base = OTHER; note = 2'-deoxy-2'-fluorouridine-3'-phosphate
  modified_base 10: mod_base = OTHER; note = 2'-O-methyladenosine-3'-phosphate
  modified_base 11: mod_base = OTHER; note = 2'-O-methylcytidine-3'-phosphate
  modified_base 12: mod_base = OTHER; note = 2'-O-methylcytidine-3'-phosphate
  modified_base 13: mod_base = OTHER; note = 2'-O-methyladenosine-3'-phosphate
  modified_base 14: mod_base = OTHER; note = 2'-deoxy-2'-fluoroadenosine-3'-phosphate
  modified_base 15: mod_base = OTHER; note = 2'-O-methylcytidine-3'-phosphate
  modified_base 16: mod_base = OTHER; note = 2'-deoxy-2'-fluoroadenosine-3'-phosphate
  modified_base 17: mod_base = OTHER; note = 2'-O-methylcytidine-3'-phosphate
  modified_base 18: mod_base = OTHER; note = 2'-O-methyluridine-3'-phosphate
  modified_base 19: mod_base = OTHER; note = 2'-O-methyluridine-3'-phosphate
  modified_base 20: mod_base = OTHER; note = 2'-O-methyluridine-3'-phosphate
  modified_base 21: mod_base = OTHER; note = 2'-O-methylguanosine-3'-phosphorothioate
  modified_base 22: mod_base = OTHER; note = 2'-O-methyladenosine-3'-phosphorothioate
  modified_base 23: mod_base = OTHER; note = 2'-O-methyladenosine
tcaggcattaccaacactttgaa

SEQ ID NO: 2606 - RNA, 21 nt, synthetic construct
  source 1..21: mol_type = other RNA
  modified_base 1: mod_base = OTHER; note = 2'-O-methyladenosine-3'-phosphorothioate
  modified_base 2: mod_base = OTHER; note = 2'-O-methylguanosine-3'-phosphorothioate
  modified_base 3: mod_base = OTHER; note = 2'-O-methylguanosine-3'-phosphate
  modified_base 4: mod_base = OTHER; note = 2'-O-methyluridine-3'-phosphate
  modified_base 5: mod_base = OTHER; note = 2'-O-methyluridine-3'-phosphate
  modified_base 6: mod_base = OTHER; note = 2'-O-methylcytidine-3'-phosphate
  modified_base 7: mod_base = OTHER; note = 2'-deoxy-2'-fluoroadenosine-3'-phosphate
  modified_base 8: mod_base = OTHER; note = 2'-O-methyladenosine-3'-phosphate
  modified_base 9: mod_base = OTHER; note = 2'-deoxy-2'-fluoroadenosine-3'-phosphate
  modified_base 10: mod_base = OTHER; note = 2'-deoxy-2'-fluoroguanosine-3'-phosphate
  modified_base 11: mod_base = OTHER; note = 2'-deoxy-2'-fluorouridine-3'-phosphate
  modified_base 12: mod_base = OTHER; note = 2'-O-methylguanosine-3'-phosphate
  modified_base 13: mod_base = OTHER; note = 2'-O-methyluridine-3'-phosphate
  modified_base 14: mod_base = OTHER; note = 2'-O-methyluridine-3'-phosphate
  modified_base 15: mod_base = OTHER; note = 2'-O-methylguanosine-3'-phosphate
  modified_base 16: mod_base = OTHER; note = 2'-O-methylguanosine-3'-phosphate
  modified_base 17: mod_base = OTHER; note = 2'-O-methyluridine-3'-phosphate
  modified_base 18: mod_base = OTHER; note = 2'-O-methyladenosine-3'-phosphate
  modified_base 19: mod_base = OTHER; note = 2'-O-methyladenosine-3'-phosphate
  modified_base 20: mod_base = OTHER; note = 2'-O-methyluridine-3'-phosphate
  modified_base 21: mod_base = OTHER; note = 2'-O-methylguanosine-3'-phosphate ((2S,4R)-1-[29-[[2-(acetylamino)-2-deoxy-beta-D-galactopyra nosyl]oxy]-14,14-bis[[3-[[3-[[5-[[2-(acetylamino)-2-deoxy-b eta-D-galactopyranosyl]oxy]-1-oxopentyl]amino]propyl]amino] -3-oxopropoxy]methyl]-1,12,19,25-tetraoxo-16-oxa-13,20,24-t riazanonacos-1-yl]-4-hydroxy-2-pyrrolidinyl)methyl ester
aggttcaaagtgttggtaatg

SEQ ID NO: 2607 - RNA, 23 nt, synthetic construct
  source 1..23: mol_type = other RNA
  modified_base 1: mod_base = OTHER; note = 2'-O-methylcytidine-3'-phosphorothioate
  modified_base 2: mod_base = OTHER; note = 2'-deoxy-2'-fluoroadenosine-3'-phosphorothioate
  modified_base 3: mod_base = OTHER; note = 2'-O-methyluridine-3'-phosphate
  modified_base 4: mod_base = OTHER; note = 2'-O-methyluridine-3'-phosphate
  modified_base 5: mod_base = OTHER; note = 2'-O-methyladenosine-3'-phosphate
  modified_base 6: mod_base = OTHER; note = 2'-deoxy-2'-fluorocytidine-3'-phosphate
  modified_base 7: mod_base = OTHER; note = 2'-O-methylcytidine-3'-phosphate
  modified_base 8: mod_base = OTHER; note = 2'-deoxy-2'-fluoroadenosine-3'-phosphate
  modified_base 9: mod_base = OTHER; note = 2'-deoxy-2'-fluoroadenosine-3'-phosphate
  modified_base 10: mod_base = OTHER; note = 2'-O-methylcytidine-3'-phosphate
  modified_base 11: mod_base = OTHER; note = 2'-O-methyladenosine-3'-phosphate
  modified_base 12: mod_base = OTHER; note = 2'-O-methylcytidine-3'-phosphate
  modified_base 13: mod_base = OTHER; note = 2'-O-methyluridine-3'-phosphate
  modified_base 14: mod_base = OTHER; note = 2'-deoxy-2'-fluorouridine-3'-phosphate
  modified_base 15: mod_base = OTHER; note = 2'-O-methyluridine-3'-phosphate
  modified_base 16: mod_base = OTHER; note = 2'-deoxy-2'-fluoroguanosine-3'-phosphate
  modified_base 17: mod_base = OTHER; note = 2'-O-methyladenosine-3'-phosphate
  modified_base 18: mod_base = OTHER; note = 2'-O-methyladenosine-3'-phosphate
  modified_base 19: mod_base = OTHER; note = 2'-O-methylcytidine-3'-phosphate
  modified_base 20: mod_base = OTHER; note = 2'-O-methylcytidine-3'-phosphate
  modified_base 21: mod_base = OTHER; note = 2'-O-methyluridine-3'-phosphorothioate
  modified_base 22: mod_base = OTHER; note = 2'-O-methylguanosine-3'-phosphorothioate
  modified_base 23: mod_base = OTHER; note = 2'-O-methyladenosine
cattaccaacactttgaacctga

SEQ ID NO: 2608 - RNA, 21 nt, synthetic construct
  source 1..21: mol_type = other RNA
  modified_base 1: mod_base = OTHER; note = 2'-O-methylcytidine-3'-phosphorothioate
  modified_base 2: mod_base = OTHER; note = 2'-O-methyladenosine-3'-phosphorothioate
  modified_base 3: mod_base = OTHER; note = 2'-O-methylguanosine-3'-phosphate
  modified_base 4: mod_base = OTHER; note = 2'-O-methylguanosine-3'-phosphate
  modified_base 5: mod_base = OTHER; note = 2'-O-methyluridine-3'-phosphate
  modified_base 6: mod_base = OTHER; note = 2'-O-methyluridine-3'-phosphate
  modified_base 7: mod_base = OTHER; note = 2'-deoxy-2'-fluorocytidine-3'-phosphate
  modified_base 8: mod_base = OTHER; note = 2'-O-methyladenosine-3'-phosphate
  modified_base 9: mod_base = OTHER; note = 2'-deoxy-2'-fluoroadenosine-3'-phosphate
  modified_base 10: mod_base = OTHER; note = 2'-deoxy-2'-fluoroadenosine-3'-phosphate
  modified_base 11: mod_base = OTHER; note = 2'-deoxy-2'-fluoroguanosine-3'-phosphate
  modified_base 12: mod_base = OTHER; note = 2'-O-methyluridine-3'-phosphate
  modified_base 13: mod_base = OTHER; note = 2'-O-methylguanosine-3'-phosphate
  modified_base 14: mod_base = OTHER; note = 2'-O-methyluridine-3'-phosphate
  modified_base 15: mod_base = OTHER; note = 2'-O-methyluridine-3'-phosphate
  modified_base 16: mod_base = OTHER; note = 2'-O-methylguanosine-3'-phosphate
  modified_base 17: mod_base = OTHER; note = 2'-O-methylguanosine-3'-phosphate
  modified_base 18: mod_base = OTHER; note = 2'-O-methyluridine-3'-phosphate
  modified_base 19: mod_base = OTHER; note = 2'-O-methyladenosine-3'-phosphate
  modified_base 20: mod_base = OTHER; note = 2'-O-methyladenosine-3'-phosphate
  modified_base 21: mod_base = OTHER; note = 2'-O-methyluridine-3'-phosphate ((2S,4R)-1-[29-[[2-(acetylamino)-2-deoxy-beta-D-galactopyra nosyl]oxy]-14,14-bis[[3-[[3-[[5-[[2-(acetylamino)-2-deoxy-b eta-D-galactopyranosyl]oxy]-1-oxopentyl]amino]propyl]amino] -3-oxopropoxy]methyl]-1,12,19,25-tetraoxo-16-oxa-13,20,24-t riazanonacos-1-yl]-4-hydroxy-2-pyrrolidinyl)methyl ester
caggttcaaagtgttggtaat

SEQ ID NO: 2609 - RNA, 23 nt, synthetic construct
  source 1..23: mol_type = other RNA
  modified_base 1: mod_base = OTHER; note = 2'-O-methyladenosine-3'-phosphorothioate
  modified_base 2: mod_base = OTHER; note = 2'-deoxy-2'-fluorouridine-3'-phosphorothioate
  modified_base 3: mod_base = OTHER; note = 2'-O-methyluridine-3'-phosphate
  modified_base 4: mod_base = OTHER; note = 2'-O-methyladenosine-3'-phosphate
  modified_base 5: mod_base = OTHER; note = 2'-O-methylcytidine-3'-phosphate
  modified_base 6: mod_base = OTHER; note = 2'-deoxy-2'-fluorocytidine-3'-phosphate
  modified_base 7: mod_base = OTHER; note = 2'-O-methyladenosine-3'-phosphate
  modified_base 8: mod_base = OTHER; note = 2'-deoxy-2'-fluoroadenosine-3'-phosphate
  modified_base 9: mod_base = OTHER; note = 2'-deoxy-2'-fluorocytidine-3'-phosphate
  modified_base 10: mod_base = OTHER; note = 2'-O-methyladenosine-3'-phosphate
  modified_base 11: mod_base = OTHER; note = 2'-O-methylcytidine-3'-phosphate
  modified_base 12: mod_base = OTHER; note = 2'-O-methyluridine-3'-phosphate
  modified_base 13: mod_base = OTHER; note = 2'-O-methyluridine-3'-phosphate
  modified_base 14: mod_base = OTHER; note = 2'-deoxy-2'-fluorouridine-3'-phosphate
  modified_base 15: mod_base = OTHER; note = 2'-O-methylguanosine-3'-phosphate
  modified_base 16: mod_base = OTHER; note = 2'-deoxy-2'-fluoroadenosine-3'-phosphate
  modified_base 17: mod_base = OTHER; note = 2'-O-methyladenosine-3'-phosphate
  modified_base 18: mod_base = OTHER; note = 2'-O-methylcytidine-3'-phosphate
  modified_base 19: mod_base = OTHER; note = 2'-O-methylcytidine-3'-phosphate
  modified_base 20: mod_base = OTHER; note = 2'-O-methyluridine-3'-phosphate
  modified_base 21: mod_base = OTHER; note = 2'-O-methylguanosine-3'-phosphorothioate
  modified_base 22: mod_base = OTHER; note = 2'-O-methyladenosine-3'-phosphorothioate
  modified_base 23: mod_base = OTHER; note = 2'-O-methylguanosine
attaccaacactttgaacctgag

SEQ ID NO: 2610 - RNA, 21 nt, synthetic construct
  source 1..21: mol_type = other RNA
  modified_base 1: mod_base = OTHER; note = 2'-O-methyluridine-3'-phosphorothioate
  modified_base 2: mod_base = OTHER; note = 2'-O-methyladenosine-3'-phosphorothioate
  modified_base 3: mod_base = OTHER; note = 2'-O-methyluridine-3'-phosphate
  modified_base 4: mod_base = OTHER; note = 2'-O-methyluridine-3'-phosphate
  modified_base 5: mod_base = OTHER; note = 2'-O-methyladenosine-3'-phosphate
  modified_base 6: mod_base = OTHER; note = 2'-O-methylcytidine-3'-phosphate
  modified_base 7: mod_base = OTHER; note = 2'-deoxy-2'-fluorouridine-3'-phosphate
  modified_base 8: mod_base = OTHER; note = 2'-O-methyluridine-3'-phosphate
  modified_base 9: mod_base = OTHER; note = 2'-deoxy-2'-fluoroguanosine-3'-phosphate
  modified_base 10: mod_base = OTHER; note = 2'-deoxy-2'-fluoroadenosine-3'-phosphate
  modified_base 11: mod_base = OTHER; note = 2'-deoxy-2'-fluorocytidine-3'-phosphate
  modified_base 12: mod_base = OTHER; note = 2'-O-methyladenosine-3'-phosphate
  modified_base 13: mod_base = OTHER; note = 2'-O-methyladenosine-3'-phosphate
  modified_base 14: mod_base = OTHER; note = 2'-O-methyladenosine-3'-phosphate
  modified_base 15: mod_base = OTHER; note = 2'-O-methylguanosine-3'-phosphate
  modified_base 16: mod_base = OTHER; note = 2'-O-methyladenosine-3'-phosphate
  modified_base 17: mod_base = OTHER; note = 2'-O-methylguanosine-3'-phosphate
  modified_base 18: mod_base = OTHER; note = 2'-O-methyladenosine-3'-phosphate
  modified_base 19: mod_base = OTHER; note = 2'-O-methylcytidine-3'-phosphate
  modified_base 20: mod_base = OTHER; note = 2'-O-methyladenosine-3'-phosphate
  modified_base 21: mod_base = OTHER; note = 2'-O-methylcytidine-3'-phosphate ((2S,4R)-1-[29-[[2-(acetylamino)-2-deoxy-beta-D-galactopyra nosyl]oxy]-14,14-bis[[3-[[3-[[5-[[2-(acetylamino)-2-deoxy-b eta-D-galactopyranosyl]oxy]-1-oxopentyl]amino]propyl]amino] -3-oxopropoxy]methyl]-1,12,19,25-tetraoxo-16-oxa-13,20,24-t riazanonacos-1-yl]-4-hydroxy-2-pyrrolidinyl)methyl ester
tattacttgacaaagagacac

SEQ ID NO: 2611 - RNA, 23 nt, synthetic construct
  source 1..23: mol_type = other RNA
  modified_base 1: mod_base = OTHER; note = 2'-O-methylguanosine-3'-phosphorothioate
  modified_base 2: mod_base = OTHER; note = 2'-deoxy-2'-fluorouridine-3'-phosphorothioate
  modified_base 3: mod_base = OTHER; note = 2'-O-methylguanosine-3'-phosphate
  modified_base 4: mod_base = OTHER; note = 2'-O-methyluridine-3'-phosphate
  modified_base 5: mod_base = OTHER; note = 2'-O-methylcytidine-3'-phosphate
  modified_base 6: mod_base = OTHER; note = 2'-deoxy-2'-fluorouridine-3'-phosphate
  modified_base 7: mod_base = OTHER; note = 2'-O-methylcytidine-3'-phosphate
  modified_base 8: mod_base = OTHER; note = 2'-deoxy-2'-fluorouridine-3'-phosphate
  modified_base 9: mod_base = OTHER; note = 2'-deoxy-2'-fluorouridine-3'-phosphate
  modified_base 10: mod_base = OTHER; note = 2'-O-methyluridine-3'-phosphate
  modified_base 11: mod_base = OTHER; note = 2'-O-methylguanosine-3'-phosphate
  modified_base 12: mod_base = OTHER; note = 2'-O-methyluridine-3'-phosphate
  modified_base 13: mod_base = OTHER; note = 2'-O-methylcytidine-3'-phosphate
  modified_base 14: mod_base = OTHER; note = 2'-deoxy-2'-fluoroadenosine-3'-phosphate
  modified_base 15: mod_base = OTHER; note = 2'-O-methyladenosine-3'-phosphate
  modified_base 16: mod_base = OTHER; note = 2'-deoxy-2'-fluoroguanosine-3'-phosphate
  modified_base 17: mod_base = OTHER; note = 2'-O-methyluridine-3'-phosphate
  modified_base 18: mod_base = OTHER; note = 2'-O-methyladenosine-3'-phosphate
  modified_base 19: mod_base = OTHER; note = 2'-O-methyladenosine-3'-phosphate
  modified_base 20: mod_base = OTHER; note = 2'-O-methyluridine-3'-phosphate
  modified_base 21: mod_base = OTHER; note = 2'-O-methyladenosine-3'-phosphorothioate
  modified_base 22: mod_base = OTHER; note = 2'-O-methylcytidine-3'-phosphorothioate
  modified_base 23: mod_base = OTHER; note = 2'-O-methyladenosine
gtgtctctttgtcaagtaataca

SEQ ID NO: 2612 - RNA, 21 nt, synthetic construct
  source 1..21: mol_type = other RNA
  modified_base 1: mod_base = OTHER; note = 2'-O-methyladenosine-3'-phosphorothioate
  modified_base 2: mod_base = OTHER; note = 2'-O-methyluridine-3'-phosphorothioate
  modified_base 3: mod_base = OTHER; note = 2'-O-methyluridine-3'-phosphate
  modified_base 4: mod_base = OTHER; note = 2'-O-methyladenosine-3'-phosphate
  modified_base 5: mod_base = OTHER; note = 2'-O-methylcytidine-3'-phosphate
  modified_base 6: mod_base = OTHER; note = 2'-O-methyluridine-3'-phosphate
  modified_base 7: mod_base = OTHER; note = 2'-deoxy-2'-fluorouridine-3'-phosphate
  modified_base 8: mod_base = OTHER; note = 2'-O-methylguanosine-3'-phosphate
  modified_base 9: mod_base = OTHER; note = 2'-deoxy-2'-fluoroadenosine-3'-phosphate
  modified_base 10: mod_base = OTHER; note = 2'-deoxy-2'-fluorocytidine-3'-phosphate
  modified_base 11: mod_base = OTHER; note = 2'-deoxy-2'-fluoroadenosine-3'-phosphate
  modified_base 12: mod_base = OTHER; note = 2'-O-methyladenosine-3'-phosphate
  modified_base 13: mod_base = OTHER; note = 2'-O-methyladenosine-3'-phosphate
  modified_base 14: mod_base = OTHER; note = 2'-O-methylguanosine-3'-phosphate
  modified_base 15: mod_base = OTHER; note = 2'-O-methyladenosine-3'-phosphate
  modified_base 16: mod_base = OTHER; note = 2'-O-methylguanosine-3'-phosphate
  modified_base 17: mod_base = OTHER; note = 2'-O-methyladenosine-3'-phosphate
  modified_base 18: mod_base = OTHER; note = 2'-O-methylcytidine-3'-phosphate
  modified_base 19: mod_base = OTHER; note = 2'-O-methyladenosine-3'-phosphate
  modified_base 20: mod_base = OTHER; note = 2'-O-methylcytidine-3'-phosphate
  modified_base 21: mod_base = OTHER; note = 2'-O-methyluridine-3'-phosphate ((2S,4R)-1-[29-[[2-(acetylamino)-2-deoxy-beta-D-galactopyra nosyl]oxy]-14,14-bis[[3-[[3-[[5-[[2-(acetylamino)-2-deoxy-b eta-D-galactopyranosyl]oxy]-1-oxopentyl]amino]propyl]amino] -3-oxopropoxy]methyl]-1,12,19,25-tetraoxo-16-oxa-13,20,24-t riazanonacos-1-yl]-4-hydroxy-2-pyrrolidinyl)methyl ester
attacttgacaaagagacact

SEQ ID NO: 2613 - RNA, 23 nt, synthetic construct
  source 1..23: mol_type = other RNA
  modified_base 1: mod_base = OTHER; note = 2'-O-methyladenosine-3'-phosphorothioate
  modified_base 2: mod_base = OTHER; note = 2'-deoxy-2'-fluoroguanosine-3'-phosphorothioate
  modified_base 3: mod_base = OTHER; note = 2'-O-methyluridine-3'-phosphate
  modified_base 4: mod_base = OTHER; note = 2'-O-methylguanosine-3'-phosphate
  modified_base 5: mod_base = OTHER; note = 2'-O-methyluridine-3'-phosphate
  modified_base 6: mod_base = OTHER; note = 2'-deoxy-2'-fluorocytidine-3'-phosphate
  modified_base 7: mod_base = OTHER; note = 2'-O-methyluridine-3'-phosphate
  modified_base 8: mod_base = OTHER; note = 2'-deoxy-2'-fluorocytidine-3'-phosphate
  modified_base 9: mod_base = OTHER; note = 2'-deoxy-2'-fluorouridine-3'-phosphate
  modified_base 10: mod_base = OTHER; note = 2'-O-methyluridine-3'-phosphate
  modified_base 11: mod_base = OTHER; note = 2'-O-methyluridine-3'-phosphate
  modified_base 12: mod_base = OTHER; note = 2'-O-methylguanosine-3'-phosphate
  modified_base 13: mod_base = OTHER; note = 2'-O-methyluridine-3'-phosphate
  modified_base 14: mod_base = OTHER; note = 2'-deoxy-2'-fluorocytidine-3'-phosphate
  modified_base 15: mod_base = OTHER; note = 2'-O-methyladenosine-3'-phosphate
  modified_base 16: mod_base = OTHER; note = 2'-deoxy-2'-fluoroadenosine-3'-phosphate
  modified_base 17: mod_base = OTHER; note = 2'-O-methylguanosine-3'-phosphate
  modified_base 18: mod_base = OTHER; note = 2'-O-methyluridine-3'-phosphate
  modified_base 19: mod_base = OTHER; note = 2'-O-methyladenosine-3'-phosphate
  modified_base 20: mod_base = OTHER; note = 2'-O-methyladenosine-3'-phosphate
  modified_base 21: mod_base = OTHER; note = 2'-O-methyluridine-3'-phosphorothioate
  modified_base 22: mod_base = OTHER; note = 2'-O-methyladenosine-3'-phosphorothioate
  modified_base 23: mod_base = OTHER; note = 2'-O-methylcytidine
agtgtctctttgtcaagtaatac

SEQ ID NO: 2614 - RNA, 21 nt, synthetic construct
  source 1..21: mol_type = other RNA
  modified_base 1: mod_base = OTHER; note = 2'-O-methylcytidine-3'-phosphorothioate
  modified_base 2: mod_base = OTHER; note = 2'-O-methyladenosine-3'-phosphorothioate
  modified_base 3: mod_base = OTHER; note = 2'-O-methyluridine-3'-phosphate
  modified_base 4: mod_base = OTHER; note = 2'-O-methylguanosine-3'-phosphate
  modified_base 5: mod_base = OTHER; note = 2'-O-methyluridine-3'-phosphate
  modified_base 6: mod_base = OTHER; note = 2'-O-methyladenosine-3'-phosphate
  modified_base 7: mod_base = OTHER; note = 2'-deoxy-2'-fluorouridine-3'-phosphate
  modified_base 8: mod_base = OTHER; note = 2'-O-methyluridine-3'-phosphate
  modified_base 9: mod_base = OTHER; note = 2'-deoxy-2'-fluoroadenosine-3'-phosphate
  modified_base 10: mod_base = OTHER; note = 2'-deoxy-2'-fluorocytidine-3'-phosphate
  modified_base 11: mod_base = OTHER; note = 2'-deoxy-2'-fluorouridine-3'-phosphate
  modified_base 12: mod_base = OTHER; note = 2'-O-methyluridine-3'-phosphate
  modified_base 13: mod_base = OTHER; note = 2'-O-methylguanosine-3'-phosphate
  modified_base 14: mod_base = OTHER; note = 2'-O-methyladenosine-3'-phosphate
  modified_base 15: mod_base = OTHER; note = 2'-O-methylcytidine-3'-phosphate
  modified_base 16: mod_base = OTHER; note = 2'-O-methyladenosine-3'-phosphate
  modified_base 17: mod_base = OTHER; note = 2'-O-methyladenosine-3'-phosphate
  modified_base 18: mod_base = OTHER; note = 2'-O-methyladenosine-3'-phosphate
  modified_base 19: mod_base = OTHER; note = 2'-O-methylguanosine-3'-phosphate
  modified_base 20: mod_base = OTHER; note = 2'-O-methyladenosine-3'-phosphate
  modified_base 21: mod_base = OTHER; note = 2'-O-methylguanosine-3'-phosphate ((2S,4R)-1-[29-[[2-(acetylamino)-2-deoxy-beta-D-galactopyra nosyl]oxy]-14,14-bis[[3-[[3-[[5-[[2-(acetylamino)-2-deoxy-b eta-D-galactopyranosyl]oxy]-1-oxopentyl]amino]propyl]amino] -3-oxopropoxy]methyl]-1,12,19,25-tetraoxo-16-oxa-13,20,24-t riazanonacos-1-yl]-4-hydroxy-2-pyrrolidinyl)methyl ester
catgtattacttgacaaagag

SEQ ID NO: 2615 - RNA, 23 nt, synthetic construct
  source 1..23: mol_type = other RNA
  modified_base 1: mod_base = OTHER; note = 2'-O-methylcytidine-3'-phosphorothioate
  modified_base 2: mod_base = OTHER; note = 2'-deoxy-2'-fluorouridine-3'-phosphorothioate
  modified_base 3: mod_base = OTHER; note = 2'-O-methylcytidine-3'-phosphate
  modified_base 4: mod_base = OTHER; note = 2'-O-methyluridine-3'-phosphate
  modified_base 5: mod_base = OTHER; note = 2'-O-methyluridine-3'-phosphate
  modified_base 6: mod_base = OTHER; note = 2'-deoxy-2'-fluorouridine-3'-phosphate
  modified_base 7: mod_base = OTHER; note = 2'-O-methylguanosine-3'-phosphate
  modified_base 8: mod_base = OTHER; note = 2'-deoxy-2'-fluorouridine-3'-phosphate
  modified_base 9: mod_base = OTHER; note = 2'-deoxy-2'-fluorocytidine-3'-phosphate
  modified_base 10: mod_base = OTHER; note = 2'-O-methyladenosine-3'-phosphate
  modified_base 11: mod_base = OTHER; note = 2'-O-methyladenosine-3'-phosphate
  modified_base 12: mod_base = OTHER; note = 2'-O-methylguanosine-3'-phosphate
  modified_base 13: mod_base = OTHER; note = 2'-O-methyluridine-3'-phosphate
  modified_base 14: mod_base = OTHER; note = 2'-deoxy-2'-fluoroadenosine-3'-phosphate
  modified_base 15: mod_base = OTHER; note = 2'-O-methyladenosine-3'-phosphate
  modified_base 16: mod_base = OTHER; note = 2'-deoxy-2'-fluorouridine-3'-phosphate
  modified_base 17: mod_base = OTHER; note = 2'-O-methyladenosine-3'-phosphate
  modified_base 18: mod_base = OTHER; note = 2'-O-methylcytidine-3'-phosphate
  modified_base 19: mod_base = OTHER; note = 2'-O-methyladenosine-3'-phosphate
  modified_base 20: mod_base = OTHER; note = 2'-O-methyluridine-3'-phosphate
  modified_base 21: mod_base = OTHER; note = 2'-O-methylguanosine-3'-phosphorothioate
  modified_base 22: mod_base = OTHER; note = 2'-O-methylcytidine-3'-phosphorothioate
  modified_base 23: mod_base = OTHER; note = 2'-O-methyluridine
ctctttgtcaagtaatacatgct

SEQ ID NO: 2616 - RNA, 21 nt, synthetic construct
  source 1..21: mol_type = other RNA
  modified_base 1: mod_base = OTHER; note = 2'-O-methylguanosine-3'-phosphorothioate
  modified_base 2: mod_base = OTHER; note = 2'-O-methylcytidine-3'-phosphorothioate
  modified_base 3: mod_base = OTHER; note = 2'-O-methyladenosine-3'-phosphate
  modified_base 4: mod_base = OTHER; note = 2'-O-methyluridine-3'-phosphate
  modified_base 5: mod_base = OTHER; note = 2'-O-methylguanosine-3'-phosphate
  modified_base 6: mod_base = OTHER; note = 2'-O-methyluridine-3'-phosphate
  modified_base 7: mod_base = OTHER; note = 2'-deoxy-2'-fluoroadenosine-3'-phosphate
  modified_base 8: mod_base = OTHER; note = 2'-O-methyluridine-3'-phosphate
  modified_base 9: mod_base = OTHER; note = 2'-deoxy-2'-fluorouridine-3'-phosphate
  modified_base 10: mod_base = OTHER; note = 2'-deoxy-2'-fluoroadenosine-3'-phosphate
  modified_base 11: mod_base = OTHER; note = 2'-deoxy-2'-fluorocytidine-3'-phosphate
  modified_base 12: mod_base = OTHER; note = 2'-O-methyluridine-3'-phosphate
  modified_base 13: mod_base = OTHER; note = 2'-O-methyluridine-3'-phosphate
  modified_base 14: mod_base = OTHER; note = 2'-O-methylguanosine-3'-phosphate
  modified_base 15: mod_base = OTHER; note = 2'-O-methyladenosine-3'-phosphate
  modified_base 16: mod_base = OTHER; note = 2'-O-methylcytidine-3'-phosphate
  modified_base 17: mod_base = OTHER; note = 2'-O-methyladenosine-3'-phosphate
  modified_base 18: mod_base = OTHER; note = 2'-O-methyladenosine-3'-phosphate
  modified_base 19: mod_base = OTHER; note = 2'-O-methyladenosine-3'-phosphate
  modified_base 20: mod_base = OTHER; note = 2'-O-methylguanosine-3'-phosphate
  modified_base 21: mod_base = OTHER; note = 2'-O-methyladenosine-3'-phosphate ((2S,4R)-1-[29-[[2-(acetylamino)-2-deoxy-beta-D-galactopyra nosyl]oxy]-14,14-bis[[3-[[3-[[5-[[2-(acetylamino)-2-deoxy-b eta-D-galactopyranosyl]oxy]-1-oxopentyl]amino]propyl]amino] -3-oxopropoxy]methyl]-1,12,19,25-tetraoxo-16-oxa-13,20,24-t riazanonacos-1-yl]-4-hydroxy-2-pyrrolidinyl)methyl ester
gcatgtattacttgacaaaga

SEQ ID NO: 2617 - RNA, 23 nt, synthetic construct
  source 1..23: mol_type = other RNA
  modified_base 1: mod_base = OTHER; note = 2'-O-methyluridine-3'-phosphorothioate
  modified_base 2: mod_base = OTHER; note = 2'-deoxy-2'-fluorocytidine-3'-phosphorothioate
  modified_base 3: mod_base = OTHER; note = 2'-O-methyluridine-3'-phosphate
  modified_base 4: mod_base = OTHER; note = 2'-O-methyluridine-3'-phosphate
  modified_base 5: mod_base = OTHER; note = 2'-O-methyluridine-3'-phosphate
  modified_base 6: mod_base = OTHER; note = 2'-deoxy-2'-fluoroguanosine-3'-phosphate
  modified_base 7: mod_base = OTHER; note = 2'-O-methyluridine-3'-phosphate
  modified_base 8: mod_base = OTHER; note = 2'-deoxy-2'-fluorocytidine-3'-phosphate
  modified_base 9: mod_base = OTHER; note = 2'-deoxy-2'-fluoroadenosine-3'-phosphate
  modified_base 10: mod_base = OTHER; note = 2'-O-methyladenosine-3'-phosphate
  modified_base 11: mod_base = OTHER; note = 2'-O-methylguanosine-3'-phosphate
  modified_base 12: mod_base = OTHER; note = 2'-O-methyluridine-3'-phosphate
  modified_base 13: mod_base = OTHER; note = 2'-O-methyladenosine-3'-phosphate
  modified_base 14: mod_base = OTHER; note = 2'-deoxy-2'-fluoroadenosine-3'-phosphate
  modified_base 15: mod_base = OTHER; note = 2'-O-methyluridine-3'-phosphate
  modified_base 16: mod_base = OTHER; note = 2'-deoxy-2'-fluoroadenosine-3'-phosphate
  modified_base 17: mod_base = OTHER; note = 2'-O-methylcytidine-3'-phosphate
  modified_base 18: mod_base = OTHER; note = 2'-O-methyladenosine-3'-phosphate
  modified_base 19: mod_base = OTHER; note = 2'-O-methyluridine-3'-phosphate
  modified_base 20: mod_base = OTHER; note = 2'-O-methylguanosine-3'-phosphate
  modified_base 21: mod_base = OTHER; note = 2'-O-methylcytidine-3'-phosphorothioate
  modified_base 22: mod_base = OTHER; note = 2'-O-methyluridine-3'-phosphorothioate
  modified_base 23: mod_base = OTHER; note = 2'-O-methylguanosine
tctttgtcaagtaatacatgctg

SEQ ID NO: 2618 - RNA, 21 nt, synthetic construct
  source 1..21: mol_type = other RNA
  modified_base 1: mod_base = OTHER; note = 2'-O-methyladenosine-3'-phosphorothioate
  modified_base 2: mod_base = OTHER; note = 2'-O-methyladenosine-3'-phosphorothioate
  modified_base 3: mod_base = OTHER; note = 2'-O-methyladenosine-3'-phosphate
  modified_base 4: mod_base = OTHER; note = 2'-O-methylguanosine-3'-phosphate
  modified_base 5: mod_base = OTHER; note = 2'-O-methyluridine-3'-phosphate
  modified_base 6: mod_base = OTHER; note = 2'-O-methylcytidine-3'-phosphate
  modified_base 7: mod_base = OTHER; note = 2'-deoxy-2'-fluoroadenosine-3'-phosphate
  modified_base 8: mod_base = OTHER; note = 2'-O-methyluridine-3'-phosphate
  modified_base 9: mod_base = OTHER; note = 2'-deoxy-2'-fluorocytidine-3'-phosphate
  modified_base 10: mod_base = OTHER; note = 2'-deoxy-2'-fluoroguanosine-3'-phosphate
  modified_base 11: mod_base = OTHER; note = 2'-deoxy-2'-fluoroadenosine-3'-phosphate
  modified_base 12: mod_base = OTHER; note = 2'-O-methylcytidine-3'-phosphate
  modified_base 13: mod_base = OTHER; note = 2'-O-methyladenosine-3'-phosphate
  modified_base 14: mod_base = OTHER; note = 2'-O-methyladenosine-3'-phosphate
  modified_base 15: mod_base = OTHER; note = 2'-O-methylguanosine-3'-phosphate
  modified_base 16: mod_base = OTHER; note = 2'-O-methyladenosine-3'-phosphate
  modified_base 17: mod_base = OTHER; note = 2'-O-methylcytidine-3'-phosphate
  modified_base 18: mod_base = OTHER; note = 2'-O-methyladenosine-3'-phosphate
  modified_base 19: mod_base = OTHER; note = 2'-O-methyluridine-3'-phosphate
  modified_base 20: mod_base = OTHER; note = 2'-O-methyluridine-3'-phosphate
  modified_base 21: mod_base = OTHER; note = 2'-O-methylguanosine-3'-phosphate ((2S,4R)-1-[29-[[2-(acetylamino)-2-deoxy-beta-D-galactopyra nosyl]oxy]-14,14-bis[[3-[[3-[[5-[[2-(acetylamino)-2-deoxy-b eta-D-galactopyranosyl]oxy]-1-oxopentyl]amino]propyl]amino] -3-oxopropoxy]methyl]-1,12,19,25-tetraoxo-16-oxa-13,20,24-t riazanonacos-1-yl]-4-hydroxy-2-pyrrolidinyl)methyl ester
aaagtcatcgacaagacattg

SEQ ID NO: 2619 - RNA, 23 nt, synthetic construct
  source 1..23: mol_type = other RNA
  modified_base 1: mod_base = OTHER; note = 2'-O-methylcytidine-3'-phosphorothioate
  modified_base 2: mod_base = OTHER; note = 2'-deoxy-2'-fluoroadenosine-3'-phosphorothioate
  modified_base 3: mod_base = OTHER; note = 2'-O-methyladenosine-3'-phosphate
  modified_base 4: mod_base = OTHER; note = 2'-O-methyluridine-3'-phosphate
  modified_base 5: mod_base = OTHER; note = 2'-O-methylguanosine-3'-phosphate
  modified_base 6: mod_base = OTHER; note = 2'-deoxy-2'-fluorouridine-3'-phosphate
  modified_base 7: mod_base = OTHER; note = 2'-O-methylcytidine-3'-phosphate
  modified_base 8: mod_base = OTHER; note = 2'-deoxy-2'-fluorouridine-3'-phosphate
  modified_base 9: mod_base = OTHER; note = 2'-deoxy-2'-fluorouridine-3'-phosphate
  modified_base 10: mod_base = OTHER; note = 2'-O-methylguanosine-3'-phosphate
  modified_base 11: mod_base = OTHER; note = 2'-O-methyluridine-3'-phosphate
  modified_base 12: mod_base = OTHER; note = 2'-O-methylcytidine-3'-phosphate
  modified_base 13: mod_base = OTHER; note = 2'-O-methylguanosine-3'-phosphate
  modified_base 14: mod_base = OTHER; note = 2'-deoxy-2'-fluoroadenosine-3'-phosphate
  modified_base 15: mod_base = OTHER; note = 2'-O-methyluridine-3'-phosphate
  modified_base 16: mod_base = OTHER; note = 2'-deoxy-2'-fluoroguanosine-3'-phosphate
  modified_base 17: mod_base = OTHER; note = 2'-O-methyladenosine-3'-phosphate
  modified_base 18: mod_base = OTHER; note = 2'-O-methylcytidine-3'-phosphate
  modified_base 19: mod_base = OTHER; note = 2'-O-methyluridine-3'-phosphate
  modified_base 20: mod_base = OTHER; note = 2'-O-methyluridine-3'-phosphate
  modified_base 21: mod_base = OTHER; note = 2'-O-methyluridine-3'-phosphorothioate
  modified_base 22: mod_base = OTHER; note = 2'-O-methylcytidine-3'-phosphorothioate
  modified_base 23: mod_base = OTHER; note = 2'-O-methyladenosine
caatgtcttgtcgatgactttca

SEQ ID NO: 2620 - RNA, 21 nt, synthetic construct
  source 1..21: mol_type = other RNA
  modified_base 1: mod_base = OTHER; note = 2'-O-methyladenosine-3'-phosphorothioate
  modified_base 2: mod_base = OTHER; note = 2'-O-methyladenosine-3'-phosphorothioate
  modified_base 3: mod_base = OTHER; note = 2'-O-methylguanosine-3'-phosphate
  modified_base 4: mod_base = OTHER; note = 2'-O-methyluridine-3'-phosphate
  modified_base 5: mod_base = OTHER; note = 2'-O-methylcytidine-3'-phosphate
  modified_base 6: mod_base = OTHER; note = 2'-O-methyladenosine-3'-phosphate
  modified_base 7: mod_base = OTHER; note = 2'-deoxy-2'-fluorouridine-3'-phosphate
  modified_base 8: mod_base = OTHER; note = 2'-O-methylcytidine-3'-phosphate
  modified_base 9: mod_base = OTHER; note = 2'-deoxy-2'-fluoroguanosine-3'-phosphate
  modified_base 10: mod_base = OTHER; note = 2'-deoxy-2'-fluoroadenosine-3'-phosphate
  modified_base 11: mod_base = OTHER; note = 2'-deoxy-2'-fluorocytidine-3'-phosphate
  modified_base 12: mod_base = OTHER; note = 2'-O-methyladenosine-3'-phosphate
  modified_base 13: mod_base = OTHER; note = 2'-O-methyladenosine-3'-phosphate
  modified_base 14: mod_base = OTHER; note = 2'-O-methylguanosine-3'-phosphate
  modified_base 15: mod_base = OTHER; note = 2'-O-methyladenosine-3'-phosphate
  modified_base 16: mod_base = OTHER; note = 2'-O-methylcytidine-3'-phosphate
  modified_base 17: mod_base = OTHER; note = 2'-O-methyladenosine-3'-phosphate
  modified_base 18: mod_base = OTHER; note = 2'-O-methyluridine-3'-phosphate
  modified_base 19: mod_base = OTHER; note = 2'-O-methyluridine-3'-phosphate
  modified_base 20: mod_base = OTHER; note = 2'-O-methylguanosine-3'-phosphate
  modified_base 21: mod_base = OTHER; note = 2'-O-methylguanosine-3'-phosphate ((2S,4R)-1-[29-[[2-(acetylamino)-2-deoxy-beta-D-galactopyra nosyl]oxy]-14,14-bis[[3-[[3-[[5-[[2-(acetylamino)-2-deoxy-b eta-D-galactopyranosyl]oxy]-1-oxopentyl]amino]propyl]amino] -3-oxopropoxy]methyl]-1,12,19,25-tetraoxo-16-oxa-13,20,24-t riazanonacos-1-yl]-4-hydroxy-2-pyrrolidinyl)methyl ester
aagtcatcgacaagacattgg

SEQ ID NO: 2621 - RNA, 23 nt, synthetic construct
  source 1..23: mol_type = other RNA
  modified_base 1: mod_base = OTHER; note = 2'-O-methylcytidine-3'-phosphorothioate
  modified_base 2: mod_base = OTHER; note = 2'-deoxy-2'-fluorocytidine-3'-phosphorothioate
  modified_base 3: mod_base = OTHER; note = 2'-O-methyladenosine-3'-phosphate
  modified_base 4: mod_base = OTHER; note = 2'-O-methyladenosine-3'-phosphate
  modified_base 5: mod_base = OTHER; note = 2'-O-methyluridine-3'-phosphate
  modified_base 6: mod_base = OTHER; note = 2'-deoxy-2'-fluoroguanosine-3'-phosphate
  modified_base 7: mod_base = OTHER; note = 2'-O-methyluridine-3'-phosphate
  modified_base 8: mod_base = OTHER; note = 2'-deoxy-2'-fluorocytidine-3'-phosphate
  modified_base 9: mod_base = OTHER; note = 2'-deoxy-2'-fluorouridine-3'-phosphate
  modified_base 10: mod_base = OTHER; note = 2'-O-methyluridine-3'-phosphate
  modified_base 11: mod_base = OTHER; note = 2'-O-methylguanosine-3'-phosphate
  modified_base 12: mod_base = OTHER; note = 2'-O-methyluridine-3'-phosphate
  modified_base 13: mod_base = OTHER; note = 2'-O-methylcytidine-3'-phosphate
  modified_base 14: mod_base = OTHER; note = 2'-deoxy-2'-fluoroguanosine-3'-phosphate
  modified_base 15: mod_base = OTHER; note = 2'-O-methyladenosine-3'-phosphate
  modified_base 16: mod_base = OTHER; note = 2'-deoxy-2'-fluorouridine-3'-phosphate
  modified_base 17: mod_base = OTHER; note = 2'-O-methylguanosine-3'-phosphate
  modified_base 18: mod_base = OTHER; note = 2'-O-methyladenosine-3'-phosphate
  modified_base 19: mod_base = OTHER; note = 2'-O-methylcytidine-3'-phosphate
  modified_base 20: mod_base = OTHER; note = 2'-O-methyluridine-3'-phosphate
  modified_base 21: mod_base = OTHER; note = 2'-O-methyluridine-3'-phosphorothioate
  modified_base 22: mod_base = OTHER; note = 2'-O-methyluridine-3'-phosphorothioate
  modified_base 23: mod_base = OTHER; note = 2'-O-methylcytidine
ccaatgtcttgtcgatgactttc

SEQ ID NO: 2622 - RNA, 21 nt, synthetic construct
  source 1..21: mol_type = other RNA
  modified_base 1: mod_base = OTHER; note = 2'-O-methyluridine-3'-phosphorothioate
  modified_base 2: mod_base = OTHER; note = 2'-O-methylguanosine-3'-phosphorothioate
  modified_base 3: mod_base = OTHER; note = 2'-O-methyluridine-3'-phosphate
  modified_base 4: mod_base = OTHER; note = 2'-O-methylguanosine-3'-phosphate
  modified_base 5: mod_base = OTHER; note = 2'-O-methyladenosine-3'-phosphate
  modified_base 6: mod_base = OTHER; note = 2'-O-methyladenosine-3'-phosphate
  modified_base 7: mod_base = OTHER; note = 2'-deoxy-2'-fluoroadenosine-3'-phosphate
  modified_base 8: mod_base = OTHER; note = 2'-O-methylguanosine-3'-phosphate
  modified_base 9: mod_base = OTHER; note = 2'-deoxy-2'-fluorouridine-3'-phosphate
  modified_base 10: mod_base = OTHER; note = 2'-deoxy-2'-fluorocytidine-3'-phosphate
  modified_base 11: mod_base = OTHER; note = 2'-deoxy-2'-fluoroadenosine-3'-phosphate
  modified_base 12: mod_base = OTHER; note = 2'-O-methyluridine-3'-phosphate
  modified_base 13: mod_base = OTHER; note = 2'-O-methylcytidine-3'-phosphate
  modified_base 14: mod_base = OTHER; note = 2'-O-methylguanosine-3'-phosphate
  modified_base 15: mod_base = OTHER; note = 2'-O-methyladenosine-3'-phosphate
  modified_base 16: mod_base = OTHER; note = 2'-O-methylcytidine-3'-phosphate
  modified_base 17: mod_base = OTHER; note = 2'-O-methyladenosine-3'-phosphate
  modified_base 18: mod_base = OTHER; note = 2'-O-methyladenosine-3'-phosphate
  modified_base 19: mod_base = OTHER; note = 2'-O-methylguanosine-3'-phosphate
  modified_base 20: mod_base = OTHER; note = 2'-O-methyladenosine-3'-phosphate
  modified_base 21: mod_base = OTHER; note = 2'-O-methylcytidine-3'-phosphate ((2S,4R)-1-[29-[[2-(acetylamino)-2-deoxy-beta-D-galactopyra nosyl]oxy]-14,14-bis[[3-[[3-[[5-[[2-(acetylamino)-2-deoxy-b eta-D-galactopyranosyl]oxy]-1-oxopentyl]amino]propyl]amino] -3-oxopropoxy]methyl]-1,12,19,25-tetraoxo-16-oxa-13,20,24-t riazanonacos-1-yl]-4-hydroxy-2-pyrrolidinyl)methyl ester
tgtgaaagtcatcgacaagac

SEQ ID NO: 2623 - RNA, 23 nt, synthetic construct
  source 1..23: mol_type = other RNA
  modified_base 1: mod_base = OTHER; note = 2'-O-methylguanosine-3'-phosphorothioate
  modified_base 2: mod_base = OTHER; note = 2'-deoxy-2'-fluorouridine-3'-phosphorothioate
  modified_base 3: mod_base = OTHER; note = 2'-O-methylcytidine-3'-phosphate
  modified_base 4: mod_base = OTHER; note = 2'-O-methyluridine-3'-phosphate
  modified_base 5: mod_base = OTHER; note = 2'-O-methyluridine-3'-phosphate
  modified_base 6: mod_base = OTHER; note = 2'-deoxy-2'-fluoroguanosine-3'-phosphate
  modified_base 7: mod_base = OTHER; note = 2'-O-methyluridine-3'-phosphate
  modified_base 8: mod_base = OTHER; note = 2'-deoxy-2'-fluorocytidine-3'-phosphate
  modified_base 9: mod_base = OTHER; note = 2'-deoxy-2'-fluoroguanosine-3'-phosphate
  modified_base 10: mod_base = OTHER; note = 2'-O-methyladenosine-3'-phosphate
  modified_base 11: mod_base = OTHER; note = 2'-O-methyluridine-3'-phosphate
  modified_base 12: mod_base = OTHER; note = 2'-O-methylguanosine-3'-phosphate
  modified_base 13: mod_base = OTHER; note = 2'-O-methyladenosine-3'-phosphate
  modified_base 14: mod_base = OTHER; note = 2'-deoxy-2'-fluorocytidine-3'-phosphate
  modified_base 15: mod_base = OTHER; note = 2'-O-methyluridine-3'-phosphate
  modified_base 16: mod_base = OTHER; note = 2'-deoxy-2'-fluorouridine-3'-phosphate
  modified_base 17: mod_base = OTHER; note = 2'-O-methyluridine-3'-phosphate
  modified_base 18: mod_base = OTHER; note = 2'-O-methylcytidine-3'-phosphate
  modified_base 19: mod_base = OTHER; note = 2'-O-methyladenosine-3'-phosphate
  modified_base 20: mod_base = OTHER; note = 2'-O-methylcytidine-3'-phosphate
  modified_base 21: mod_base = OTHER; note = 2'-O-methyladenosine-3'-phosphorothioate
  modified_base 22: mod_base = OTHER; note = 2'-O-methyluridine-3'-phosphorothioate
  modified_base 23: mod_base = OTHER; note = 2'-O-methyluridine
gtcttgtcgatgactttcacatt

SEQ ID NO: 2624 - RNA, 21 nt, synthetic construct
  source 1..21: mol_type = other RNA
  modified_base 1: mod_base = OTHER; note = 2'-O-methyladenosine-3'-phosphorothioate
  modified_base 2: mod_base = OTHER; note = 2'-O-methyluridine-3'-phosphorothioate
  modified_base 3: mod_base = OTHER; note = 2'-O-methylguanosine-3'-phosphate
  modified_base 4: mod_base = OTHER; note = 2'-O-methyluridine-3'-phosphate
  modified_base 5: mod_base = OTHER; note = 2'-O-methylguanosine-3'-phosphate
  modified_base 6: mod_base = OTHER; note = 2'-O-methyladenosine-3'-phosphate
  modified_base 7: mod_base = OTHER; note = 2'-deoxy-2'-fluoroadenosine-3'-phosphate
  modified_base 8: mod_base = OTHER; note = 2'-O-methyladenosine-3'-phosphate
  modified_base 9: mod_base = OTHER; note = 2'-deoxy-2'-fluoroguanosine-3'-phosphate
  modified_base 10: mod_base = OTHER; note = 2'-deoxy-2'-fluorouridine-3'-phosphate
  modified_base 11: mod_base = OTHER; note = 2'-deoxy-2'-fluorocytidine-3'-phosphate
  modified_base 12: mod_base = OTHER; note = 2'-O-methyladenosine-3'-phosphate
  modified_base 13: mod_base = OTHER; note = 2'-O-methyluridine-3'-phosphate
  modified_base 14: mod_base = OTHER; note = 2'-O-methylcytidine-3'-phosphate
  modified_base 15: mod_base = OTHER; note = 2'-O-methylguanosine-3'-phosphate
  modified_base 16: mod_base = OTHER; note = 2'-O-methyladenosine-3'-phosphate
  modified_base 17: mod_base = OTHER; note = 2'-O-methylcytidine-3'-phosphate
  modified_base 18: mod_base = OTHER; note = 2'-O-methyladenosine-3'-phosphate
  modified_base 19: mod_base = OTHER; note = 2'-O-methyladenosine-3'-phosphate
  modified_base 20: mod_base = OTHER; note = 2'-O-methylguanosine-3'-phosphate
  modified_base 21: mod_base = OTHER; note = 2'-O-methyladenosine-3'-phosphate ((2S,4R)-1-[29-[[2-(acetylamino)-2-deoxy-beta-D-galactopyra nosyl]oxy]-14,14-bis[[3-[[3-[[5-[[2-(acetylamino)-2-deoxy-b eta-D-galactopyranosyl]oxy]-1-oxopentyl]amino]propyl]amino] -3-oxopropoxy]methyl]-1,12,19,25-tetraoxo-16-oxa-13,20,24-t riazanonacos-1-yl]-4-hydroxy-2-pyrrolidinyl)methyl ester
atgtgaaagtcatcgacaaga

SEQ ID NO: 2625 - RNA, 23 nt, synthetic construct
  source 1..23: mol_type = other RNA
  modified_base 1: mod_base = OTHER; note = 2'-O-methyluridine-3'-phosphorothioate
  modified_base 2: mod_base = OTHER; note = 2'-deoxy-2'-fluorocytidine-3'-phosphorothioate
  modified_base 3: mod_base = OTHER; note = 2'-O-methyluridine-3'-phosphate
  modified_base 4: mod_base = OTHER; note = 2'-O-methyluridine-3'-phosphate
  modified_base 5: mod_base = OTHER; note = 2'-O-methylguanosine-3'-phosphate
  modified_base 6: mod_base = OTHER; note = 2'-deoxy-2'-fluorouridine-3'-phosphate
  modified_base 7: mod_base = OTHER; note = 2'-O-methylcytidine-3'-phosphate
  modified_base 8: mod_base = OTHER; note = 2'-deoxy-2'-fluoroguanosine-3'-phosphate
  modified_base 9: mod_base = OTHER; note = 2'-deoxy-2'-fluoroadenosine-3'-phosphate
  modified_base 10: mod_base = OTHER; note = 2'-O-methyluridine-3'-phosphate
  modified_base 11: mod_base = OTHER; note = 2'-O-methylguanosine-3'-phosphate
  modified_base 12: mod_base = OTHER; note = 2'-O-methyladenosine-3'-phosphate
  modified_base 13: mod_base = OTHER; note = 2'-O-methylcytidine-3'-phosphate
  modified_base 14: mod_base = OTHER; note = 2'-deoxy-2'-fluorouridine-3'-phosphate
  modified_base 15: mod_base = OTHER; note = 2'-O-methyluridine-3'-phosphate
  modified_base 16: mod_base = OTHER; note = 2'-deoxy-2'-fluorouridine-3'-phosphate
  modified_base 17: mod_base = OTHER; note = 2'-O-methylcytidine-3'-phosphate
  modified_base 18: mod_base = OTHER; note = 2'-O-methyladenosine-3'-phosphate
  modified_base 19: mod_base = OTHER; note = 2'-O-methylcytidine-3'-phosphate
  modified_base 20: mod_base = OTHER; note = 2'-O-methyladenosine-3'-phosphate
  modified_base 21: mod_base = OTHER; note = 2'-O-methyluridine-3'-phosphorothioate
  modified_base 22: mod_base = OTHER; note = 2'-O-methyluridine-3'-phosphorothioate
  modified_base 23: mod_base = OTHER; note = 2'-O-methylcytidine
tcttgtcgatgactttcacattc

SEQ ID NO: 2626 - RNA, 21 nt, synthetic construct
  source 1..21: mol_type = other RNA
  modified_base 1: mod_base = OTHER; note = 2'-O-methyladenosine-3'-phosphorothioate
  modified_base 2: mod_base = OTHER; note = 2'-O-methyluridine-3'-phosphorothioate
  modified_base 3: mod_base = OTHER; note = 2'-O-methyladenosine-3'-phosphate
  modified_base 4: mod_base = OTHER; note = 2'-O-methyluridine-3'-phosphate
  modified_base 5: mod_base = OTHER; note = 2'-O-methylguanosine-3'-phosphate
  modified_base 6: mod_base = OTHER; note = 2'-O-methyluridine-3'-phosphate
  modified_base 7: mod_base = OTHER; note = 2'-deoxy-2'-fluoroguanosine-3'-phosphate
  modified_base 8: mod_base = OTHER; note = 2'-O-methylguanosine-3'-phosphate
  modified_base 9: mod_base = OTHER; note = 2'-deoxy-2'-fluorocytidine-3'-phosphate
  modified_base 10: mod_base = OTHER; note = 2'-deoxy-2'-fluorouridine-3'-phosphate
  modified_base 11: mod_base = OTHER; note = 2'-deoxy-2'-fluoroadenosine-3'-phosphate
  modified_base 12: mod_base = OTHER; note = 2'-O-methyladenosine-3'-phosphate
  modified_base 13: mod_base = OTHER; note = 2'-O-methyladenosine-3'-phosphate
  modified_base 14: mod_base = OTHER; note = 2'-O-methylguanosine-3'-phosphate
  modified_base 15: mod_base = OTHER; note = 2'-O-methylcytidine-3'-phosphate
  modified_base 16: mod_base = OTHER; note = 2'-O-methyladenosine-3'-phosphate
  modified_base 17: mod_base = OTHER; note = 2'-O-methyladenosine-3'-phosphate
  modified_base 18: mod_base = OTHER; note = 2'-O-methyluridine-3'-phosphate
  modified_base 19: mod_base = OTHER; note = 2'-O-methyladenosine-3'-phosphate
  modified_base 20: mod_base = OTHER; note = 2'-O-methylguanosine-3'-phosphate
  modified_base 21: mod_base = OTHER; note = 2'-O-methyladenosine-3'-phosphate ((2S,4R)-1-[29-[[2-(acetylamino)-2-deoxy-beta-D-galactopyra nosyl]oxy]-14,14-bis[[3-[[3-[[5-[[2-(acetylamino)-2-deoxy-b eta-D-galactopyranosyl]oxy]-1-oxopentyl]amino]propyl]amino] -3-oxopropoxy]methyl]-1,12,19,25-tetraoxo-16-oxa-13,20,24-t riazanonacos-1-yl]-4-hydroxy-2-pyrrolidinyl)methyl ester
atatgtggctaaagcaataga

SEQ ID NO: 2627 - RNA, 23 nt, synthetic construct
  source 1..23: mol_type = other RNA
  modified_base 1: mod_base = OTHER; note = 2'-O-methyluridine-3'-phosphorothioate
  modified_base 2: mod_base = OTHER; note = 2'-deoxy-2'-fluorocytidine-3'-phosphorothioate
  modified_base 3: mod_base = OTHER; note = 2'-O-methyluridine-3'-phosphate
  modified_base 4: mod_base = OTHER; note = 2'-O-methyladenosine-3'-phosphate
  modified_base 5: mod_base = OTHER; note = 2'-O-methyluridine-3'-phosphate
  modified_base 6: mod_base = OTHER; note = 2'-deoxy-2'-fluorouridine-3'-phosphate
  modified_base 7: mod_base = OTHER; note = 2'-O-methylguanosine-3'-phosphate
  modified_base 8: mod_base = OTHER; note = 2'-deoxy-2'-fluorocytidine-3'-phosphate
  modified_base 9: mod_base = OTHER; note = 2'-deoxy-2'-fluorouridine-3'-phosphate
  modified_base 10: mod_base = OTHER; note = 2'-O-methyluridine-3'-phosphate
  modified_base 11: mod_base = OTHER; note = 2'-O-methyluridine-3'-phosphate
  modified_base 12: mod_base = OTHER; note = 2'-O-methyladenosine-3'-phosphate
  modified_base 13: mod_base = OTHER; note = 2'-O-methylguanosine-3'-phosphate
  modified_base 14: mod_base = OTHER; note = 2'-deoxy-2'-fluorocytidine-3'-phosphate
  modified_base 15: mod_base = OTHER; note = 2'-O-methylcytidine-3'-phosphate
  modified_base 16: mod_base = OTHER; note = 2'-deoxy-2'-fluoroadenosine-3'-phosphate
  modified_base 17: mod_base = OTHER; note = 2'-O-methylcytidine-3'-phosphate
  modified_base 18: mod_base = OTHER; note = 2'-O-methyladenosine-3'-phosphate
  modified_base 19: mod_base = OTHER; note = 2'-O-methyluridine-3'-phosphate
  modified_base 20: mod_base = OTHER; note = 2'-O-methyladenosine-3'-phosphate
  modified_base 21: mod_base = OTHER; note = 2'-O-methyluridine-3'-phosphorothioate
  modified_base 22: mod_base = OTHER; note = 2'-O-methylguanosine-3'-phosphorothioate
  modified_base 23: mod_base = OTHER; note = 2'-O-methylcytidine
tctattgctttagccacatatgc

SEQ ID NO: 2628 - RNA, 21 nt, synthetic construct
  source 1..21: mol_type = other RNA
  modified_base 1: mod_base = OTHER; note = 2'-O-methyluridine-3'-phosphorothioate
  modified_base 2: mod_base = OTHER; note = 2'-O-methyladenosine-3'-phosphorothioate
  modified_base 3: mod_base = OTHER; note = 2'-O-methyluridine-3'-phosphate
  modified_base 4: mod_base = OTHER; note = 2'-O-methylguanosine-3'-phosphate
  modified_base 5: mod_base = OTHER; note = 2'-O-methyluridine-3'-phosphate
  modified_base 6: mod_base = OTHER; note = 2'-O-methylguanosine-3'-phosphate
  modified_base 7: mod_base = OTHER; note = 2'-deoxy-2'-fluoroguanosine-3'-phosphate
  modified_base 8: mod_base = OTHER; note = 2'-O-methylcytidine-3'-phosphate
  modified_base 9: mod_base = OTHER; note = 2'-deoxy-2'-fluorouridine-3'-phosphate
  modified_base 10: mod_base = OTHER; note = 2'-deoxy-2'-fluoroadenosine-3'-phosphate
  modified_base 11: mod_base = OTHER; note = 2'-deoxy-2'-fluoroadenosine-3'-phosphate
  modified_base 12: mod_base = OTHER; note = 2'-O-methyladenosine-3'-phosphate
  modified_base 13: mod_base = OTHER; note = 2'-O-methylguanosine-3'-phosphate
  modified_base 14: mod_base = OTHER; note = 2'-O-methylcytidine-3'-phosphate
  modified_base 15: mod_base = OTHER; note = 2'-O-methyladenosine-3'-phosphate
  modified_base 16: mod_base = OTHER; note = 2'-O-methyladenosine-3'-phosphate
  modified_base 17: mod_base = OTHER; note = 2'-O-methyluridine-3'-phosphate
  modified_base 18: mod_base = OTHER; note = 2'-O-methyladenosine-3'-phosphate
  modified_base 19: mod_base = OTHER; note = 2'-O-methylguanosine-3'-phosphate
  modified_base 20: mod_base = OTHER; note = 2'-O-methyladenosine-3'-phosphate
  modified_base 21: mod_base = OTHER; note = 2'-O-methylcytidine-3'-phosphate ((2S,4R)-1-[29-[[2-(acetylamino)-2-deoxy-beta-D-galactopyra nosyl]oxy]-14,14-bis[[3-[[3-[[5-[[2-(acetylamino)-2-deoxy-b eta-D-galactopyranosyl]oxy]-1-oxopentyl]amino]propyl]amino] -3-oxopropoxy]methyl]-1,12,19,25-tetraoxo-16-oxa-13,20,24-t riazanonacos-1-yl]-4-hydroxy-2-pyrrolidinyl)methyl ester
tatgtggctaaagcaatagac

SEQ ID NO: 2629 - RNA, 23 nt, synthetic construct
  source 1..23: mol_type = other RNA
  modified_base 1: mod_base = OTHER; note = 2'-O-methylguanosine-3'-phosphorothioate
  modified_base 2: mod_base = OTHER; note = 2'-deoxy-2'-fluorouridine-3'-phosphorothioate
  modified_base 3: mod_base = OTHER; note = 2'-O-methylcytidine-3'-phosphate
  modified_base 4: mod_base = OTHER; note = 2'-O-methyluridine-3'-phosphate
  modified_base 5: mod_base = OTHER; note = 2'-O-methyladenosine-3'-phosphate
  modified_base 6: mod_base = OTHER; note = 2'-deoxy-2'-fluorouridine-3'-phosphate
  modified_base 7: mod_base = OTHER; note = 2'-O-methyluridine-3'-phosphate
  modified_base 8: mod_base = OTHER; note = 2'-deoxy-2'-fluoroguanosine-3'-phosphate
  modified_base 9: mod_base = OTHER; note = 2'-deoxy-2'-fluorocytidine-3'-phosphate
  modified_base 10: mod_base = OTHER; note = 2'-O-methyluridine-3'-phosphate
  modified_base 11: mod_base = OTHER; note = 2'-O-methyluridine-3'-phosphate
  modified_base 12: mod_base = OTHER; note = 2'-O-methyluridine-3'-phosphate
  modified_base 13: mod_base = OTHER; note = 2'-O-methyladenosine-3'-phosphate
  modified_base 14: mod_base = OTHER; note = 2'-deoxy-2'-fluoroguanosine-3'-phosphate
  modified_base 15: mod_base = OTHER; note = 2'-O-methylcytidine-3'-phosphate
  modified_base 16: mod_base = OTHER; note = 2'-deoxy-2'-fluorocytidine-3'-phosphate
  modified_base 17: mod_base = OTHER; note = 2'-O-methyladenosine-3'-phosphate
  modified_base 18: mod_base = OTHER; note = 2'-O-methylcytidine-3'-phosphate
  modified_base 19: mod_base = OTHER; note = 2'-O-methyladenosine-3'-phosphate
  modified_base 20: mod_base = OTHER; note = 2'-O-methyluridine-3'-phosphate
  modified_base 21: mod_base = OTHER; note = 2'-O-methyladenosine-3'-phosphorothioate
  modified_base 22: mod_base = OTHER; note = 2'-O-methyluridine-3'-phosphorothioate
  modified_base 23: mod_base = OTHER; note = 2'-O-methylguanosine
gtctattgctttagccacatatg

SEQ ID NO: 2630 - RNA, 21 nt, synthetic construct
  source 1..21: mol_type = other RNA
  modified_base 1: mod_base = OTHER; note = 2'-O-methylcytidine-3'-phosphorothioate
  modified_base 2: mod_base = OTHER; note = 2'-O-methyluridine-3'-phosphorothioate
  modified_base 3: mod_base = OTHER; note = 2'-O-methylguanosine-3'-phosphate
  modified_base 4: mod_base = OTHER; note = 2'-O-methylcytidine-3'-phosphate
  modified_base 5: mod_base = OTHER; note = 2'-O-methyladenosine-3'-phosphate
  modified_base 6: mod_base = OTHER; note = 2'-O-methyluridine-3'-phosphate
  modified_base 7: mod_base = OTHER; note = 2'-deoxy-2'-fluoroadenosine-3'-phosphate
  modified_base 8: mod_base = OTHER; note = 2'-O-methyluridine-3'-phosphate
  modified_base 9: mod_base = OTHER; note = 2'-deoxy-2'-fluoroguanosine-3'-phosphate
  modified_base 10: mod_base = OTHER; note = 2'-deoxy-2'-fluorouridine-3'-phosphate
  modified_base 11: mod_base = OTHER; note = 2'-deoxy-2'-fluoroguanosine-3'-phosphate
  modified_base 12: mod_base = OTHER; note = 2'-O-methylguanosine-3'-phosphate
  modified_base 13: mod_base = OTHER; note = 2'-O-methylcytidine-3'-phosphate
  modified_base 14: mod_base = OTHER; note = 2'-O-methyluridine-3'-phosphate
  modified_base 15: mod_base = OTHER; note = 2'-O-methyladenosine-3'-phosphate
  modified_base 16: mod_base = OTHER; note = 2'-O-methyladenosine-3'-phosphate
  modified_base 17: mod_base = OTHER; note = 2'-O-methyladenosine-3'-phosphate
  modified_base 18: mod_base = OTHER; note = 2'-O-methylguanosine-3'-phosphate
  modified_base 19: mod_base = OTHER; note = 2'-O-methylcytidine-3'-phosphate
  modified_base 20: mod_base = OTHER; note = 2'-O-methyladenosine-3'-phosphate
  modified_base 21: mod_base = OTHER; note = 2'-O-methyladenosine-3'-phosphate ((2S,4R)-1-[29-[[2-(acetylamino)-2-deoxy-beta-D-galactopyra nosyl]oxy]-14,14-bis[[3-[[3-[[5-[[2-(acetylamino)-2-deoxy-b eta-D-galactopyranosyl]oxy]-1-oxopentyl]amino]propyl]amino] -3-oxopropoxy]methyl]-1,12,19,25-tetraoxo-16-oxa-13,20,24-t riazanonacos-1-yl]-4-hydroxy-2-pyrrolidinyl)methyl ester
ctgcatatgtggctaaagcaa

SEQ ID NO: 2631 - RNA, 23 nt, synthetic construct
  source 1..23: mol_type = other RNA
  modified_base 1: mod_base = OTHER; note = 2'-O-methyluridine-3'-phosphorothioate
  modified_base 2: mod_base = OTHER; note = 2'-deoxy-2'-fluorouridine-3'-phosphorothioate
  modified_base 3: mod_base = OTHER; note = 2'-O-methylguanosine-3'-phosphate
  modified_base 4: mod_base = OTHER; note = 2'-O-methylcytidine-3'-phosphate
  modified_base 5: mod_base = OTHER; note = 2'-O-methyluridine-3'-phosphate
  modified_base 6: mod_base = OTHER; note = 2'-deoxy-2'-fluorouridine-3'-phosphate
  modified_base 7: mod_base = OTHER; note = 2'-O-methyluridine-3'-phosphate
  modified_base 8: mod_base = OTHER; note = 2'-deoxy-2'-fluoroadenosine-3'-phosphate
  modified_base 9: mod_base = OTHER; note = 2'-deoxy-2'-fluoroguanosine-3'-phosphate
  modified_base 10: mod_base = OTHER; note = 2'-O-methylcytidine-3'-phosphate
  modified_base 11: mod_base = OTHER; note = 2'-O-methylcytidine-3'-phosphate
  modified_base 12: mod_base = OTHER; note = 2'-O-methyladenosine-3'-phosphate
  modified_base 13: mod_base = OTHER; note = 2'-O-methylcytidine-3'-phosphate
  modified_base 14: mod_base = OTHER; note = 2'-deoxy-2'-fluoroadenosine-3'-phosphate
  modified_base 15: mod_base = OTHER; note = 2'-O-methyluridine-3'-phosphate
  modified_base 16: mod_base = OTHER; note = 2'-deoxy-2'-fluoroadenosine-3'-phosphate
  modified_base 17: mod_base = OTHER; note = 2'-O-methyluridine-3'-phosphate
  modified_base 18: mod_base = OTHER; note = 2'-O-methylguanosine-3'-phosphate
  modified_base 19: mod_base = OTHER; note = 2'-O-methylcytidine-3'-phosphate
  modified_base 20: mod_base = OTHER; note = 2'-O-methyladenosine-3'-phosphate
  modified_base 21: mod_base = OTHER; note = 2'-O-methylguanosine-3'-phosphorothioate
  modified_base 22: mod_base = OTHER; note = 2'-O-methylcytidine-3'-phosphorothioate
  modified_base 23: mod_base = OTHER; note = 2'-O-methyladenosine
ttgctttagccacatatgcagca

SEQ ID NO: 2632 - RNA, 21 nt, synthetic construct
  source 1..21: mol_type = other RNA
  modified_base 1: mod_base = OTHER; note = 2'-O-methylguanosine-3'-phosphorothioate
  modified_base 2: mod_base = OTHER; note = 2'-O-methylcytidine-3'-phosphorothioate
  modified_base 3: mod_base = OTHER; note = 2'-O-methyluridine-3'-phosphate
  modified_base 4: mod_base = OTHER; note = 2'-O-methylguanosine-3'-phosphate
  modified_base 5: mod_base = OTHER; note = 2'-O-methylcytidine-3'-phosphate
  modified_base 6: mod_base = OTHER; note = 2'-O-methyladenosine-3'-phosphate
  modified_base 7: mod_base = OTHER; note = 2'-deoxy-2'-fluorouridine-3'-phosphate
  modified_base 8: mod_base = OTHER; note = 2'-O-methyladenosine-3'-phosphate
  modified_base 9: mod_base = OTHER; note = 2'-deoxy-2'-fluorouridine-3'-phosphate
  modified_base 10: mod_base = OTHER; note = 2'-deoxy-2'-fluoroguanosine-3'-phosphate
  modified_base 11: mod_base = OTHER; note = 2'-deoxy-2'-fluorouridine-3'-phosphate
  modified_base 12: mod_base = OTHER; note = 2'-O-methylguanosine-3'-phosphate
  modified_base 13: mod_base = OTHER; note = 2'-O-methylguanosine-3'-phosphate
  modified_base 14: mod_base = OTHER; note = 2'-O-methylcytidine-3'-phosphate
  modified_base 15: mod_base = OTHER; note = 2'-O-methyluridine-3'-phosphate
  modified_base 16: mod_base = OTHER; note = 2'-O-methyladenosine-3'-phosphate
  modified_base 17: mod_base = OTHER; note = 2'-O-methyladenosine-3'-phosphate
  modified_base 18: mod_base = OTHER; note = 2'-O-methyladenosine-3'-phosphate
  modified_base 19: mod_base = OTHER; note = 2'-O-methylguanosine-3'-phosphate
  modified_base 20: mod_base = OTHER; note = 2'-O-methylcytidine-3'-phosphate
  modified_base 21: mod_base = OTHER; note = 2'-O-methyladenosine-3'-phosphate ((2S,4R)-1-[29-[[2-(acetylamino)-2-deoxy-beta-D-galactopyra nosyl]oxy]-14,14-bis[[3-[[3-[[5-[[2-(acetylamino)-2-deoxy-b eta-D-galactopyranosyl]oxy]-1-oxopentyl]amino]propyl]amino] -3-oxopropoxy]methyl]-1,12,19,25-tetraoxo-16-oxa-13,20,24-t riazanonacos-1-yl]-4-hydroxy-2-pyrrolidinyl)methyl ester
gctgcatatgtggctaaagca

SEQ ID NO: 2633 - RNA, 23 nt, synthetic construct
  source 1..23: mol_type = other RNA
  modified_base 1: mod_base = OTHER; note = 2'-O-methyluridine-3'-phosphorothioate
  modified_base 2: mod_base = OTHER; note = 2'-deoxy-2'-fluoroguanosine-3'-phosphorothioate
  modified_base 3: mod_base = OTHER; note = 2'-O-methylcytidine-3'-phosphate
  modified_base 4: mod_base = OTHER; note = 2'-O-methyluridine-3'-phosphate
  modified_base 5: mod_base = OTHER; note = 2'-O-methyluridine-3'-phosphate
  modified_base 6: mod_base = OTHER; note = 2'-deoxy-2'-fluorouridine-3'-phosphate
  modified_base 7: mod_base = OTHER; note = 2'-O-methyladenosine-3'-phosphate
  modified_base 8: mod_base = OTHER; note = 2'-deoxy-2'-fluoroguanosine-3'-phosphate
  modified_base 9: mod_base = OTHER; note = 2'-deoxy-2'-fluorocytidine-3'-phosphate
  modified_base 10: mod_base = OTHER; note = 2'-O-methylcytidine-3'-phosphate
  modified_base 11: mod_base = OTHER; note = 2'-O-methyladenosine-3'-phosphate
  modified_base 12: mod_base = OTHER; note = 2'-O-methylcytidine-3'-phosphate
  modified_base 13: mod_base = OTHER; note = 2'-O-methyladenosine-3'-phosphate
  modified_base 14: mod_base = OTHER; note = 2'-deoxy-2'-fluorouridine-3'-phosphate
  modified_base 15: mod_base = OTHER; note = 2'-O-methyladenosine-3'-phosphate
  modified_base 16: mod_base = OTHER; note = 2'-deoxy-2'-fluorouridine-3'-phosphate
  modified_base 17: mod_base = OTHER; note = 2'-O-methylguanosine-3'-phosphate
  modified_base 18: mod_base = OTHER; note = 2'-O-methylcytidine-3'-phosphate
  modified_base 19: mod_base = OTHER; note = 2'-O-methyladenosine-3'-phosphate
  modified_base 20: mod_base = OTHER; note = 2'-O-methylguanosine-3'-phosphate
  modified_base 21: mod_base = OTHER; note = 2'-O-methylcytidine-3'-phosphorothioate
  modified_base 22: mod_base = OTHER; note = 2'-O-methyladenosine-3'-phosphorothioate
  modified_base 23: mod_base = OTHER; note = 2'-O-methyladenosine
tgctttagccacatatgcagcaa

SEQ ID NO: 2634 - RNA, 21 nt, synthetic construct
  source 1..21: mol_type = other RNA
  modified_base 1: mod_base = OTHER; note = 2'-O-methyladenosine-3'-phosphorothioate
  modified_base 2: mod_base = OTHER; note = 2'-O-methylguanosine-3'-phosphorothioate
  modified_base 3: mod_base = OTHER; note = 2'-O-methyladenosine-3'-phosphate
  modified_base 4: mod_base = OTHER; note = 2'-O-methylcytidine-3'-phosphate
  modified_base 5: mod_base = OTHER; note = 2'-O-methylguanosine-3'-phosphate
  modified_base 6: mod_base = OTHER; note = 2'-O-methyladenosine-3'-phosphate
  modified_base 7: mod_base = OTHER; note = 2'-deoxy-2'-fluorocytidine-3'-phosphate
  modified_base 8: mod_base = OTHER; note = 2'-O-methyladenosine-3'-phosphate
  modified_base 9: mod_base = OTHER; note = 2'-deoxy-2'-fluoroguanosine-3'-phosphate
  modified_base 10: mod_base = OTHER; note = 2'-deoxy-2'-fluorouridine-3'-phosphate
  modified_base 11: mod_base = OTHER; note = 2'-deoxy-2'-fluoroguanosine-3'-phosphate
  modified_base 12: mod_base = OTHER; note = 2'-O-methylguanosine-3'-phosphate
  modified_base 13: mod_base = OTHER; note = 2'-O-methyladenosine-3'-phosphate
  modified_base 14: mod_base = OTHER; note = 2'-O-methylcytidine-3'-phosphate
  modified_base 15: mod_base = OTHER; note = 2'-O-methyluridine-3'-phosphate
  modified_base 16: mod_base = OTHER; note = 2'-O-methyluridine-3'-phosphate
  modified_base 17: mod_base = OTHER; note = 2'-O-methylguanosine-3'-phosphate
  modified_base 18: mod_base = OTHER; note = 2'-O-methylcytidine-3'-phosphate
  modified_base 19: mod_base = OTHER; note = 2'-O-methyluridine-3'-phosphate
  modified_base 20: mod_base = OTHER; note = 2'-O-methylguanosine-3'-phosphate
  modified_base 21: mod_base = OTHER; note = 2'-O-methylcytidine-3'-phosphate ((2S,4R)-1-[29-[[2-(acetylamino)-2-deoxy-beta-D-galactopyra nosyl]oxy]-14,14-bis[[3-[[3-[[5-[[2-(acetylamino)-2-deoxy-b eta-D-galactopyranosyl]oxy]-1-oxopentyl]amino]propyl]amino] -3-oxopropoxy]methyl]-1,12,19,25-tetraoxo-16-oxa-13,20,24-t riazanonacos-1-yl]-4-hydroxy-2-pyrrolidinyl)methyl ester
agacgacagtggacttgctgc

SEQ ID NO: 2635 - RNA, 23 nt, synthetic construct
  source 1..23: mol_type = other RNA
  modified_base 1: mod_base = OTHER; note = 2'-O-methylguanosine-3'-phosphorothioate
  modified_base 2: mod_base = OTHER; note = 2'-deoxy-2'-fluorocytidine-3'-phosphorothioate
  modified_base 3: mod_base = OTHER; note = 2'-O-methyladenosine-3'-phosphate
  modified_base 4: mod_base = OTHER; note = 2'-O-methylguanosine-3'-phosphate
  modified_base 5: mod_base = OTHER; note = 2'-O-methylcytidine-3'-phosphate
  modified_base 6: mod_base = OTHER; note = 2'-deoxy-2'-fluoroadenosine-3'-phosphate
  modified_base 7: mod_base = OTHER; note = 2'-O-methyladenosine-3'-phosphate
  modified_base 8: mod_base = OTHER; note = 2'-deoxy-2'-fluoroguanosine-3'-phosphate
  modified_base 9: mod_base = OTHER; note = 2'-deoxy-2'-fluorouridine-3'-phosphate
  modified_base 10: mod_base = OTHER; note = 2'-O-methylcytidine-3'-phosphate
  modified_base 11: mod_base = OTHER; note = 2'-O-methylcytidine-3'-phosphate
  modified_base 12: mod_base = OTHER; note = 2'-O-methyladenosine-3'-phosphate
  modified_base 13: mod_base = OTHER; note = 2'-O-methylcytidine-3'-phosphate
  modified_base 14: mod_base = OTHER; note = 2'-deoxy-2'-fluorouridine-3'-phosphate
  modified_base 15: mod_base = OTHER; note = 2'-O-methylguanosine-3'-phosphate
  modified_base 16: mod_base = OTHER; note = 2'-deoxy-2'-fluorouridine-3'-phosphate
  modified_base 17: mod_base = OTHER; note = 2'-O-methylcytidine-3'-phosphate
  modified_base 18: mod_base = OTHER; note = 2'-O-methylguanosine-3'-phosphate
  modified_base 19: mod_base = OTHER; note = 2'-O-methyluridine-3'-phosphate
  modified_base 20: mod_base = OTHER; note = 2'-O-methylcytidine-3'-phosphate
  modified_base 21: mod_base = OTHER; note = 2'-O-methyluridine-3'-phosphorothioate
  modified_base 22: mod_base = OTHER; note = 2'-O-methylcytidine-3'-phosphorothioate
  modified_base 23: mod_base = OTHER; note = 2'-O-methylcytidine
gcagcaagtccactgtcgtctcc

SEQ ID NO: 2636 - RNA, 21 nt, synthetic construct
  source 1..21: mol_type = other RNA
  modified_base 1: mod_base = OTHER; note = 2'-O-methylguanosine-3'-phosphorothioate
  modified_base 2: mod_base = OTHER; note = 2'-O-methyladenosine-3'-phosphorothioate
  modified_base 3: mod_base = OTHER; note = 2'-O-methylcytidine-3'-phosphate
  modified_base 4: mod_base = OTHER; note = 2'-O-methylguanosine-3'-phosphate
  modified_base 5: mod_base = OTHER; note = 2'-O-methyladenosine-3'-phosphate
  modified_base 6: mod_base = OTHER; note = 2'-O-methylcytidine-3'-phosphate
  modified_base 7: mod_base = OTHER; note = 2'-deoxy-2'-fluoroadenosine-3'-phosphate
  modified_base 8: mod_base = OTHER; note = 2'-O-methylguanosine-3'-phosphate
  modified_base 9: mod_base = OTHER; note = 2'-deoxy-2'-fluorouridine-3'-phosphate
  modified_base 10: mod_base = OTHER; note = 2'-deoxy-2'-fluoroguanosine-3'-phosphate
  modified_base 11: mod_base = OTHER; note = 2'-deoxy-2'-fluoroguanosine-3'-phosphate
  modified_base 12: mod_base = OTHER; note = 2'-O-methyladenosine-3'-phosphate
  modified_base 13: mod_base = OTHER; note = 2'-O-methylcytidine-3'-phosphate
  modified_base 14: mod_base = OTHER; note = 2'-O-methyluridine-3'-phosphate
  modified_base 15: mod_base = OTHER; note = 2'-O-methyluridine-3'-phosphate
  modified_base 16: mod_base = OTHER; note = 2'-O-methylguanosine-3'-phosphate
  modified_base 17: mod_base = OTHER; note = 2'-O-methylcytidine-3'-phosphate
  modified_base 18: mod_base = OTHER; note = 2'-O-methyluridine-3'-phosphate
  modified_base 19: mod_base = OTHER; note = 2'-O-methylguanosine-3'-phosphate
  modified_base 20: mod_base = OTHER; note = 2'-O-methylcytidine-3'-phosphate
  modified_base 21: mod_base = OTHER; note = 2'-O-methyladenosine-3'-phosphate ((2S,4R)-1-[29-[[2-(acetylamino)-2-deoxy-beta-D-galactopyra nosyl]oxy]-14,14-bis[[3-[[3-[[5-[[2-(acetylamino)-2-deoxy-b eta-D-galactopyranosyl]oxy]-1-oxopentyl]amino]propyl]amino] -3-oxopropoxy]methyl]-1,12,19,25-tetraoxo-16-oxa-13,20,24-t riazanonacos-1-yl]-4-hydroxy-2-pyrrolidinyl)methyl ester
gacgacagtggacttgctgca

SEQ ID NO: 2637 - RNA, 23 nt, synthetic construct
  source 1..23: mol_type = other RNA
  modified_base 1: mod_base = OTHER; note = 2'-O-methyluridine-3'-phosphorothioate
  modified_base 2: mod_base = OTHER; note = 2'-deoxy-2'-fluoroguanosine-3'-phosphorothioate
  modified_base 3: mod_base = OTHER; note = 2'-O-methylcytidine-3'-phosphate
  modified_base 4: mod_base = OTHER; note = 2'-O-methyladenosine-3'-phosphate
  modified_base 5: mod_base = OTHER; note = 2'-O-methylguanosine-3'-phosphate
  modified_base 6: mod_base = OTHER; note = 2'-deoxy-2'-fluorocytidine-3'-phosphate
  modified_base 7: mod_base = OTHER; note = 2'-O-methyladenosine-3'-phosphate
  modified_base 8: mod_base = OTHER; note = 2'-deoxy-2'-fluoroadenosine-3'-phosphate
  modified_base 9: mod_base = OTHER; note = 2'-deoxy-2'-fluoroguanosine-3'-phosphate
  modified_base 10: mod_base = OTHER; note = 2'-O-methyluridine-3'-phosphate
  modified_base 11: mod_base = OTHER; note = 2'-O-methylcytidine-3'-phosphate
  modified_base 12: mod_base = OTHER; note = 2'-O-methylcytidine-3'-phosphate
  modified_base 13: mod_base = OTHER; note = 2'-O-methyladenosine-3'-phosphate
  modified_base 14: mod_base = OTHER; note = 2'-deoxy-2'-fluorocytidine-3'-phosphate
  modified_base 15: mod_base = OTHER; note = 2'-O-methyluridine-3'-phosphate
  modified_base 16: mod_base = OTHER; note = 2'-deoxy-2'-fluoroguanosine-3'-phosphate
  modified_base 17: mod_base = OTHER; note = 2'-O-methyluridine-3'-phosphate
  modified_base 18: mod_base = OTHER; note = 2'-O-methylcytidine-3'-phosphate
  modified_base 19: mod_base = OTHER; note = 2'-O-methylguanosine-3'-phosphate
  modified_base 20: mod_base = OTHER; note = 2'-O-methyluridine-3'-phosphate
  modified_base 21: mod_base = OTHER; note = 2'-O-methylcytidine-3'-phosphorothioate
  modified_base 22: mod_base = OTHER; note = 2'-O-methyluridine-3'-phosphorothioate
  modified_base 23: mod_base = OTHER; note = 2'-O-methylcytidine
tgcagcaagtccactgtcgtctc

SEQ ID NO: 2638 - RNA, 21 nt, synthetic construct
  source 1..21: mol_type = other RNA
  modified_base 1: mod_base = OTHER; note = 2'-O-methyluridine-3'-phosphorothioate
  modified_base 2: mod_base = OTHER; note = 2'-O-methyluridine-3'-phosphorothioate
  modified_base 3: mod_base = OTHER; note = 2'-O-methylguanosine-3'-phosphate
  modified_base 4: mod_base = OTHER; note = 2'-O-methylguanosine-3'-phosphate
  modified_base 5: mod_base = OTHER; note = 2'-O-methyladenosine-3'-phosphate
  modified_base 6: mod_base = OTHER; note = 2'-O-methylguanosine-3'-phosphate
  modified_base 7: mod_base = OTHER; note = 2'-deoxy-2'-fluoroadenosine-3'-phosphate
  modified_base 8: mod_base = OTHER; note = 2'-O-methylcytidine-3'-phosphate
  modified_base 9: mod_base = OTHER; note = 2'-deoxy-2'-fluoroguanosine-3'-phosphate
  modified_base 10: mod_base = OTHER; note = 2'-deoxy-2'-fluoroadenosine-3'-phosphate
  modified_base 11: mod_base = OTHER; note = 2'-deoxy-2'-fluorocytidine-3'-phosphate
  modified_base 12: mod_base = OTHER; note = 2'-O-methyladenosine-3'-phosphate
  modified_base 13: mod_base = OTHER; note = 2'-O-methylguanosine-3'-phosphate
  modified_base 14: mod_base = OTHER; note = 2'-O-methyluridine-3'-phosphate
  modified_base 15: mod_base = OTHER; note = 2'-O-methylguanosine-3'-phosphate
  modified_base 16: mod_base = OTHER; note = 2'-O-methylguanosine-3'-phosphate
  modified_base 17: mod_base = OTHER; note = 2'-O-methyladenosine-3'-phosphate
  modified_base 18: mod_base = OTHER; note = 2'-O-methylcytidine-3'-phosphate
  modified_base 19: mod_base = OTHER; note = 2'-O-methyluridine-3'-phosphate
  modified_base 20: mod_base = OTHER; note = 2'-O-methyluridine-3'-phosphate
  modified_base 21: mod_base = OTHER; note = 2'-O-methylguanosine-3'-phosphate ((2S,4R)-1-[29-[[2-(acetylamino)-2-deoxy-beta-D-galactopyra nosyl]oxy]-14,14-bis[[3-[[3-[[5-[[2-(acetylamino)-2-deoxy-b eta-D-galactopyranosyl]oxy]-1-oxopentyl]amino]propyl]amino] -3-oxopropoxy]methyl]-1,12,19,25-tetraoxo-16-oxa-13,20,24-t riazanonacos-1-yl]-4-hydroxy-2-pyrrolidinyl)methyl ester
ttggagacgacagtggacttg

SEQ ID NO: 2639 - RNA, 23 nt, synthetic construct
  source 1..23: mol_type = other RNA
  modified_base 1: mod_base = OTHER; note = 2'-O-methylcytidine-3'-phosphorothioate
  modified_base 2: mod_base = OTHER; note = 2'-deoxy-2'-fluoroadenosine-3'-phosphorothioate
  modified_base 3: mod_base = OTHER; note = 2'-O-methyladenosine-3'-phosphate
  modified_base 4: mod_base = OTHER; note = 2'-O-methylguanosine-3'-phosphate
  modified_base 5: mod_base = OTHER; note = 2'-O-methyluridine-3'-phosphate
  modified_base 6: mod_base = OTHER; note = 2'-deoxy-2'-fluorocytidine-3'-phosphate
  modified_base 7: mod_base = OTHER; note = 2'-O-methylcytidine-3'-phosphate
  modified_base 8: mod_base = OTHER; note = 2'-deoxy-2'-fluoroadenosine-3'-phosphate
  modified_base 9: mod_base = OTHER; note = 2'-deoxy-2'-fluorocytidine-3'-phosphate
  modified_base 10: mod_base = OTHER; note = 2'-O-methyluridine-3'-phosphate
  modified_base 11: mod_base = OTHER; note = 2'-O-methylguanosine-3'-phosphate
  modified_base 12: mod_base = OTHER; note = 2'-O-methyluridine-3'-phosphate
  modified_base 13: mod_base = OTHER; note = 2'-O-methylcytidine-3'-phosphate
  modified_base 14: mod_base = OTHER; note = 2'-deoxy-2'-fluoroguanosine-3'-phosphate
  modified_base 15: mod_base = OTHER; note = 2'-O-methyluridine-3'-phosphate
  modified_base 16: mod_base = OTHER; note = 2'-deoxy-2'-fluorocytidine-3'-phosphate
  modified_base 17: mod_base = OTHER; note = 2'-O-methyluridine-3'-phosphate
  modified_base 18: mod_base = OTHER; note = 2'-O-methylcytidine-3'-phosphate
  modified_base 19: mod_base = OTHER; note = 2'-O-methylcytidine-3'-phosphate
  modified_base 20: mod_base = OTHER; note = 2'-O-methyladenosine-3'-phosphate
  modified_base 21: mod_base = OTHER; note = 2'-O-methyladenosine-3'-phosphorothioate
  modified_base 22: mod_base = OTHER; note = 2'-O-methyladenosine-3'-phosphorothioate
  modified_base 23: mod_base = OTHER; note = 2'-O-methyladenosine
caagtccactgtcgtctccaaaa

SEQ ID NO: 2640 - RNA, 21 nt, synthetic construct
  source 1..21: mol_type = other RNA
  modified_base 1: mod_base = OTHER; note = 2'-O-methyluridine-3'-phosphorothioate
  modified_base 2: mod_base = OTHER; note = 2'-O-methyluridine-3'-phosphorothioate
  modified_base 3: mod_base = OTHER; note = 2'-O-methyluridine-3'-phosphate
  modified_base 4: mod_base = OTHER; note = 2'-O-methylguanosine-3'-phosphate
  modified_base 5: mod_base = OTHER; note = 2'-O-methylguanosine-3'-phosphate
  modified_base 6: mod_base = OTHER; note = 2'-O-methyladenosine-3'-phosphate
  modified_base 7: mod_base = OTHER; note = 2'-deoxy-2'-fluoroguanosine-3'-phosphate
  modified_base 8: mod_base = OTHER; note = 2'-O-methyladenosine-3'-phosphate
  modified_base 9: mod_base = OTHER; note = 2'-deoxy-2'-fluorocytidine-3'-phosphate
  modified_base 10: mod_base = OTHER; note = 2'-deoxy-2'-fluoroguanosine-3'-phosphate
  modified_base 11: mod_base = OTHER; note = 2'-deoxy-2'-fluoroadenosine-3'-phosphate
  modified_base 12: mod_base = OTHER; note = 2'-O-methylcytidine-3'-phosphate
  modified_base 13: mod_base = OTHER; note = 2'-O-methyladenosine-3'-phosphate
  modified_base 14: mod_base = OTHER; note = 2'-O-methylguanosine-3'-phosphate
  modified_base 15: mod_base = OTHER; note = 2'-O-methyluridine-3'-phosphate
  modified_base 16: mod_base = OTHER; note = 2'-O-methylguanosine-3'-phosphate
  modified_base 17: mod_base = OTHER; note = 2'-O-methylguanosine-3'-phosphate
  modified_base 18: mod_base = OTHER; note = 2'-O-methyladenosine-3'-phosphate
  modified_base 19: mod_base = OTHER; note = 2'-O-methylcytidine-3'-phosphate
  modified_base 20: mod_base = OTHER; note = 2'-O-methyluridine-3'-phosphate
  modified_base 21: mod_base = OTHER; note = 2'-O-methyluridine-3'-phosphate ((2S,4R)-1-[29-[[2-(acetylamino)-2-deoxy-beta-D-galactopyra nosyl]oxy]-14,14-bis[[3-[[3-[[5-[[2-(acetylamino)-2-deoxy-b eta-D-galactopyranosyl]oxy]-1-oxopentyl]amino]propyl]amino] -3-oxopropoxy]methyl]-1,12,19,25-tetraoxo-16-oxa-13,20,24-t riazanonacos-1-yl]-4-hydroxy-2-pyrrolidinyl)methyl ester
tttggagacgacagtggactt

SEQ ID NO: 2641 - RNA, 23 nt, synthetic construct
  source 1..23: mol_type = other RNA
  modified_base 1: mod_base = OTHER; note = 2'-O-methyladenosine-3'-phosphorothioate
  modified_base 2: mod_base = OTHER; note = 2'-deoxy-2'-fluoroadenosine-3'-phosphorothioate
  modified_base 3: mod_base = OTHER; note = 2'-O-methylguanosine-3'-phosphate
  modified_base 4: mod_base = OTHER; note = 2'-O-methyluridine-3'-phosphate
  modified_base 5: mod_base = OTHER; note = 2'-O-methylcytidine-3'-phosphate
  modified_base 6: mod_base = OTHER; note = 2'-deoxy-2'-fluorocytidine-3'-phosphate
  modified_base 7: mod_base = OTHER; note = 2'-O-methyladenosine-3'-phosphate
  modified_base 8: mod_base = OTHER; note = 2'-deoxy-2'-fluorocytidine-3'-phosphate
  modified_base 9: mod_base = OTHER; note = 2'-deoxy-2'-fluorouridine-3'-phosphate
  modified_base 10: mod_base = OTHER; note = 2'-O-methylguanosine-3'-phosphate
  modified_base 11: mod_base = OTHER; note = 2'-O-methyluridine-3'-phosphate
  modified_base 12: mod_base = OTHER; note = 2'-O-methylcytidine-3'-phosphate
  modified_base 13: mod_base = OTHER; note = 2'-O-methylguanosine-3'-phosphate
  modified_base 14: mod_base = OTHER; note = 2'-deoxy-2'-fluorouridine-3'-phosphate
  modified_base 15: mod_base = OTHER; note = 2'-O-methylcytidine-3'-phosphate
  modified_base 16: mod_base = OTHER; note = 2'-deoxy-2'-fluorouridine-3'-phosphate
  modified_base 17: mod_base = OTHER; note = 2'-O-methylcytidine-3'-phosphate
  modified_base 18: mod_base = OTHER; note = 2'-O-methylcytidine-3'-phosphate
  modified_base 19: mod_base = OTHER; note = 2'-O-methyladenosine-3'-phosphate
  modified_base 20: mod_base = OTHER; note = 2'-O-methyladenosine-3'-phosphate
  modified_base 21: mod_base = OTHER; note = 2'-O-methyladenosine-3'-phosphorothioate
  modified_base 22: mod_base = OTHER; note = 2'-O-methyladenosine-3'-phosphorothioate
  modified_base 23: mod_base = OTHER; note = 2'-O-methyluridine
aagtccactgtcgtctccaaaat

SEQ ID NO: 2642 - RNA, 21 nt, synthetic construct
  source 1..21: mol_type = other RNA
  modified_base 1: mod_base = OTHER; note = 2'-O-methylguanosine-3'-phosphorothioate
  modified_base 2: mod_base = OTHER; note = 2'-O-methylguanosine-3'-phosphorothioate
  modified_base 3: mod_base = OTHER; note = 2'-O-methylcytidine-3'-phosphate
  modified_base 4: mod_base = OTHER; note = 2'-O-methylcytidine-3'-phosphate
  modified_base 5: mod_base = OTHER; note = 2'-O-methyladenosine-3'-phosphate
  modified_base 6: mod_base = OTHER; note = 2'-O-methylcytidine-3'-phosphate
  modified_base 7: mod_base = OTHER; note = 2'-deoxy-2'-fluorocytidine-3'-phosphate
  modified_base 8: mod_base = OTHER; note = 2'-O-methyluridine-3'-phosphate
  modified_base 9: mod_base = OTHER; note = 2'-deoxy-2'-fluorocytidine-3'-phosphate
  modified_base 10: mod_base = OTHER; note = 2'-deoxy-2'-fluorocytidine-3'-phosphate
  modified_base 11: mod_base = OTHER; note = 2'-deoxy-2'-fluorouridine-3'-phosphate
  modified_base 12: mod_base = OTHER; note = 2'-O-methylcytidine-3'-phosphate
  modified_base 13: mod_base = OTHER; note = 2'-O-methyladenosine-3'-phosphate
  modified_base 14: mod_base = OTHER; note = 2'-O-methyladenosine-3'-phosphate
  modified_base 15: mod_base = OTHER; note = 2'-O-methyluridine-3'-phosphate
  modified_base 16: mod_base = OTHER; note = 2'-O-methyluridine-3'-phosphate
  modified_base 17: mod_base = OTHER; note = 2'-O-methylguanosine-3'-phosphate
  modified_base 18: mod_base = OTHER; note = 2'-O-methyladenosine-3'-phosphate
  modified_base 19: mod_base = OTHER; note = 2'-O-methyladenosine-3'-phosphate
  modified_base 20: mod_base = OTHER; note = 2'-O-methylguanosine-3'-phosphate
  modified_base 21: mod_base = OTHER; note = 2'-O-methyladenosine-3'-phosphate ((2S,4R)-1-[29-[[2-(acetylamino)-2-deoxy-beta-D-galactopyra nosyl]oxy]-14,14-bis[[3-[[3-[[5-[[2-(acetylamino)-2-deoxy-b eta-D-galactopyranosyl]oxy]-1-oxopentyl]amino]propyl]amino] -3-oxopropoxy]methyl]-1,12,19,25-tetraoxo-16-oxa-13,20,24-t riazanonacos-1-yl]-4-hydroxy-2-pyrrolidinyl)methyl ester
ggccacctcctcaattgaaga

SEQ ID NO: 2643 - RNA, 23 nt, synthetic construct
  source 1..23: mol_type = other RNA
  modified_base 1: mod_base = OTHER; note = 2'-O-methyluridine-3'-phosphorothioate
  modified_base 2: mod_base = OTHER; note = 2'-deoxy-2'-fluorocytidine-3'-phosphorothioate
  modified_base 3: mod_base = OTHER; note = 2'-O-methyluridine-3'-phosphate
  modified_base 4: mod_base = OTHER; note = 2'-O-methyluridine-3'-phosphate
  modified_base 5: mod_base = OTHER; note = 2'-O-methylcytidine-3'-phosphate
  modified_base 6: mod_base = OTHER; note = 2'-deoxy-2'-fluoroadenosine-3'-phosphate
  modified_base 7: mod_base = OTHER; note = 2'-O-methyladenosine-3'-phosphate
  modified_base 8: mod_base = OTHER; note = 2'-deoxy-2'-fluorouridine-3'-phosphate
  modified_base 9: mod_base = OTHER; note = 2'-deoxy-2'-fluorouridine-3'-phosphate
  modified_base 10: mod_base = OTHER; note = 2'-O-methylguanosine-3'-phosphate
  modified_base 11: mod_base = OTHER; note = 2'-O-methyladenosine-3'-phosphate
  modified_base 12: mod_base = OTHER; note = 2'-O-methylguanosine-3'-phosphate
  modified_base 13: mod_base = OTHER; note = 2'-O-methylguanosine-3'-phosphate
  modified_base 14: mod_base = OTHER; note = 2'-deoxy-2'-fluoroadenosine-3'-phosphate
  modified_base 15: mod_base = OTHER; note = 2'-O-methylguanosine-3'-phosphate
  modified_base 16: mod_base = OTHER; note = 2'-deoxy-2'-fluoroguanosine-3'-phosphate
  modified_base 17: mod_base = OTHER; note = 2'-O-methyluridine-3'-phosphate
  modified_base 18: mod_base = OTHER; note = 2'-O-methylguanosine-3'-phosphate
  modified_base 19: mod_base = OTHER; note = 2'-O-methylguanosine-3'-phosphate
  modified_base 20: mod_base = OTHER; note = 2'-O-methylcytidine-3'-phosphate
  modified_base 21: mod_base = OTHER; note = 2'-O-methylcytidine-3'-phosphorothioate
  modified_base 22: mod_base = OTHER; note = 2'-O-methylcytidine-3'-phosphorothioate
  modified_base 23: mod_base = OTHER; note = 2'-O-methyladenosine
tcttcaattgaggaggtggccca

SEQ ID NO: 2644 - RNA, 21 nt, synthetic construct
  source 1..21: mol_type = other RNA
  modified_base 1: mod_base = OTHER; note = 2'-O-methylguanosine-3'-phosphorothioate
  modified_base 2: mod_base = OTHER; note = 2'-O-methylcytidine-3'-phosphorothioate
  modified_base 3: mod_base = OTHER; note = 2'-O-methylcytidine-3'-phosphate
  modified_base 4: mod_base = OTHER; note = 2'-O-methyladenosine-3'-phosphate
  modified_base 5: mod_base = OTHER; note = 2'-O-methylcytidine-3'-phosphate
  modified_base 6: mod_base = OTHER; note = 2'-O-methylcytidine-3'-phosphate
  modified_base 7: mod_base = OTHER; note = 2'-deoxy-2'-fluorouridine-3'-phosphate
  modified_base 8: mod_base = OTHER; note = 2'-O-methylcytidine-3'-phosphate
  modified_base 9: mod_base = OTHER; note = 2'-deoxy-2'-fluorocytidine-3'-phosphate
  modified_base 10: mod_base = OTHER; note = 2'-deoxy-2'-fluorouridine-3'-phosphate
  modified_base 11: mod_base = OTHER; note = 2'-deoxy-2'-fluorocytidine-3'-phosphate
  modified_base 12: mod_base = OTHER; note = 2'-O-methyladenosine-3'-phosphate
  modified_base 13: mod_base = OTHER; note = 2'-O-methyladenosine-3'-phosphate
  modified_base 14: mod_base = OTHER; note = 2'-O-methyluridine-3'-phosphate
  modified_base 15: mod_base = OTHER; note = 2'-O-methyluridine-3'-phosphate
  modified_base 16: mod_base = OTHER; note = 2'-O-methylguanosine-3'-phosphate
  modified_base 17: mod_base = OTHER; note = 2'-O-methyladenosine-3'-phosphate
  modified_base 18: mod_base = OTHER; note = 2'-O-methyladenosine-3'-phosphate
  modified_base 19: mod_base = OTHER; note = 2'-O-methylguanosine-3'-phosphate
  modified_base 20: mod_base = OTHER; note = 2'-O-methyladenosine-3'-phosphate
  modified_base 21: mod_base = OTHER; note = 2'-O-methyladenosine-3'-phosphate ((2S,4R)-1-[29-[[2-(acetylamino)-2-deoxy-beta-D-galactopyra nosyl]oxy]-14,14-bis[[3-[[3-[[5-[[2-(acetylamino)-2-deoxy-b eta-D-galactopyranosyl]oxy]-1-oxopentyl]amino]propyl]amino] -3-oxopropoxy]methyl]-1,12,19,25-tetraoxo-16-oxa-13,20,24-t riazanonacos-1-yl]-4-hydroxy-2-pyrrolidinyl)methyl ester
gccacctcctcaattgaagaa

SEQ ID NO: 2645 - RNA, 23 nt, synthetic construct
  source 1..23: mol_type = other RNA
  modified_base 1: mod_base = OTHER; note = 2'-O-methyluridine-3'-phosphorothioate
  modified_base 2: mod_base = OTHER; note = 2'-deoxy-2'-fluorouridine-3'-phosphorothioate
  modified_base 3: mod_base = OTHER; note = 2'-O-methylcytidine-3'-phosphate
  modified_base 4: mod_base = OTHER; note = 2'-O-methyluridine-3'-phosphate
  modified_base 5: mod_base = OTHER; note = 2'-O-methyluridine-3'-phosphate
  modified_base 6: mod_base = OTHER; note = 2'-deoxy-2'-fluorocytidine-3'-phosphate
  modified_base 7: mod_base = OTHER; note = 2'-O-methyladenosine-3'-phosphate
  modified_base 8: mod_base = OTHER; note = 2'-deoxy-2'-fluoroadenosine-3'-phosphate
  modified_base 9: mod_base = OTHER; note = 2'-deoxy-2'-fluorouridine-3'-phosphate
  modified_base 10: mod_base = OTHER; note = 2'-O-methyluridine-3'-phosphate
  modified_base 11: mod_base = OTHER; note = 2'-O-methylguanosine-3'-phosphate
  modified_base 12: mod_base = OTHER; note = 2'-O-methyladenosine-3'-phosphate
  modified_base 13: mod_base = OTHER; note = 2'-O-methylguanosine-3'-phosphate
  modified_base 14: mod_base = OTHER; note = 2'-deoxy-2'-fluoroguanosine-3'-phosphate
  modified_base 15: mod_base = OTHER; note = 2'-O-methyladenosine-3'-phosphate
  modified_base 16: mod_base = OTHER; note = 2'-deoxy-2'-fluoroguanosine-3'-phosphate
  modified_base 17: mod_base = OTHER; note = 2'-O-methylguanosine-3'-phosphate
  modified_base 18: mod_base = OTHER; note = 2'-O-methyluridine-3'-phosphate
  modified_base 19: mod_base = OTHER; note = 2'-O-methylguanosine-3'-phosphate
  modified_base 20: mod_base = OTHER; note = 2'-O-methylguanosine-3'-phosphate
  modified_base 21: mod_base = OTHER; note = 2'-O-methylcytidine-3'-phosphorothioate
  modified_base 22: mod_base = OTHER; note = 2'-O-methylcytidine-3'-phosphorothioate
  modified_base 23: mod_base = OTHER; note = 2'-O-methylcytidine
ttcttcaattgaggaggtggccc

SEQ ID NO: 2646 - RNA, 21 nt, synthetic construct
  source 1..21: mol_type = other RNA
  modified_base 1: mod_base = OTHER; note = 2'-O-methylcytidine-3'-phosphorothioate
  modified_base 2: mod_base = OTHER; note = 2'-O-methylcytidine-3'-phosphorothioate
  modified_base 3: mod_base = OTHER; note = 2'-O-methyluridine-3'-phosphate
  modified_base 4: mod_base = OTHER; note = 2'-O-methylguanosine-3'-phosphate
  modified_base 5: mod_base = OTHER; note = 2'-O-methylguanosine-3'-phosphate
  modified_base 6: mod_base = OTHER; note = 2'-O-methylguanosine-3'-phosphate
  modified_base 7: mod_base = OTHER; note = 2'-deoxy-2'-fluorocytidine-3'-phosphate
  modified_base 8: mod_base = OTHER; note = 2'-O-methylcytidine-3'-phosphate
  modified_base 9: mod_base = OTHER; note = 2'-deoxy-2'-fluoroadenosine-3'-phosphate
  modified_base 10: mod_base = OTHER; note = 2'-deoxy-2'-fluorocytidine-3'-phosphate
  modified_base 11: mod_base = OTHER; note = 2'-deoxy-2'-fluorocytidine-3'-phosphate
  modified_base 12: mod_base = OTHER; note = 2'-O-methyluridine-3'-phosphate
  modified_base 13: mod_base = OTHER; note = 2'-O-methylcytidine-3'-phosphate
  modified_base 14: mod_base = OTHER; note = 2'-O-methylcytidine-3'-phosphate
  modified_base 15: mod_base = OTHER; note = 2'-O-methyluridine-3'-phosphate
  modified_base 16: mod_base = OTHER; note = 2'-O-methylcytidine-3'-phosphate
  modified_base 17: mod_base = OTHER; note = 2'-O-methyladenosine-3'-phosphate
  modified_base 18: mod_base = OTHER; note = 2'-O-methyladenosine-3'-phosphate
  modified_base 19: mod_base = OTHER; note = 2'-O-methyluridine-3'-phosphate
  modified_base 20: mod_base = OTHER; note = 2'-O-methyluridine-3'-phosphate
  modified_base 21: mod_base = OTHER; note = 2'-O-methylguanosine-3'-phosphate ((2S,4R)-1-[29-[[2-(acetylamino)-2-deoxy-beta-D-galactopyra nosyl]oxy]-14,14-bis[[3-[[3-[[5-[[2-(acetylamino)-2-deoxy-b eta-D-galactopyranosyl]oxy]-1-oxopentyl]amino]propyl]amino] -3-oxopropoxy]methyl]-1,12,19,25-tetraoxo-16-oxa-13,20,24-t riazanonacos-1-yl]-4-hydroxy-2-pyrrolidinyl)methyl ester
cctgggccacctcctcaattg

SEQ ID NO: 2647 - RNA, 23 nt, synthetic construct
  source 1..23: mol_type = other RNA
  modified_base 1: mod_base = OTHER; note = 2'-O-methylcytidine-3'-phosphorothioate
  modified_base 2: mod_base = OTHER; note = 2'-deoxy-2'-fluoroadenosine-3'-phosphorothioate
  modified_base 3: mod_base = OTHER; note = 2'-O-methyladenosine-3'-phosphate
  modified_base 4: mod_base = OTHER; note = 2'-O-methyluridine-3'-phosphate
  modified_base 5: mod_base = OTHER; note = 2'-O-methyluridine-3'-phosphate
  modified_base 6: mod_base = OTHER; note = 2'-deoxy-2'-fluoroguanosine-3'-phosphate
  modified_base 7: mod_base = OTHER; note = 2'-O-methyladenosine-3'-phosphate
  modified_base 8: mod_base = OTHER; note = 2'-deoxy-2'-fluoroguanosine-3'-phosphate
  modified_base 9: mod_base = OTHER; note = 2'-deoxy-2'-fluoroguanosine-3'-phosphate
  modified_base 10: mod_base = OTHER; note = 2'-O-methyladenosine-3'-phosphate
  modified_base 11: mod_base = OTHER; note = 2'-O-methylguanosine-3'-phosphate
  modified_base 12: mod_base = OTHER; note = 2'-O-methylguanosine-3'-phosphate
  modified_base 13: mod_base = OTHER; note = 2'-O-methyluridine-3'-phosphate
  modified_base 14: mod_base = OTHER; note = 2'-deoxy-2'-fluoroguanosine-3'-phosphate
  modified_base 15: mod_base = OTHER; note = 2'-O-methylguanosine-3'-phosphate
  modified_base 16: mod_base = OTHER; note = 2'-deoxy-2'-fluorocytidine-3'-phosphate
  modified_base 17: mod_base = OTHER; note = 2'-O-methylcytidine-3'-phosphate
  modified_base 18: mod_base = OTHER; note = 2'-O-methylcytidine-3'-phosphate
  modified_base 19: mod_base = OTHER; note = 2'-O-methyladenosine-3'-phosphate
  modified_base 20: mod_base = OTHER; note = 2'-O-methylguanosine-3'-phosphate
  modified_base 21: mod_base = OTHER; note = 2'-O-methylguanosine-3'-phosphorothioate
  modified_base 22: mod_base = OTHER; note = 2'-O-methyladenosine-3'-phosphorothioate
  modified_base 23: mod_base = OTHER; note = 2'-O-methyladenosine
caattgaggaggtggcccaggaa

SEQ ID NO: 2648 - RNA, 21 nt, synthetic construct
  source 1..21: mol_type = other RNA
  modified_base 1: mod_base = OTHER; note = 2'-O-methyluridine-3'-phosphorothioate
  modified_base 2: mod_base = OTHER; note = 2'-O-methylcytidine-3'-phosphorothioate
  modified_base 3: mod_base = OTHER; note = 2'-O-methylcytidine-3'-phosphate
  modified_base 4: mod_base = OTHER; note = 2'-O-methyluridine-3'-phosphate
  modified_base 5: mod_base = OTHER; note = 2'-O-methylguanosine-3'-phosphate
  modified_base 6: mod_base = OTHER; note = 2'-O-methylguanosine-3'-phosphate
  modified_base 7: mod_base = OTHER; note = 2'-deoxy-2'-fluoroguanosine-3'-phosphate
  modified_base 8: mod_base = OTHER; note = 2'-O-methylcytidine-3'-phosphate
  modified_base 9: mod_base = OTHER; note = 2'-deoxy-2'-fluorocytidine-3'-phosphate
  modified_base 10: mod_base = OTHER; note = 2'-deoxy-2'-fluoroadenosine-3'-phosphate
  modified_base 11: mod_base = OTHER; note = 2'-deoxy-2'-fluorocytidine-3'-phosphate
  modified_base 12: mod_base = OTHER; note = 2'-O-methylcytidine-3'-phosphate
  modified_base 13: mod_base = OTHER; note = 2'-O-methyluridine-3'-phosphate
  modified_base 14: mod_base = OTHER; note = 2'-O-methylcytidine-3'-phosphate
  modified_base 15: mod_base = OTHER; note = 2'-O-methylcytidine-3'-phosphate
  modified_base 16: mod_base = OTHER; note = 2'-O-methyluridine-3'-phosphate
  modified_base 17: mod_base = OTHER; note = 2'-O-methylcytidine-3'-phosphate
  modified_base 18: mod_base = OTHER; note = 2'-O-methyladenosine-3'-phosphate
  modified_base 19: mod_base = OTHER; note = 2'-O-methyladenosine-3'-phosphate
  modified_base 20: mod_base = OTHER; note = 2'-O-methyluridine-3'-phosphate
  modified_base 21: mod_base = OTHER; note = 2'-O-methyluridine-3'-phosphate ((2S,4R)-1-[29-[[2-(acetylamino)-2-deoxy-beta-D-galactopyra nosyl]oxy]-14,14-bis[[3-[[3-[[5-[[2-(acetylamino)-2-deoxy-b eta-D-galactopyranosyl]oxy]-1-oxopentyl]amino]propyl]amino] -3-oxopropoxy]methyl]-1,12,19,25-tetraoxo-16-oxa-13,20,24-t riazanonacos-1-yl]-4-hydroxy-2-pyrrolidinyl)methyl ester
tcctgggccacctcctcaatt

SEQ ID NO: 2649 - RNA, 23 nt, synthetic construct
  source 1..23: mol_type = other RNA
  modified_base 1: mod_base = OTHER; note = 2'-O-methyladenosine-3'-phosphorothioate
  modified_base 2: mod_base = OTHER; note = 2'-deoxy-2'-fluoroadenosine-3'-phosphorothioate
  modified_base 3: mod_base = OTHER; note = 2'-O-methyluridine-3'-phosphate
  modified_base 4: mod_base = OTHER; note = 2'-O-methyluridine-3'-phosphate
  modified_base 5: mod_base = OTHER; note = 2'-O-methylguanosine-3'-phosphate
  modified_base 6: mod_base = OTHER; note = 2'-deoxy-2'-fluoroadenosine-3'-phosphate
  modified_base 7: mod_base = OTHER; note = 2'-O-methylguanosine-3'-phosphate
  modified_base 8: mod_base = OTHER; note = 2'-deoxy-2'-fluoroguanosine-3'-phosphate
  modified_base 9: mod_base = OTHER; note = 2'-deoxy-2'-fluoroadenosine-3'-phosphate
  modified_base 10: mod_base = OTHER; note = 2'-O-methylguanosine-3'-phosphate
  modified_base 11: mod_base = OTHER; note = 2'-O-methylguanosine-3'-phosphate
  modified_base 12: mod_base = OTHER; note = 2'-O-methyluridine-3'-phosphate
  modified_base 13: mod_base = OTHER; note = 2'-O-methylguanosine-3'-phosphate
  modified_base 14: mod_base = OTHER; note = 2'-deoxy-2'-fluoroguanosine-3'-phosphate
  modified_base 15: mod_base = OTHER; note = 2'-O-methylcytidine-3'-phosphate
  modified_base 16: mod_base = OTHER; note = 2'-deoxy-2'-fluorocytidine-3'-phosphate
  modified_base 17: mod_base = OTHER; note = 2'-O-methylcytidine-3'-phosphate
  modified_base 18: mod_base = OTHER; note = 2'-O-methyladenosine-3'-phosphate
  modified_base 19: mod_base = OTHER; note = 2'-O-methylguanosine-3'-phosphate
  modified_base 20: mod_base = OTHER; note = 2'-O-methylguanosine-3'-phosphate
  modified_base 21: mod_base = OTHER; note = 2'-O-methyladenosine-3'-phosphorothioate
  modified_base 22: mod_base = OTHER; note = 2'-O-methyladenosine-3'-phosphorothioate
  modified_base 23: mod_base = OTHER; note = 2'-O-methylcytidine
aattgaggaggtggcccaggaac

SEQ ID NO: 2650 - RNA, 21 nt, synthetic construct
  source 1..21: mol_type = other RNA
  modified_base 1: mod_base = OTHER; note = 2'-O-methyluridine-3'-phosphorothioate
  modified_base 2: mod_base = OTHER; note = 2'-O-methylguanosine-3'-phosphorothioate
  modified_base 3: mod_base = OTHER; note = 2'-O-methyluridine-3'-phosphate
  modified_base 4: mod_base = OTHER; note = 2'-O-methyladenosine-3'-phosphate
  modified_base 5: mod_base = OTHER; note = 2'-O-methyluridine-3'-phosphate
  modified_base 6: mod_base = OTHER; note = 2'-O-methylguanosine-3'-phosphate
  modified_base 7: mod_base = OTHER; note = 2'-deoxy-2'-fluorouridine-3'-phosphate
  modified_base 8: mod_base = OTHER; note = 2'-O-methyluridine-3'-phosphate
  modified_base 9: mod_base = OTHER; note = 2'-deoxy-2'-fluoroadenosine-3'-phosphate
  modified_base 10: mod_base = OTHER; note = 2'-deoxy-2'-fluorocytidine-3'-phosphate
  modified_base 11: mod_base = OTHER; note = 2'-deoxy-2'-fluorouridine-3'-phosphate
  modified_base 12: mod_base = OTHER; note = 2'-O-methyluridine-3'-phosphate
  modified_base 13: mod_base = OTHER; note = 2'-O-methylcytidine-3'-phosphate
  modified_base 14: mod_base = OTHER; note = 2'-O-methyluridine-3'-phosphate
  modified_base 15: mod_base = OTHER; note = 2'-O-methyluridine-3'-phosphate
  modified_base 16: mod_base = OTHER; note = 2'-O-methyladenosine-3'-phosphate
  modified_base 17: mod_base = OTHER; note = 2'-O-methylguanosine-3'-phosphate
  modified_base 18: mod_base = OTHER; note = 2'-O-methyladenosine-3'-phosphate
  modified_base 19: mod_base = OTHER; note = 2'-O-methylguanosine-3'-phosphate
  modified_base 20: mod_base = OTHER; note = 2'-O-methyladenosine-3'-phosphate
  modified_base 21: mod_base = OTHER; note = 2'-O-methylguanosine-3'-phosphate ((2S,4R)-1-[29-[[2-(acetylamino)-2-deoxy-beta-D-galactopyra nosyl]oxy]-14,14-bis[[3-[[3-[[5-[[2-(acetylamino)-2-deoxy-b eta-D-galactopyranosyl]oxy]-1-oxopentyl]amino]propyl]amino] -3-oxopropoxy]methyl]-1,12,19,25-tetraoxo-16-oxa-13,20,24-t riazanonacos-1-yl]-4-hydroxy-2-pyrrolidinyl)methyl ester
tgtatgttacttcttagagag

SEQ ID NO: 2651 - RNA, 23 nt, synthetic construct
  source 1..23: mol_type = other RNA
  modified_base 1: mod_base = OTHER; note = 2'-O-methylcytidine-3'-phosphorothioate
  modified_base 2: mod_base = OTHER; note = 2'-deoxy-2'-fluorouridine-3'-phosphorothioate
  modified_base 3: mod_base = OTHER; note = 2'-O-methylcytidine-3'-phosphate
  modified_base 4: mod_base = OTHER; note = 2'-O-methyluridine-3'-phosphate
  modified_base 5: mod_base = OTHER; note = 2'-O-methylcytidine-3'-phosphate
  modified_base 6: mod_base = OTHER; note = 2'-deoxy-2'-fluorouridine-3'-phosphate
  modified_base 7: mod_base = OTHER; note = 2'-O-methyladenosine-3'-phosphate
  modified_base 8: mod_base = OTHER; note = 2'-deoxy-2'-fluoroadenosine-3'-phosphate
  modified_base 9: mod_base = OTHER; note = 2'-deoxy-2'-fluoroguanosine-3'-phosphate
  modified_base 10: mod_base = OTHER; note = 2'-O-methyladenosine-3'-phosphate
  modified_base 11: mod_base = OTHER; note = 2'-O-methyladenosine-3'-phosphate
  modified_base 12: mod_base = OTHER; note = 2'-O-methylguanosine-3'-phosphate
  modified_base 13: mod_base = OTHER; note = 2'-O-methyluridine-3'-phosphate
  modified_base 14: mod_base = OTHER; note = 2'-deoxy-2'-fluoroadenosine-3'-phosphate
  modified_base 15: mod_base = OTHER; note = 2'-O-methyladenosine-3'-phosphate
  modified_base 16: mod_base = OTHER; note = 2'-deoxy-2'-fluorocytidine-3'-phosphate
  modified_base 17: mod_base = OTHER; note = 2'-O-methyladenosine-3'-phosphate
  modified_base 18: mod_base = OTHER; note = 2'-O-methyluridine-3'-phosphate
  modified_base 19: mod_base = OTHER; note = 2'-O-methyladenosine-3'-phosphate
  modified_base 20: mod_base = OTHER; note = 2'-O-methylcytidine-3'-phosphate
  modified_base 21: mod_base = OTHER; note = 2'-O-methyladenosine-3'-phosphorothioate
  modified_base 22: mod_base = OTHER; note = 2'-O-methyluridine-3'-phosphorothioate
  modified_base 23: mod_base = OTHER; note = 2'-O-methylcytidine
ctctctaagaagtaacatacatc

SEQ ID NO: 2652 - RNA, 21 nt, synthetic construct
  source 1..21: mol_type = other RNA
  modified_base 1: mod_base = OTHER; note = 2'-O-methylguanosine-3'-phosphorothioate
  modified_base 2: mod_base = OTHER; note = 2'-O-methyluridine-3'-phosphorothioate
  modified_base 3: mod_base = OTHER; note = 2'-O-methyladenosine-3'-phosphate
  modified_base 4: mod_base = OTHER; note = 2'-O-methyluridine-3'-phosphate
  modified_base 5: mod_base = OTHER; note = 2'-O-methylguanosine-3'-phosphate
  modified_base 6: mod_base = OTHER; note = 2'-O-methyluridine-3'-phosphate
  modified_base 7: mod_base = OTHER; note = 2'-deoxy-2'-fluorouridine-3'-phosphate
  modified_base 8: mod_base = OTHER; note = 2'-O-methyladenosine-3'-phosphate
  modified_base 9: mod_base = OTHER; note = 2'-deoxy-2'-fluorocytidine-3'-phosphate
  modified_base 10: mod_base = OTHER; note = 2'-deoxy-2'-fluorouridine-3'-phosphate
  modified_base 11: mod_base = OTHER; note = 2'-deoxy-2'-fluorouridine-3'-phosphate
  modified_base 12: mod_base = OTHER; note = 2'-O-methylcytidine-3'-phosphate
  modified_base 13: mod_base = OTHER; note = 2'-O-methyluridine-3'-phosphate
  modified_base 14: mod_base = OTHER; note = 2'-O-methyluridine-3'-phosphate
  modified_base 15: mod_base = OTHER; note = 2'-O-methyladenosine-3'-phosphate
  modified_base 16: mod_base = OTHER; note = 2'-O-methylguanosine-3'-phosphate
  modified_base 17: mod_base = OTHER; note = 2'-O-methyladenosine-3'-phosphate
  modified_base 18: mod_base = OTHER; note = 2'-O-methylguanosine-3'-phosphate
  modified_base 19: mod_base = OTHER; note = 2'-O-methyladenosine-3'-phosphate
  modified_base 20: mod_base = OTHER; note = 2'-O-methylguanosine-3'-phosphate
  modified_base 21: mod_base = OTHER; note = 2'-O-methyladenosine-3'-phosphate ((2S,4R)-1-[29-[[2-(acetylamino)-2-deoxy-beta-D-galactopyra nosyl]oxy]-14,14-bis[[3-[[3-[[5-[[2-(acetylamino)-2-deoxy-b eta-D-galactopyranosyl]oxy]-1-oxopentyl]amino]propyl]amino] -3-oxopropoxy]methyl]-1,12,19,25-tetraoxo-16-oxa-13,20,24-t riazanonacos-1-yl]-4-hydroxy-2-pyrrolidinyl)methyl ester
gtatgttacttcttagagaga

SEQ ID NO: 2653 - RNA, 23 nt, synthetic construct
  source 1..23: mol_type = other RNA
  modified_base 1: mod_base = OTHER; note = 2'-O-methyluridine-3'-phosphorothioate
  modified_base 2: mod_base = OTHER; note = 2'-deoxy-2'-fluorocytidine-3'-phosphorothioate
  modified_base 3: mod_base = OTHER; note = 2'-O-methyluridine-3'-phosphate
  modified_base 4: mod_base = OTHER; note = 2'-O-methylcytidine-3'-phosphate
  modified_base 5: mod_base = OTHER; note = 2'-O-methyluridine-3'-phosphate
  modified_base 6: mod_base = OTHER; note = 2'-deoxy-2'-fluorocytidine-3'-phosphate
  modified_base 7: mod_base = OTHER; note = 2'-O-methyluridine-3'-phosphate
  modified_base 8: mod_base = OTHER; note = 2'-deoxy-2'-fluoroadenosine-3'-phosphate
  modified_base 9: mod_base = OTHER; note = 2'-deoxy-2'-fluoroadenosine-3'-phosphate
  modified_base 10: mod_base = OTHER; note = 2'-O-methylguanosine-3'-phosphate
  modified_base 11: mod_base = OTHER; note = 2'-O-methyladenosine-3'-phosphate
  modified_base 12: mod_base = OTHER; note = 2'-O-methyladenosine-3'-phosphate
  modified_base 13: mod_base = OTHER; note = 2'-O-methylguanosine-3'-phosphate
  modified_base 14: mod_base = OTHER; note = 2'-deoxy-2'-fluorouridine-3'-phosphate
  modified_base 15: mod_base = OTHER; note = 2'-O-methyladenosine-3'-phosphate
  modified_base 16: mod_base = OTHER; note = 2'-deoxy-2'-fluoroadenosine-3'-phosphate
  modified_base 17: mod_base = OTHER; note = 2'-O-methylcytidine-3'-phosphate
  modified_base 18: mod_base = OTHER; note = 2'-O-methyladenosine-3'-phosphate
  modified_base 19: mod_base = OTHER; note = 2'-O-methyluridine-3'-phosphate
  modified_base 20: mod_base = OTHER; note = 2'-O-methyladenosine-3'-phosphate
  modified_base 21: mod_base = OTHER; note = 2'-O-methylcytidine-3'-phosphorothioate
  modified_base 22: mod_base = OTHER; note = 2'-O-methyladenosine-3'-phosphorothioate
  modified_base 23: mod_base = OTHER; note = 2'-O-methyluridine
tctctctaagaagtaacatacat

SEQ ID NO: 2654 - RNA, 21 nt, synthetic construct
  source 1..21: mol_type = other RNA
  modified_base 1: mod_base = OTHER; note = 2'-O-methyladenosine-3'-phosphorothioate
  modified_base 2: mod_base = OTHER; note = 2'-O-methylguanosine-3'-phosphorothioate
  modified_base 3: mod_base = OTHER; note = 2'-O-methylguanosine-3'-phosphate
  modified_base 4: mod_base = OTHER; note = 2'-O-methyladenosine-3'-phosphate
  modified_base 5: mod_base = OTHER; note = 2'-O-methyluridine-3'-phosphate
  modified_base 6: mod_base = OTHER; note = 2'-O-methylguanosine-3'-phosphate
  modified_base 7: mod_base = OTHER; note = 2'-deoxy-2'-fluorouridine-3'-phosphate
  modified_base 8: mod_base = OTHER; note = 2'-O-methyladenosine-3'-phosphate
  modified_base 9: mod_base = OTHER; note = 2'-deoxy-2'-fluorouridine-3'-phosphate
  modified_base 10: mod_base = OTHER; note = 2'-deoxy-2'-fluoroguanosine-3'-phosphate
  modified_base 11: mod_base = OTHER; note = 2'-deoxy-2'-fluorouridine-3'-phosphate
  modified_base 12: mod_base = OTHER; note = 2'-O-methyluridine-3'-phosphate
  modified_base 13: mod_base = OTHER; note = 2'-O-methyladenosine-3'-phosphate
  modified_base 14: mod_base = OTHER; note = 2'-O-methylcytidine-3'-phosphate
  modified_base 15: mod_base = OTHER; note = 2'-O-methyluridine-3'-phosphate
  modified_base 16: mod_base = OTHER; note = 2'-O-methyluridine-3'-phosphate
  modified_base 17: mod_base = OTHER; note = 2'-O-methylcytidine-3'-phosphate
  modified_base 18: mod_base = OTHER; note = 2'-O-methyluridine-3'-phosphate
  modified_base 19: mod_base = OTHER; note = 2'-O-methyluridine-3'-phosphate
  modified_base 20: mod_base = OTHER; note = 2'-O-methyladenosine-3'-phosphate
  modified_base 21: mod_base = OTHER; note = 2'-O-methylguanosine-3'-phosphate ((2S,4R)-1-[29-[[2-(acetylamino)-2-deoxy-beta-D-galactopyra nosyl]oxy]-14,14-bis[[3-[[3-[[5-[[2-(acetylamino)-2-deoxy-b eta-D-galactopyranosyl]oxy]-1-oxopentyl]amino]propyl]amino] -3-oxopropoxy]methyl]-1,12,19,25-tetraoxo-16-oxa-13,20,24-t riazanonacos-1-yl]-4-hydroxy-2-pyrrolidinyl)methyl ester
aggatgtatgttacttcttag

SEQ ID NO: 2655 - RNA, 23 nt, synthetic construct
  source 1..23: mol_type = other RNA
  modified_base 1: mod_base = OTHER; note = 2'-O-methylcytidine-3'-phosphorothioate
  modified_base 2: mod_base = OTHER; note = 2'-deoxy-2'-fluorouridine-3'-phosphorothioate
  modified_base 3: mod_base = OTHER; note = 2'-O-methyladenosine-3'-phosphate
  modified_base 4: mod_base = OTHER; note = 2'-O-methyladenosine-3'-phosphate
  modified_base 5: mod_base = OTHER; note = 2'-O-methylguanosine-3'-phosphate
  modified_base 6: mod_base = OTHER; note = 2'-deoxy-2'-fluoroadenosine-3'-phosphate
  modified_base 7: mod_base = OTHER; note = 2'-O-methyladenosine-3'-phosphate
  modified_base 8: mod_base = OTHER; note = 2'-deoxy-2'-fluoroguanosine-3'-phosphate
  modified_base 9: mod_base = OTHER; note = 2'-deoxy-2'-fluorouridine-3'-phosphate
  modified_base 10: mod_base = OTHER; note = 2'-O-methyladenosine-3'-phosphate
  modified_base 11: mod_base = OTHER; note = 2'-O-methyladenosine-3'-phosphate
  modified_base 12: mod_base = OTHER; note = 2'-O-methylcytidine-3'-phosphate
  modified_base 13: mod_base = OTHER; note = 2'-O-methyladenosine-3'-phosphate
  modified_base 14: mod_base = OTHER; note = 2'-deoxy-2'-fluorouridine-3'-phosphate
  modified_base 15: mod_base = OTHER; note = 2'-O-methyladenosine-3'-phosphate
  modified_base 16: mod_base = OTHER; note = 2'-deoxy-2'-fluorocytidine-3'-phosphate
  modified_base 17: mod_base = OTHER; note = 2'-O-methyladenosine-3'-phosphate
  modified_base 18: mod_base = OTHER; note = 2'-O-methyluridine-3'-phosphate
  modified_base 19: mod_base = OTHER; note = 2'-O-methylcytidine-3'-phosphate
  modified_base 20: mod_base = OTHER; note = 2'-O-methylcytidine-3'-phosphate
  modified_base 21: mod_base = OTHER; note = 2'-O-methyluridine-3'-phosphorothioate
  modified_base 22: mod_base = OTHER; note = 2'-O-methyladenosine-3'-phosphorothioate
  modified_base 23: mod_base = OTHER; note = 2'-O-methyladenosine
ctaagaagtaacatacatcctaa

SEQ ID NO: 2656 - RNA, 21 nt, synthetic construct
  source 1..21: mol_type = other RNA
  modified_base 1: mod_base = OTHER; note = 2'-O-methyluridine-3'-phosphorothioate
  modified_base 2: mod_base = OTHER; note = 2'-O-methyladenosine-3'-phosphorothioate
  modified_base 3: mod_base = OTHER; note = 2'-O-methylguanosine-3'-phosphate
  modified_base 4: mod_base = OTHER; note = 2'-O-methylguanosine-3'-phosphate
  modified_base 5: mod_base = OTHER; note = 2'-O-methyladenosine-3'-phosphate
  modified_base 6: mod_base = OTHER; note = 2'-O-methyluridine-3'-phosphate
  modified_base 7: mod_base = OTHER; note = 2'-deoxy-2'-fluoroguanosine-3'-phosphate
  modified_base 8: mod_base = OTHER; note = 2'-O-methyluridine-3'-phosphate
  modified_base 9: mod_base = OTHER; note = 2'-deoxy-2'-fluoroadenosine-3'-phosphate
  modified_base 10: mod_base = OTHER; note = 2'-deoxy-2'-fluorouridine-3'-phosphate
  modified_base 11: mod_base = OTHER; note = 2'-deoxy-2'-fluoroguanosine-3'-phosphate
  modified_base 12: mod_base = OTHER; note = 2'-O-methyluridine-3'-phosphate
  modified_base 13: mod_base = OTHER; note = 2'-O-methyluridine-3'-phosphate
  modified_base 14: mod_base = OTHER; note = 2'-O-methyladenosine-3'-phosphate
  modified_base 15: mod_base = OTHER; note = 2'-O-methylcytidine-3'-phosphate
  modified_base 16: mod_base = OTHER; note = 2'-O-methyluridine-3'-phosphate
  modified_base 17: mod_base = OTHER; note = 2'-O-methyluridine-3'-phosphate
  modified_base 18: mod_base = OTHER; note = 2'-O-methylcytidine-3'-phosphate
  modified_base 19: mod_base = OTHER; note = 2'-O-methyluridine-3'-phosphate
  modified_base 20: mod_base = OTHER; note = 2'-O-methyluridine-3'-phosphate
  modified_base 21: mod_base = OTHER; note = 2'-O-methyladenosine-3'-phosphate ((2S,4R)-1-[29-[[2-(acetylamino)-2-deoxy-beta-D-galactopyra nosyl]oxy]-14,14-bis[[3-[[3-[[5-[[2-(acetylamino)-2-deoxy-b eta-D-galactopyranosyl]oxy]-1-oxopentyl]amino]propyl]amino] -3-oxopropoxy]methyl]-1,12,19,25-tetraoxo-16-oxa-13,20,24-t riazanonacos-1-yl]-4-hydroxy-2-pyrrolidinyl)methyl ester
taggatgtatgttacttctta

SEQ ID NO: 2657 - RNA, 23 nt, synthetic construct
  source 1..23: mol_type = other RNA
  modified_base 1: mod_base = OTHER; note = 2'-O-methyluridine-3'-phosphorothioate
  modified_base 2: mod_base = OTHER; note = 2'-deoxy-2'-fluoroadenosine-3'-phosphorothioate
  modified_base 3: mod_base = OTHER; note = 2'-O-methyladenosine-3'-phosphate
  modified_base 4: mod_base = OTHER; note = 2'-O-methylguanosine-3'-phosphate
  modified_base 5: mod_base = OTHER; note = 2'-O-methyladenosine-3'-phosphate
  modified_base 6: mod_base = OTHER; note = 2'-deoxy-2'-fluoroadenosine-3'-phosphate
  modified_base 7: mod_base = OTHER; note = 2'-O-methylguanosine-3'-phosphate
  modified_base 8: mod_base = OTHER; note = 2'-deoxy-2'-fluorouridine-3'-phosphate
  modified_base 9: mod_base = OTHER; note = 2'-deoxy-2'-fluoroadenosine-3'-phosphate
  modified_base 10: mod_base = OTHER; note = 2'-O-methyladenosine-3'-phosphate
  modified_base 11: mod_base = OTHER; note = 2'-O-methylcytidine-3'-phosphate
  modified_base 12: mod_base = OTHER; note = 2'-O-methyladenosine-3'-phosphate
  modified_base 13: mod_base = OTHER; note = 2'-O-methyluridine-3'-phosphate
  modified_base 14: mod_base = OTHER; note = 2'-deoxy-2'-fluoroadenosine-3'-phosphate
  modified_base 15: mod_base = OTHER; note = 2'-O-methylcytidine-3'-phosphate
  modified_base 16: mod_base = OTHER; note = 2'-deoxy-2'-fluoroadenosine-3'-phosphate
  modified_base 17: mod_base = OTHER; note = 2'-O-methyluridine-3'-phosphate
  modified_base 18: mod_base = OTHER; note = 2'-O-methylcytidine-3'-phosphate
  modified_base 19: mod_base = OTHER; note = 2'-O-methylcytidine-3'-phosphate
  modified_base 20: mod_base = OTHER; note = 2'-O-methyluridine-3'-phosphate
  modified_base 21: mod_base = OTHER; note = 2'-O-methyladenosine-3'-phosphorothioate
  modified_base 22: mod_base = OTHER; note = 2'-O-methyladenosine-3'-phosphorothioate
  modified_base 23: mod_base = OTHER; note = 2'-O-methyladenosine
taagaagtaacatacatcctaaa

SEQ ID NO: 2658 - RNA, 21 nt, synthetic construct
  source 1..21: mol_type = other RNA
  modified_base 1: mod_base = OTHER; note = 2'-O-methyladenosine-3'-phosphorothioate
  modified_base 2: mod_base = OTHER; note = 2'-O-methyladenosine-3'-phosphorothioate
  modified_base 3: mod_base = OTHER; note = 2'-O-methyladenosine-3'-phosphate
  modified_base 4: mod_base = OTHER; note = 2'-O-methyluridine-3'-phosphate
  modified_base 5: mod_base = OTHER; note = 2'-O-methylguanosine-3'-phosphate
  modified_base 6: mod_base = OTHER; note = 2'-O-methyluridine-3'-phosphate
  modified_base 7: mod_base = OTHER; note = 2'-deoxy-2'-fluorouridine-3'-phosphate
  modified_base 8: mod_base = OTHER; note = 2'-O-methyluridine-3'-phosphate
  modified_base 9: mod_base = OTHER; note = 2'-deoxy-2'-fluorouridine-3'-phosphate
  modified_base 10: mod_base = OTHER; note = 2'-deoxy-2'-fluoroadenosine-3'-phosphate
  modified_base 11: mod_base = OTHER; note = 2'-deoxy-2'-fluoroguanosine-3'-phosphate
  modified_base 12: mod_base = OTHER; note = 2'-O-methylguanosine-3'-phosphate
  modified_base 13: mod_base = OTHER; note = 2'-O-methyladenosine-3'-phosphate
  modified_base 14: mod_base = OTHER; note = 2'-O-methyluridine-3'-phosphate
  modified_base 15: mod_base = OTHER; note = 2'-O-methylguanosine-3'-phosphate
  modified_base 16: mod_base = OTHER; note = 2'-O-methyluridine-3'-phosphate
  modified_base 17: mod_base = OTHER; note = 2'-O-methyladenosine-3'-phosphate
  modified_base 18: mod_base = OTHER; note = 2'-O-methyluridine-3'-phosphate
  modified_base 19: mod_base = OTHER; note = 2'-O-methylguanosine-3'-phosphate
  modified_base 20: mod_base = OTHER; note = 2'-O-methyluridine-3'-phosphate
  modified_base 21: mod_base = OTHER; note = 2'-O-methyluridine-3'-phosphate ((2S,4R)-1-[29-[[2-(acetylamino)-2-deoxy-beta-D-galactopyra nosyl]oxy]-14,14-bis[[3-[[3-[[5-[[2-(acetylamino)-2-deoxy-b eta-D-galactopyranosyl]oxy]-1-oxopentyl]amino]propyl]amino] -3-oxopropoxy]methyl]-1,12,19,25-tetraoxo-16-oxa-13,20,24-t riazanonacos-1-yl]-4-hydroxy-2-pyrrolidinyl)methyl ester
aaatgttttaggatgtatgtt

SEQ ID NO: 2659 - RNA, 23 nt, synthetic construct
  source 1..23: mol_type = other RNA
  modified_base 1: mod_base = OTHER; note = 2'-O-methyladenosine-3'-phosphorothioate
  modified_base 2: mod_base = OTHER; note = 2'-deoxy-2'-fluoroadenosine-3'-phosphorothioate
  modified_base 3: mod_base = OTHER; note = 2'-O-methylcytidine-3'-phosphate
  modified_base 4: mod_base = OTHER; note = 2'-O-methyladenosine-3'-phosphate
  modified_base 5: mod_base = OTHER; note = 2'-O-methyluridine-3'-phosphate
  modified_base 6: mod_base = OTHER; note = 2'-deoxy-2'-fluoroadenosine-3'-phosphate
  modified_base 7: mod_base = OTHER; note = 2'-O-methylcytidine-3'-phosphate
  modified_base 8: mod_base = OTHER; note = 2'-deoxy-2'-fluoroadenosine-3'-phosphate
  modified_base 9: mod_base = OTHER; note = 2'-deoxy-2'-fluorouridine-3'-phosphate
  modified_base 10: mod_base = OTHER; note = 2'-O-methylcytidine-3'-phosphate
  modified_base 11: mod_base = OTHER; note = 2'-O-methylcytidine-3'-phosphate
  modified_base 12: mod_base = OTHER; note = 2'-O-methyluridine-3'-phosphate
  modified_base 13: mod_base = OTHER; note = 2'-O-methyladenosine-3'-phosphate
  modified_base 14: mod_base = OTHER; note = 2'-deoxy-2'-fluoroadenosine-3'-phosphate
  modified_base 15: mod_base = OTHER; note = 2'-O-methyladenosine-3'-phosphate
  modified_base 16: mod_base = OTHER; note = 2'-deoxy-2'-fluoroadenosine-3'-phosphate
  modified_base 17: mod_base = OTHER; note = 2'-O-methylcytidine-3'-phosphate
  modified_base 18: mod_base = OTHER; note = 2'-O-methyladenosine-3'-phosphate
  modified_base 19: mod_base = OTHER; note = 2'-O-methyluridine-3'-phosphate
  modified_base 20: mod_base = OTHER; note = 2'-O-methyluridine-3'-phosphate
  modified_base 21: mod_base = OTHER; note = 2'-O-methyluridine-3'-phosphorothioate
  modified_base 22: mod_base = OTHER; note = 2'-O-methylguanosine-3'-phosphorothioate
  modified_base 23: mod_base = OTHER; note = 2'-O-methylguanosine
aacatacatcctaaaacatttgg

SEQ ID NO: 2660 - RNA, 21 nt, synthetic construct
  source 1..21: mol_type = other RNA
  modified_base 1: mod_base = OTHER; note = 2'-O-methyladenosine-3'-phosphorothioate
  modified_base 2: mod_base = OTHER; note = 2'-O-methyladenosine-3'-phosphorothioate
  modified_base 3: mod_base = OTHER; note = 2'-O-methyluridine-3'-phosphate
  modified_base 4: mod_base = OTHER; note = 2'-O-methylguanosine-3'-phosphate
  modified_base 5: mod_base = OTHER; note = 2'-O-methyluridine-3'-phosphate
  modified_base 6: mod_base = OTHER; note = 2'-O-methyluridine-3'-phosphate
  modified_base 7: mod_base = OTHER; note = 2'-deoxy-2'-fluorouridine-3'-phosphate
  modified_base 8: mod_base = OTHER; note = 2'-O-methyluridine-3'-phosphate
  modified_base 9: mod_base = OTHER; note = 2'-deoxy-2'-fluoroadenosine-3'-phosphate
  modified_base 10: mod_base = OTHER; note = 2'-deoxy-2'-fluoroguanosine-3'-phosphate
  modified_base 11: mod_base = OTHER; note = 2'-deoxy-2'-fluoroguanosine-3'-phosphate
  modified_base 12: mod_base = OTHER; note = 2'-O-methyladenosine-3'-phosphate
  modified_base 13: mod_base = OTHER; note = 2'-O-methyluridine-3'-phosphate
  modified_base 14: mod_base = OTHER; note = 2'-O-methylguanosine-3'-phosphate
  modified_base 15: mod_base = OTHER; note = 2'-O-methyluridine-3'-phosphate
  modified_base 16: mod_base = OTHER; note = 2'-O-methyladenosine-3'-phosphate
  modified_base 17: mod_base = OTHER; note = 2'-O-methyluridine-3'-phosphate
  modified_base 18: mod_base = OTHER; note = 2'-O-methylguanosine-3'-phosphate
  modified_base 19: mod_base = OTHER; note = 2'-O-methyluridine-3'-phosphate
  modified_base 20: mod_base = OTHER; note = 2'-O-methyluridine-3'-phosphate
  modified_base 21: mod_base = OTHER; note = 2'-O-methyladenosine-3'-phosphate ((2S,4R)-1-[29-[[2-(acetylamino)-2-deoxy-beta-D-galactopyra nosyl]oxy]-14,14-bis[[3-[[3-[[5-[[2-(acetylamino)-2-deoxy-b eta-D-galactopyranosyl]oxy]-1-oxopentyl]amino]propyl]amino] -3-oxopropoxy]methyl]-1,12,19,25-tetraoxo-16-oxa-13,20,24-t riazanonacos-1-yl]-4-hydroxy-2-pyrrolidinyl)methyl ester
aatgttttaggatgtatgtta

SEQ ID NO: 2661 - RNA, 23 nt, synthetic construct
  source 1..23: mol_type = other RNA
  modified_base 1: mod_base = OTHER; note = 2'-O-methyluridine-3'-phosphorothioate
  modified_base 2: mod_base = OTHER; note = 2'-deoxy-2'-fluoroadenosine-3'-phosphorothioate
  modified_base 3: mod_base = OTHER; note = 2'-O-methyladenosine-3'-phosphate
  modified_base 4: mod_base = OTHER; note = 2'-O-methylcytidine-3'-phosphate
  modified_base 5: mod_base = OTHER; note = 2'-O-methyladenosine-3'-phosphate
  modified_base 6: mod_base = OTHER; note = 2'-deoxy-2'-fluorouridine-3'-phosphate
  modified_base 7: mod_base = OTHER; note = 2'-O-methyladenosine-3'-phosphate
  modified_base 8: mod_base = OTHER; note = 2'-deoxy-2'-fluorocytidine-3'-phosphate
  modified_base 9: mod_base = OTHER; note = 2'-deoxy-2'-fluoroadenosine-3'-phosphate
  modified_base 10: mod_base = OTHER; note = 2'-O-methyluridine-3'-phosphate
  modified_base 11: mod_base = OTHER; note = 2'-O-methylcytidine-3'-phosphate
  modified_base 12: mod_base = OTHER; note = 2'-O-methylcytidine-3'-phosphate
  modified_base 13: mod_base = OTHER; note = 2'-O-methyluridine-3'-phosphate
  modified_base 14: mod_base = OTHER; note = 2'-deoxy-2'-fluoroadenosine-3'-phosphate
  modified_base 15: mod_base = OTHER; note = 2'-O-methyladenosine-3'-phosphate
  modified_base 16: mod_base = OTHER; note = 2'-deoxy-2'-fluoroadenosine-3'-phosphate
  modified_base 17: mod_base = OTHER; note = 2'-O-methyladenosine-3'-phosphate
  modified_base 18: mod_base = OTHER; note = 2'-O-methylcytidine-3'-phosphate
  modified_base 19: mod_base = OTHER; note = 2'-O-methyladenosine-3'-phosphate
  modified_base 20: mod_base = OTHER; note = 2'-O-methyluridine-3'-phosphate
  modified_base 21: mod_base = OTHER; note = 2'-O-methyluridine-3'-phosphorothioate
  modified_base 22: mod_base = OTHER; note = 2'-O-methyluridine-3'-phosphorothioate
  modified_base 23: mod_base = OTHER; note = 2'-O-methylguanosine
taacatacatcctaaaacatttg

SEQ ID NO: 2662 - RNA, 21 nt, synthetic construct
  source 1..21: mol_type = other RNA
  modified_base 1: mod_base = OTHER; note = 2'-O-methyladenosine-3'-phosphorothioate
  modified_base 2: mod_base = OTHER; note = 2'-O-methyluridine-3'-phosphorothioate
  modified_base 3: mod_base = OTHER; note = 2'-O-methylcytidine-3'-phosphate
  modified_base 4: mod_base = OTHER; note = 2'-O-methylcytidine-3'-phosphate
  modified_base 5: mod_base = OTHER; note = 2'-O-methyladenosine-3'-phosphate
  modified_base 6: mod_base = OTHER; note = 2'-O-methyladenosine-3'-phosphate
  modified_base 7: mod_base = OTHER; note = 2'-deoxy-2'-fluoroadenosine-3'-phosphate
  modified_base 8: mod_base = OTHER; note = 2'-O-methyluridine-3'-phosphate
  modified_base 9: mod_base = OTHER; note = 2'-deoxy-2'-fluoroguanosine-3'-phosphate
  modified_base 10: mod_base = OTHER; note = 2'-deoxy-2'-fluorouridine-3'-phosphate
  modified_base 11: mod_base = OTHER; note = 2'-deoxy-2'-fluorouridine-3'-phosphate
  modified_base 12: mod_base = OTHER; note = 2'-O-methyluridine-3'-phosphate
  modified_base 13: mod_base = OTHER; note = 2'-O-methyluridine-3'-phosphate
  modified_base 14: mod_base = OTHER; note = 2'-O-methyladenosine-3'-phosphate
  modified_base 15: mod_base = OTHER; note = 2'-O-methylguanosine-3'-phosphate
  modified_base 16: mod_base = OTHER; note = 2'-O-methylguanosine-3'-phosphate
  modified_base 17: mod_base = OTHER; note = 2'-O-methyladenosine-3'-phosphate
  modified_base 18: mod_base = OTHER; note = 2'-O-methyluridine-3'-phosphate
  modified_base 19: mod_base = OTHER; note = 2'-O-methylguanosine-3'-phosphate
  modified_base 20: mod_base = OTHER; note = 2'-O-methyluridine-3'-phosphate
  modified_base 21: mod_base = OTHER; note = 2'-O-methyladenosine-3'-phosphate ((2S,4R)-1-[29-[[2-(acetylamino)-2-deoxy-beta-D-galactopyra nosyl]oxy]-14,14-bis[[3-[[3-[[5-[[2-(acetylamino)-2-deoxy-b eta-D-galactopyranosyl]oxy]-1-oxopentyl]amino]propyl]amino] -3-oxopropoxy]methyl]-1,12,19,25-tetraoxo-16-oxa-13,20,24-t riazanonacos-1-yl]-4-hydroxy-2-pyrrolidinyl)methyl ester
atccaaatgttttaggatgta

SEQ ID NO: 2663 - RNA, 23 nt, synthetic construct
  source 1..23: mol_type = other RNA
  modified_base 1: mod_base = OTHER; note = 2'-O-methyluridine-3'-phosphorothioate
  modified_base 2: mod_base = OTHER; note = 2'-deoxy-2'-fluoroadenosine-3'-phosphorothioate
  modified_base 3: mod_base = OTHER; note = 2'-O-methylcytidine-3'-phosphate
  modified_base 4: mod_base = OTHER; note = 2'-O-methyladenosine-3'-phosphate
  modified_base 5: mod_base = OTHER; note = 2'-O-methyluridine-3'-phosphate
  modified_base 6: mod_base = OTHER; note = 2'-deoxy-2'-fluorocytidine-3'-phosphate
  modified_base 7: mod_base = OTHER; note = 2'-O-methylcytidine-3'-phosphate
  modified_base 8: mod_base = OTHER; note = 2'-deoxy-2'-fluorouridine-3'-phosphate
  modified_base 9: mod_base = OTHER; note = 2'-deoxy-2'-fluoroadenosine-3'-phosphate
  modified_base 10: mod_base = OTHER; note = 2'-O-methyladenosine-3'-phosphate
  modified_base 11: mod_base = OTHER; note = 2'-O-methyladenosine-3'-phosphate
  modified_base 12: mod_base = OTHER; note = 2'-O-methyladenosine-3'-phosphate
  modified_base 13: mod_base = OTHER; note = 2'-O-methylcytidine-3'-phosphate
  modified_base 14: mod_base = OTHER; note = 2'-deoxy-2'-fluoroadenosine-3'-phosphate
  modified_base 15: mod_base = OTHER; note = 2'-O-methyluridine-3'-phosphate
  modified_base 16: mod_base = OTHER; note = 2'-deoxy-2'-fluorouridine-3'-phosphate
  modified_base 17: mod_base = OTHER; note = 2'-O-methyluridine-3'-phosphate
  modified_base 18: mod_base = OTHER; note = 2'-O-methylguanosine-3'-phosphate
  modified_base 19: mod_base = OTHER; note = 2'-O-methylguanosine-3'-phosphate
  modified_base 20: mod_base = OTHER; note = 2'-O-methyladenosine-3'-phosphate
  modified_base 21: mod_base = OTHER; note = 2'-O-methyluridine-3'-phosphorothioate
  modified_base 22: mod_base = OTHER; note = 2'-O-methyladenosine-3'-phosphorothioate
  modified_base 23: mod_base = OTHER; note = 2'-O-methyluridine
tacatcctaaaacatttggatat

SEQ ID NO: 2664 - RNA, 21 nt, synthetic construct
  source 1..21: mol_type = other RNA
  modified_base 1: mod_base = OTHER; note = 2'-O-methyluridine-3'-phosphorothioate
  modified_base 2: mod_base = OTHER; note = 2'-O-methyladenosine-3'-phosphorothioate
  modified_base 3: mod_base = OTHER; note = 2'-O-methyluridine-3'-phosphate
  modified_base 4: mod_base = OTHER; note = 2'-O-methylcytidine-3'-phosphate
  modified_base 5: mod_base = OTHER; note = 2'-O-methylcytidine-3'-phosphate
  modified_base 6: mod_base = OTHER; note = 2'-O-methyladenosine-3'-phosphate
  modified_base 7: mod_base = OTHER; note = 2'-deoxy-2'-fluoroadenosine-3'-phosphate
  modified_base 8: mod_base = OTHER; note = 2'-O-methyladenosine-3'-phosphate
  modified_base 9: mod_base = OTHER; note = 2'-deoxy-2'-fluorouridine-3'-phosphate
  modified_base 10: mod_base = OTHER; note = 2'-deoxy-2'-fluoroguanosine-3'-phosphate
  modified_base 11: mod_base = OTHER; note = 2'-deoxy-2'-fluorouridine-3'-phosphate
  modified_base 12: mod_base = OTHER; note = 2'-O-methyluridine-3'-phosphate
  modified_base 13: mod_base = OTHER; note = 2'-O-methyluridine-3'-phosphate
  modified_base 14: mod_base = OTHER; note = 2'-O-methyluridine-3'-phosphate
  modified_base 15: mod_base = OTHER; note = 2'-O-methyladenosine-3'-phosphate
  modified_base 16: mod_base = OTHER; note = 2'-O-methylguanosine-3'-phosphate
  modified_base 17: mod_base = OTHER; note = 2'-O-methylguanosine-3'-phosphate
  modified_base 18: mod_base = OTHER; note = 2'-O-methyladenosine-3'-phosphate
  modified_base 19: mod_base = OTHER; note = 2'-O-methyluridine-3'-phosphate
  modified_base 20: mod_base = OTHER; note = 2'-O-methylguanosine-3'-phosphate
  modified_base 21: mod_base = OTHER; note = 2'-O-methyluridine-3'-phosphate ((2S,4R)-1-[29-[[2-(acetylamino)-2-deoxy-beta-D-galactopyra nosyl]oxy]-14,14-bis[[3-[[3-[[5-[[2-(acetylamino)-2-deoxy-b eta-D-galactopyranosyl]oxy]-1-oxopentyl]amino]propyl]amino] -3-oxopropoxy]methyl]-1,12,19,25-tetraoxo-16-oxa-13,20,24-t riazanonacos-1-yl]-4-hydroxy-2-pyrrolidinyl)methyl ester
tatccaaatgttttaggatgt

SEQ ID NO: 2665 - RNA, 23 nt, synthetic construct
  source 1..23: mol_type = other RNA
  modified_base 1: mod_base = OTHER; note = 2'-O-methyladenosine-3'-phosphorothioate
  modified_base 2: mod_base = OTHER; note = 2'-deoxy-2'-fluorocytidine-3'-phosphorothioate
  modified_base 3: mod_base = OTHER; note = 2'-O-methyladenosine-3'-phosphate
  modified_base 4: mod_base = OTHER; note = 2'-O-methyluridine-3'-phosphate
  modified_base 5: mod_base = OTHER; note = 2'-O-methylcytidine-3'-phosphate
  modified_base 6: mod_base = OTHER; note = 2'-deoxy-2'-fluorocytidine-3'-phosphate
  modified_base 7: mod_base = OTHER; note = 2'-O-methyluridine-3'-phosphate
  modified_base 8: mod_base = OTHER; note = 2'-deoxy-2'-fluoroadenosine-3'-phosphate
  modified_base 9: mod_base = OTHER; note = 2'-deoxy-2'-fluoroadenosine-3'-phosphate
  modified_base 10: mod_base = OTHER; note = 2'-O-methyladenosine-3'-phosphate
  modified_base 11: mod_base = OTHER; note = 2'-O-methyladenosine-3'-phosphate
  modified_base 12: mod_base = OTHER; note = 2'-O-methylcytidine-3'-phosphate
  modified_base 13: mod_base = OTHER; note = 2'-O-methyladenosine-3'-phosphate
  modified_base 14: mod_base = OTHER; note = 2'-deoxy-2'-fluorouridine-3'-phosphate
  modified_base 15: mod_base = OTHER; note = 2'-O-methyluridine-3'-phosphate
  modified_base 16: mod_base = OTHER; note = 2'-deoxy-2'-fluorouridine-3'-phosphate
  modified_base 17: mod_base = OTHER; note = 2'-O-methylguanosine-3'-phosphate
  modified_base 18: mod_base = OTHER; note = 2'-O-methylguanosine-3'-phosphate
  modified_base 19: mod_base = OTHER; note = 2'-O-methyladenosine-3'-phosphate
  modified_base 20: mod_base = OTHER; note = 2'-O-methyluridine-3'-phosphate
  modified_base 21: mod_base = OTHER; note = 2'-O-methyladenosine-3'-phosphorothioate
  modified_base 22: mod_base = OTHER; note = 2'-O-methyluridine-3'-phosphorothioate
  modified_base 23: mod_base = OTHER; note = 2'-O-methyladenosine
acatcctaaaacatttggatata

SEQ ID NO: 2666 - RNA, 21 nt, synthetic construct
  source 1..21: mol_type = other RNA
  modified_base 1: mod_base = OTHER; note = 2'-O-methyladenosine-3'-phosphorothioate
  modified_base 2: mod_base = OTHER; note = 2'-O-methyluridine-3'-phosphorothioate
  modified_base 3: mod_base = OTHER; note = 2'-O-methylguanosine-3'-phosphate
  modified_base 4: mod_base = OTHER; note = 2'-O-methylguanosine-3'-phosphate
  modified_base 5: mod_base = OTHER; note = 2'-O-methylguanosine-3'-phosphate
  modified_base 6: mod_base = OTHER; note = 2'-O-methyluridine-3'-phosphate
  modified_base 7: mod_base = OTHER; note = 2'-deoxy-2'-fluoroguanosine-3'-phosphate
  modified_base 8: mod_base = OTHER; note = 2'-O-methylguanosine-3'-phosphate
  modified_base 9: mod_base = OTHER; note = 2'-deoxy-2'-fluorocytidine-3'-phosphate
  modified_base 10: mod_base = OTHER; note = 2'-deoxy-2'-fluoroguanosine-3'-phosphate
  modified_base 11: mod_base = OTHER; note = 2'-deoxy-2'-fluoroguanosine-3'-phosphate
  modified_base 12: mod_base = OTHER; note = 2'-O-methyluridine-3'-phosphate
  modified_base 13: mod_base = OTHER; note = 2'-O-methyladenosine-3'-phosphate
  modified_base 14: mod_base = OTHER; note = 2'-O-methyladenosine-3'-phosphate
  modified_base 15: mod_base = OTHER; note = 2'-O-methyluridine-3'-phosphate
  modified_base 16: mod_base = OTHER; note = 2'-O-methyluridine-3'-phosphate
  modified_base 17: mod_base = OTHER; note = 2'-O-methylguanosine-3'-phosphate
  modified_base 18: mod_base = OTHER; note = 2'-O-methylguanosine-3'-phosphate
  modified_base 19: mod_base = OTHER; note = 2'-O-methyluridine-3'-phosphate
  modified_base 20: mod_base = OTHER; note = 2'-O-methylguanosine-3'-phosphate
  modified_base 21: mod_base = OTHER; note = 2'-O-methyladenosine-3'-phosphate ((2S,4R)-1-[29-[[2-(acetylamino)-2-deoxy-beta-D-galactopyra nosyl]oxy]-14,14-bis[[3-[[3-[[5-[[2-(acetylamino)-2-deoxy-b eta-D-galactopyranosyl]oxy]-1-oxopentyl]amino]propyl]amino] -3-oxopropoxy]methyl]-1,12,19,25-tetraoxo-16-oxa-13,20,24-t riazanonacos-1-yl]-4-hydroxy-2-pyrrolidinyl)methyl ester
atgggtggcggtaattggtga

SEQ ID NO: 2667 - RNA, 23 nt, synthetic construct
  source 1..23: mol_type = other RNA
  modified_base 1: mod_base = OTHER; note = 2'-O-methyluridine-3'-phosphorothioate
  modified_base 2: mod_base = OTHER; note = 2'-deoxy-2'-fluorocytidine-3'-phosphorothioate
  modified_base 3: mod_base = OTHER; note = 2'-O-methyladenosine-3'-phosphate
  modified_base 4: mod_base = OTHER; note = 2'-O-methylcytidine-3'-phosphate
  modified_base 5: mod_base = OTHER; note = 2'-O-methylcytidine-3'-phosphate
  modified_base 6: mod_base = OTHER; note = 2'-deoxy-2'-fluoroadenosine-3'-phosphate
  modified_base 7: mod_base = OTHER; note = 2'-O-methyladenosine-3'-phosphate
  modified_base 8: mod_base = OTHER; note = 2'-deoxy-2'-fluorouridine-3'-phosphate
  modified_base 9: mod_base = OTHER; note = 2'-deoxy-2'-fluorouridine-3'-phosphate
  modified_base 10: mod_base = OTHER; note = 2'-O-methyladenosine-3'-phosphate
  modified_base 11: mod_base = OTHER; note = 2'-O-methylcytidine-3'-phosphate
  modified_base 12: mod_base = OTHER; note = 2'-O-methylcytidine-3'-phosphate
  modified_base 13: mod_base = OTHER; note = 2'-O-methylguanosine-3'-phosphate
  modified_base 14: mod_base = OTHER; note = 2'-deoxy-2'-fluorocytidine-3'-phosphate
  modified_base 15: mod_base = OTHER; note = 2'-O-methylcytidine-3'-phosphate
  modified_base 16: mod_base = OTHER; note = 2'-deoxy-2'-fluoroadenosine-3'-phosphate
  modified_base 17: mod_base = OTHER; note = 2'-O-methylcytidine-3'-phosphate
  modified_base 18: mod_base = OTHER; note = 2'-O-methylcytidine-3'-phosphate
  modified_base 19: mod_base = OTHER; note = 2'-O-methylcytidine-3'-phosphate
  modified_base 20: mod_base = OTHER; note = 2'-O-methyladenosine-3'-phosphate
  modified_base 21: mod_base = OTHER; note = 2'-O-methyluridine-3'-phosphorothioate
  modified_base 22: mod_base = OTHER; note = 2'-O-methyluridine-3'-phosphorothioate
  modified_base 23: mod_base = OTHER; note = 2'-O-methylcytidine
tcaccaattaccgccacccattc

SEQ ID NO: 2668 - RNA, 21 nt, synthetic construct
  source 1..21: mol_type = other RNA
  modified_base 1: mod_base = OTHER; note = 2'-O-methyluridine-3'-phosphorothioate
  modified_base 2: mod_base = OTHER; note = 2'-O-methylguanosine-3'-phosphorothioate
  modified_base 3: mod_base = OTHER; note = 2'-O-methylguanosine-3'-phosphate
  modified_base 4: mod_base = OTHER; note = 2'-O-methylguanosine-3'-phosphate
  modified_base 5: mod_base = OTHER; note = 2'-O-methyluridine-3'-phosphate
  modified_base 6: mod_base = OTHER; note = 2'-O-methylguanosine-3'-phosphate
  modified_base 7: mod_base = OTHER; note = 2'-deoxy-2'-fluoroguanosine-3'-phosphate
  modified_base 8: mod_base = OTHER; note = 2'-O-methylcytidine-3'-phosphate
  modified_base 9: mod_base = OTHER; note = 2'-deoxy-2'-fluoroguanosine-3'-phosphate
  modified_base 10: mod_base = OTHER; note = 2'-deoxy-2'-fluoroguanosine-3'-phosphate
  modified_base 11: mod_base = OTHER; note = 2'-deoxy-2'-fluorouridine-3'-phosphate
  modified_base 12: mod_base = OTHER; note = 2'-O-methyladenosine-3'-phosphate
  modified_base 13: mod_base = OTHER; note = 2'-O-methyladenosine-3'-phosphate
  modified_base 14: mod_base = OTHER; note = 2'-O-methyluridine-3'-phosphate
  modified_base 15: mod_base = OTHER; note = 2'-O-methyluridine-3'-phosphate
  modified_base 16: mod_base = OTHER; note = 2'-O-methylguanosine-3'-phosphate
  modified_base 17: mod_base = OTHER; note = 2'-O-methylguanosine-3'-phosphate
  modified_base 18: mod_base = OTHER; note = 2'-O-methyluridine-3'-phosphate
  modified_base 19: mod_base = OTHER; note = 2'-O-methylguanosine-3'-phosphate
  modified_base 20: mod_base = OTHER; note = 2'-O-methyladenosine-3'-phosphate
  modified_base 21: mod_base = OTHER; note = 2'-O-methyluridine-3'-phosphate ((2S,4R)-1-[29-[[2-(acetylamino)-2-deoxy-beta-D-galactopyra nosyl]oxy]-14,14-bis[[3-[[3-[[5-[[2-(acetylamino)-2-deoxy-b eta-D-galactopyranosyl]oxy]-1-oxopentyl]amino]propyl]amino] -3-oxopropoxy]methyl]-1,12,19,25-tetraoxo-16-oxa-13,20,24-t riazanonacos-1-yl]-4-hydroxy-2-pyrrolidinyl)methyl ester
tgggtggcggtaattggtgat

SEQ ID NO: 2669 - RNA, 23 nt, synthetic construct
  source 1..23: mol_type = other RNA
  modified_base 1: mod_base = OTHER; note = 2'-O-methyladenosine-3'-phosphorothioate
  modified_base 2: mod_base = OTHER; note = 2'-deoxy-2'-fluorouridine-3'-phosphorothioate
  modified_base 3: mod_base = OTHER; note = 2'-O-methylcytidine-3'-phosphate
  modified_base 4: mod_base = OTHER; note = 2'-O-methyladenosine-3'-phosphate
  modified_base 5: mod_base = OTHER; note = 2'-O-methylcytidine-3'-phosphate
  modified_base 6: mod_base = OTHER; note = 2'-deoxy-2'-fluorocytidine-3'-phosphate
  modified_base 7: mod_base = OTHER; note = 2'-O-methyladenosine-3'-phosphate
  modified_base 8: mod_base = OTHER; note = 2'-deoxy-2'-fluoroadenosine-3'-phosphate
  modified_base 9: mod_base = OTHER; note = 2'-deoxy-2'-fluorouridine-3'-phosphate
  modified_base 10: mod_base = OTHER; note = 2'-O-methyluridine-3'-phosphate
  modified_base 11: mod_base = OTHER; note = 2'-O-methyladenosine-3'-phosphate
  modified_base 12: mod_base = OTHER; note = 2'-O-methylcytidine-3'-phosphate
  modified_base 13: mod_base = OTHER; note = 2'-O-methylcytidine-3'-phosphate
  modified_base 14: mod_base = OTHER; note = 2'-deoxy-2'-fluoroguanosine-3'-phosphate
  modified_base 15: mod_base = OTHER; note = 2'-O-methylcytidine-3'-phosphate
  modified_base 16: mod_base = OTHER; note = 2'-deoxy-2'-fluorocytidine-3'-phosphate
  modified_base 17: mod_base = OTHER; note = 2'-O-methyladenosine-3'-phosphate
  modified_base 18: mod_base = OTHER; note = 2'-O-methylcytidine-3'-phosphate
  modified_base 19: mod_base = OTHER; note = 2'-O-methylcytidine-3'-phosphate
  modified_base 20: mod_base = OTHER; note = 2'-O-methylcytidine-3'-phosphate
  modified_base 21: mod_base = OTHER; note = 2'-O-methyladenosine-3'-phosphorothioate
  modified_base 22: mod_base = OTHER; note = 2'-O-methyluridine-3'-phosphorothioate
  modified_base 23: mod_base = OTHER; note = 2'-O-methyluridine
atcaccaattaccgccacccatt

SEQ ID NO: 2670 - RNA, 21 nt, synthetic construct
  source 1..21: mol_type = other RNA
  modified_base 1: mod_base = OTHER; note = 2'-O-methyluridine-3'-phosphorothioate
  modified_base 2: mod_base = OTHER; note = 2'-O-methylguanosine-3'-phosphorothioate
  modified_base 3: mod_base = OTHER; note = 2'-O-methylguanosine-3'-phosphate
  modified_base 4: mod_base = OTHER; note = 2'-O-methyladenosine-3'-phosphate
  modified_base 5: mod_base = OTHER; note = 2'-O-methyladenosine-3'-phosphate
  modified_base 6: mod_base = OTHER; note = 2'-O-methyluridine-3'-phosphate
  modified_base 7: mod_base = OTHER; note = 2'-deoxy-2'-fluoroguanosine-3'-phosphate
  modified_base 8: mod_base = OTHER; note = 2'-O-methylguanosine-3'-phosphate
  modified_base 9: mod_base = OTHER; note = 2'-deoxy-2'-fluoroguanosine-3'-phosphate
  modified_base 10: mod_base = OTHER; note = 2'-deoxy-2'-fluorouridine-3'-phosphate
  modified_base 11: mod_base = OTHER; note = 2'-deoxy-2'-fluoroguanosine-3'-phosphate
  modified_base 12: mod_base = OTHER; note = 2'-O-methylguanosine-3'-phosphate
  modified_base 13: mod_base = OTHER; note = 2'-O-methylcytidine-3'-phosphate
  modified_base 14: mod_base = OTHER; note = 2'-O-methylguanosine-3'-phosphate
  modified_base 15: mod_base = OTHER; note = 2'-O-methylguanosine-3'-phosphate
  modified_base 16: mod_base = OTHER; note = 2'-O-methyluridine-3'-phosphate
  modified_base 17: mod_base = OTHER; note = 2'-O-methyladenosine-3'-phosphate
  modified_base 18: mod_base = OTHER; note = 2'-O-methyladenosine-3'-phosphate
  modified_base 19: mod_base = OTHER; note = 2'-O-methyluridine-3'-phosphate
  modified_base 20: mod_base = OTHER; note = 2'-O-methyluridine-3'-phosphate
  modified_base 21: mod_base = OTHER; note = 2'-O-methylguanosine-3'-phosphate ((2S,4R)-1-[29-[[2-(acetylamino)-2-deoxy-beta-D-galactopyra nosyl]oxy]-14,14-bis[[3-[[3-[[5-[[2-(acetylamino)-2-deoxy-b eta-D-galactopyranosyl]oxy]-1-oxopentyl]amino]propyl]amino] -3-oxopropoxy]methyl]-1,12,19,25-tetraoxo-16-oxa-13,20,24-t riazanonacos-1-yl]-4-hydroxy-2-pyrrolidinyl)methyl ester
tggaatgggtggcggtaattg

SEQ ID NO: 2671 - RNA, 23 nt, synthetic construct
  source 1..23: mol_type = other RNA
  modified_base 1: mod_base = OTHER; note = 2'-O-methylcytidine-3'-phosphorothioate
  modified_base 2: mod_base = OTHER; note = 2'-deoxy-2'-fluoroadenosine-3'-phosphorothioate
  modified_base 3: mod_base = OTHER; note = 2'-O-methyladenosine-3'-phosphate
  modified_base 4: mod_base = OTHER; note = 2'-O-methyluridine-3'-phosphate
  modified_base 5: mod_base = OTHER; note = 2'-O-methyluridine-3'-phosphate
  modified_base 6: mod_base = OTHER; note = 2'-deoxy-2'-fluoroadenosine-3'-phosphate
  modified_base 7: mod_base = OTHER; note = 2'-O-methylcytidine-3'-phosphate
  modified_base 8: mod_base = OTHER; note = 2'-deoxy-2'-fluorocytidine-3'-phosphate
  modified_base 9: mod_base = OTHER; note = 2'-deoxy-2'-fluoroguanosine-3'-phosphate
  modified_base 10: mod_base = OTHER; note = 2'-O-methylcytidine-3'-phosphate
  modified_base 11: mod_base = OTHER; note = 2'-O-methylcytidine-3'-phosphate
  modified_base 12: mod_base = OTHER; note = 2'-O-methyladenosine-3'-phosphate
  modified_base 13: mod_base = OTHER; note = 2'-O-methylcytidine-3'-phosphate
  modified_base 14: mod_base = OTHER; note = 2'-deoxy-2'-fluorocytidine-3'-phosphate
  modified_base 15: mod_base = OTHER; note = 2'-O-methylcytidine-3'-phosphate
  modified_base 16: mod_base = OTHER; note = 2'-deoxy-2'-fluoroadenosine-3'-phosphate
  modified_base 17: mod_base = OTHER; note = 2'-O-methyluridine-3'-phosphate
  modified_base 18: mod_base = OTHER; note = 2'-O-methyluridine-3'-phosphate
  modified_base 19: mod_base = OTHER; note = 2'-O-methylcytidine-3'-phosphate
  modified_base 20: mod_base = OTHER; note = 2'-O-methylcytidine-3'-phosphate
  modified_base 21: mod_base = OTHER; note = 2'-O-methyladenosine-3'-phosphorothioate
  modified_base 22: mod_base = OTHER; note = 2'-O-methyladenosine-3'-phosphorothioate
  modified_base 23: mod_base = OTHER; note = 2'-O-methyluridine
caattaccgccacccattccaat

SEQ ID NO: 2672 - RNA, 21 nt, synthetic construct
  source 1..21: mol_type = other RNA
  modified_base 1: mod_base = OTHER; note = 2'-O-methyluridine-3'-phosphorothioate
  modified_base 2: mod_base = OTHER; note = 2'-O-methyluridine-3'-phosphorothioate
  modified_base 3: mod_base = OTHER; note = 2'-O-methylguanosine-3'-phosphate
  modified_base 4: mod_base = OTHER; note = 2'-O-methylguanosine-3'-phosphate
  modified_base 5: mod_base = OTHER; note = 2'-O-methyladenosine-3'-phosphate
  modified_base 6: mod_base = OTHER; note = 2'-O-methyladenosine-3'-phosphate
  modified_base 7: mod_base = OTHER; note = 2'-deoxy-2'-fluorouridine-3'-phosphate
  modified_base 8: mod_base = OTHER; note = 2'-O-methylguanosine-3'-phosphate
  modified_base 9: mod_base = OTHER; note = 2'-deoxy-2'-fluoroguanosine-3'-phosphate
  modified_base 10: mod_base = OTHER; note = 2'-deoxy-2'-fluoroguanosine-3'-phosphate
  modified_base 11: mod_base = OTHER; note = 2'-deoxy-2'-fluorouridine-3'-phosphate
  modified_base 12: mod_base = OTHER; note = 2'-O-methylguanosine-3'-phosphate
  modified_base 13: mod_base = OTHER; note = 2'-O-methylguanosine-3'-phosphate
  modified_base 14: mod_base = OTHER; note = 2'-O-methylcytidine-3'-phosphate
  modified_base 15: mod_base = OTHER; note = 2'-O-methylguanosine-3'-phosphate
  modified_base 16: mod_base = OTHER; note = 2'-O-methylguanosine-3'-phosphate
  modified_base 17: mod_base = OTHER; note = 2'-O-methyluridine-3'-phosphate
  modified_base 18: mod_base = OTHER; note = 2'-O-methyladenosine-3'-phosphate
  modified_base 19: mod_base = OTHER; note = 2'-O-methyladenosine-3'-phosphate
  modified_base 20: mod_base = OTHER; note = 2'-O-methyluridine-3'-phosphate
  modified_base 21: mod_base = OTHER; note = 2'-O-methyluridine-3'-phosphate ((2S,4R)-1-[29-[[2-(acetylamino)-2-deoxy-beta-D-galactopyra nosyl]oxy]-14,14-bis[[3-[[3-[[5-[[2-(acetylamino)-2-deoxy-b eta-D-galactopyranosyl]oxy]-1-oxopentyl]amino]propyl]amino] -3-oxopropoxy]methyl]-1,12,19,25-tetraoxo-16-oxa-13,20,24-t riazanonacos-1-yl]-4-hydroxy-2-pyrrolidinyl)methyl ester
ttggaatgggtggcggtaatt

SEQ ID NO: 2673 - RNA, 23 nt, synthetic construct
  source 1..23: mol_type = other RNA
  modified_base 1: mod_base = OTHER; note = 2'-O-methyladenosine-3'-phosphorothioate
  modified_base 2: mod_base = OTHER; note = 2'-deoxy-2'-fluoroadenosine-3'-phosphorothioate
  modified_base 3: mod_base = OTHER; note = 2'-O-methyluridine-3'-phosphate
  modified_base 4: mod_base = OTHER; note = 2'-O-methyluridine-3'-phosphate
  modified_base 5: mod_base = OTHER; note = 2'-O-methyladenosine-3'-phosphate
  modified_base 6: mod_base = OTHER; note = 2'-deoxy-2'-fluorocytidine-3'-phosphate
  modified_base 7: mod_base = OTHER; note = 2'-O-methylcytidine-3'-phosphate
  modified_base 8: mod_base = OTHER; note = 2'-deoxy-2'-fluoroguanosine-3'-phosphate
  modified_base 9: mod_base = OTHER; note = 2'-deoxy-2'-fluorocytidine-3'-phosphate
  modified_base 10: mod_base = OTHER; note = 2'-O-methylcytidine-3'-phosphate
  modified_base 11: mod_base = OTHER; note = 2'-O-methyladenosine-3'-phosphate
  modified_base 12: mod_base = OTHER; note = 2'-O-methylcytidine-3'-phosphate
  modified_base 13: mod_base = OTHER; note = 2'-O-methylcytidine-3'-phosphate
  modified_base 14: mod_base = OTHER; note = 2'-deoxy-2'-fluorocytidine-3'-phosphate
  modified_base 15: mod_base = OTHER; note = 2'-O-methyladenosine-3'-phosphate
  modified_base 16: mod_base = OTHER; note = 2'-deoxy-2'-fluorouridine-3'-phosphate
  modified_base 17: mod_base = OTHER; note = 2'-O-methyluridine-3'-phosphate
  modified_base 18: mod_base = OTHER; note = 2'-O-methylcytidine-3'-phosphate
  modified_base 19: mod_base = OTHER; note = 2'-O-methylcytidine-3'-phosphate
  modified_base 20: mod_base = OTHER; note = 2'-O-methyladenosine-3'-phosphate
  modified_base 21: mod_base = OTHER; note = 2'-O-methyladenosine-3'-phosphorothioate
  modified_base 22: mod_base = OTHER; note = 2'-O-methyluridine-3'-phosphorothioate
  modified_base 23: mod_base = OTHER; note = 2'-O-methyluridine
aattaccgccacccattccaatt

SEQ ID NO: 2674 - RNA, 21 nt, synthetic construct
  source 1..21: mol_type = other RNA
  modified_base 1: mod_base = OTHER; note = 2'-O-methyluridine-3'-phosphorothioate
  modified_base 2: mod_base = OTHER; note = 2'-O-methyluridine-3'-phosphorothioate
  modified_base 3: mod_base = OTHER; note = 2'-O-methylcytidine-3'-phosphate
  modified_base 4: mod_base = OTHER; note = 2'-O-methyladenosine-3'-phosphate
  modified_base 5: mod_base = OTHER; note = 2'-O-methyladenosine-3'-phosphate
  modified_base 6: mod_base = OTHER; note = 2'-O-methyladenosine-3'-phosphate
  modified_base 7: mod_base = OTHER; note = 2'-deoxy-2'-fluoroguanosine-3'-phosphate
  modified_base 8: mod_base = OTHER; note = 2'-O-methyluridine-3'-phosphate
  modified_base 9: mod_base = OTHER; note = 2'-deoxy-2'-fluoroguanosine-3'-phosphate
  modified_base 10: mod_base = OTHER; note = 2'-deoxy-2'-fluorouridine-3'-phosphate
  modified_base 11: mod_base = OTHER; note = 2'-deoxy-2'-fluorouridine-3'-phosphate
  modified_base 12: mod_base = OTHER; note = 2'-O-methylguanosine-3'-phosphate
  modified_base 13: mod_base = OTHER; note = 2'-O-methylguanosine-3'-phosphate
  modified_base 14: mod_base = OTHER; note = 2'-O-methyluridine-3'-phosphate
  modified_base 15: mod_base = OTHER; note = 2'-O-methyladenosine-3'-phosphate
  modified_base 16: mod_base = OTHER; note = 2'-O-methyladenosine-3'-phosphate
  modified_base 17: mod_base = OTHER; note = 2'-O-methyluridine-3'-phosphate
  modified_base 18: mod_base = OTHER; note = 2'-O-methylguanosine-3'-phosphate
  modified_base 19: mod_base = OTHER; note = 2'-O-methylcytidine-3'-phosphate
  modified_base 20: mod_base = OTHER; note = 2'-O-methylcytidine-3'-phosphate
  modified_base 21: mod_base = OTHER; note = 2'-O-methyluridine-3'-phosphate ((2S,4R)-1-[29-[[2-(acetylamino)-2-deoxy-beta-D-galactopyra nosyl]oxy]-14,14-bis[[3-[[3-[[5-[[2-(acetylamino)-2-deoxy-b eta-D-galactopyranosyl]oxy]-1-oxopentyl]amino]propyl]amino] -3-oxopropoxy]methyl]-1,12,19,25-tetraoxo-16-oxa-13,20,24-t riazanonacos-1-yl]-4-hydroxy-2-pyrrolidinyl)methyl ester
ttcaaagtgttggtaatgcct

SEQ ID NO: 2675 - RNA, 23 nt, synthetic construct
  source 1..23: mol_type = other RNA
  modified_base 1: mod_base = OTHER; note = 2'-O-methyladenosine-3'-phosphorothioate
  modified_base 2: mod_base = OTHER; note = 2'-deoxy-2'-fluoroguanosine-3'-phosphorothioate
  modified_base 3: mod_base = OTHER; note = 2'-O-methylguanosine-3'-phosphate
  modified_base 4: mod_base = OTHER; note = 2'-O-methylcytidine-3'-phosphate
  modified_base 5: mod_base = OTHER; note = 2'-O-methyladenosine-3'-phosphate
  modified_base 6: mod_base = OTHER; note = 2'-deoxy-2'-fluorouridine-3'-phosphate
  modified_base 7: mod_base = OTHER; note = 2'-O-methyluridine-3'-phosphate
  modified_base 8: mod_base = OTHER; note = 2'-deoxy-2'-fluoroadenosine-3'-phosphate
  modified_base 9: mod_base = OTHER; note = 2'-deoxy-2'-fluorocytidine-3'-phosphate
  modified_base 10: mod_base = OTHER; note = 2'-O-methylcytidine-3'-phosphate
  modified_base 11: mod_base = OTHER; note = 2'-O-methyladenosine-3'-phosphate
  modified_base 12: mod_base = OTHER; note = 2'-O-methyladenosine-3'-phosphate
  modified_base 13: mod_base = OTHER; note = 2'-O-methylcytidine-3'-phosphate
  modified_base 14: mod_base = OTHER; note = 2'-deoxy-2'-fluoroadenosine-3'-phosphate
  modified_base 15: mod_base = OTHER; note = 2'-O-methylcytidine-3'-phosphate
  modified_base 16: mod_base = OTHER; note = 2'-deoxy-2'-fluorouridine-3'-phosphate
  modified_base 17: mod_base = OTHER; note = 2'-O-methyluridine-3'-phosphate
  modified_base 18: mod_base = OTHER; note = 2'-O-methyluridine-3'-phosphate
  modified_base 19: mod_base = OTHER; note = 2'-O-methylguanosine-3'-phosphate
  modified_base 20: mod_base = OTHER; note = 2'-O-methyladenosine-3'-phosphate
  modified_base 21: mod_base = OTHER; note = 2'-O-methyladenosine-3'-phosphorothioate
  modified_base 22: mod_base = OTHER; note = 2'-O-methylcytidine-3'-phosphorothioate
  modified_base 23: mod_base = OTHER; note = 2'-O-methylcytidine
aggcattaccaacactttgaacc

SEQ ID NO: 2676 - RNA, 21 nt, synthetic construct
  source 1..21: mol_type = other RNA
  modified_base 1: mod_base = OTHER; note = 2'-O-methyluridine-3'-phosphorothioate
  modified_base 2: mod_base = OTHER; note = 2'-O-methylcytidine-3'-phosphorothioate
  modified_base 3: mod_base = OTHER; note = 2'-O-methyladenosine-3'-phosphate
  modified_base 4: mod_base = OTHER; note = 2'-O-methyladenosine-3'-phosphate
  modified_base 5: mod_base = OTHER; note = 2'-O-methyladenosine-3'-phosphate
  modified_base 6: mod_base = OTHER; note = 2'-O-methylguanosine-3'-phosphate
  modified_base 7: mod_base = OTHER; note = 2'-deoxy-2'-fluorouridine-3'-phosphate
  modified_base 8: mod_base = OTHER; note = 2'-O-methylguanosine-3'-phosphate
  modified_base 9: mod_base = OTHER; note = 2'-deoxy-2'-fluorouridine-3'-phosphate
  modified_base 10: mod_base = OTHER; note = 2'-deoxy-2'-fluorouridine-3'-phosphate
  modified_base 11: mod_base = OTHER; note = 2'-deoxy-2'-fluoroguanosine-3'-phosphate
  modified_base 12: mod_base = OTHER; note = 2'-O-methylguanosine-3'-phosphate
  modified_base 13: mod_base = OTHER; note = 2'-O-methyluridine-3'-phosphate
  modified_base 14: mod_base = OTHER; note = 2'-O-methyladenosine-3'-phosphate
  modified_base 15: mod_base = OTHER; note = 2'-O-methyladenosine-3'-phosphate
  modified_base 16: mod_base = OTHER; note = 2'-O-methyluridine-3'-phosphate
  modified_base 17: mod_base = OTHER; note = 2'-O-methylguanosine-3'-phosphate
  modified_base 18: mod_base = OTHER; note = 2'-O-methylcytidine-3'-phosphate
  modified_base 19: mod_base = OTHER; note = 2'-O-methylcytidine-3'-phosphate
  modified_base 20: mod_base = OTHER; note = 2'-O-methyluridine-3'-phosphate
  modified_base 21: mod_base = OTHER; note = 2'-O-methylguanosine-3'-phosphate ((2S,4R)-1-[29-[[2-(acetylamino)-2-deoxy-beta-D-galactopyra nosyl]oxy]-14,14-bis[[3-[[3-[[5-[[2-(acetylamino)-2-deoxy-b eta-D-galactopyranosyl]oxy]-1-oxopentyl]amino]propyl]amino] -3-oxopropoxy]methyl]-1,12,19,25-tetraoxo-16-oxa-13,20,24-t riazanonacos-1-yl]-4-hydroxy-2-pyrrolidinyl)methyl ester
tcaaagtgttggtaatgcctg

SEQ ID NO: 2677 - RNA, 23 nt, synthetic construct
  source 1..23: mol_type = other RNA
  modified_base 1: mod_base = OTHER; note = 2'-O-methylcytidine-3'-phosphorothioate
  modified_base 2: mod_base = OTHER; note = 2'-deoxy-2'-fluoroadenosine-3'-phosphorothioate
  modified_base 3: mod_base = OTHER; note = 2'-O-methylguanosine-3'-phosphate
  modified_base 4: mod_base = OTHER; note = 2'-O-methylguanosine-3'-phosphate
  modified_base 5: mod_base = OTHER; note = 2'-O-methylcytidine-3'-phosphate
  modified_base 6: mod_base = OTHER; note = 2'-deoxy-2'-fluoroadenosine-3'-phosphate
  modified_base 7: mod_base = OTHER; note = 2'-O-methyluridine-3'-phosphate
  modified_base 8: mod_base = OTHER; note = 2'-deoxy-2'-fluorouridine-3'-phosphate
  modified_base 9: mod_base = OTHER; note = 2'-deoxy-2'-fluoroadenosine-3'-phosphate
  modified_base 10: mod_base = OTHER; note = 2'-O-methylcytidine-3'-phosphate
  modified_base 11: mod_base = OTHER; note = 2'-O-methylcytidine-3'-phosphate
  modified_base 12: mod_base = OTHER; note = 2'-O-methyladenosine-3'-phosphate
  modified_base 13: mod_base = OTHER; note = 2'-O-methyladenosine-3'-phosphate
  modified_base 14: mod_base = OTHER; note = 2'-deoxy-2'-fluorocytidine-3'-phosphate
  modified_base 15: mod_base = OTHER; note = 2'-O-methyladenosine-3'-phosphate
  modified_base 16: mod_base = OTHER; note = 2'-deoxy-2'-fluorocytidine-3'-phosphate
  modified_base 17: mod_base = OTHER; note = 2'-O-methyluridine-3'-phosphate
  modified_base 18: mod_base = OTHER; note = 2'-O-methyluridine-3'-phosphate
  modified_base 19: mod_base = OTHER; note = 2'-O-methyluridine-3'-phosphate
  modified_base 20: mod_base = OTHER; note = 2'-O-methylguanosine-3'-phosphate
  modified_base 21: mod_base = OTHER; note = 2'-O-methyladenosine-3'-phosphorothioate
  modified_base 22: mod_base = OTHER; note = 2'-O-methyladenosine-3'-phosphorothioate
  modified_base 23: mod_base = OTHER; note = 2'-O-methylcytidine
caggcattaccaacactttgaac

SEQ ID NO: 2678 - RNA, 21 nt, synthetic construct
  source 1..21: mol_type = other RNA
  modified_base 1: mod_base = OTHER; note = 2'-O-methylcytidine-3'-phosphorothioate
  modified_base 2: mod_base = OTHER; note = 2'-O-methyladenosine-3'-phosphorothioate
  modified_base 3: mod_base = OTHER; note = 2'-O-methylguanosine-3'-phosphate
  modified_base 4: mod_base = OTHER; note = 2'-O-methylguanosine-3'-phosphate
  modified_base 5: mod_base = OTHER; note = 2'-O-methyluridine-3'-phosphate
  modified_base 6: mod_base = OTHER; note = 2'-O-methyluridine-3'-phosphate
  modified_base 7: mod_base = OTHER; note = 2'-deoxy-2'-fluorocytidine-3'-phosphate
  modified_base 8: mod_base = OTHER; note = 2'-O-methyladenosine-3'-phosphate
  modified_base 9: mod_base = OTHER; note = 2'-deoxy-2'-fluoroadenosine-3'-phosphate
  modified_base 10: mod_base = OTHER; note = 2'-deoxy-2'-fluoroadenosine-3'-phosphate
  modified_base 11: mod_base = OTHER; note = 2'-deoxy-2'-fluoroguanosine-3'-phosphate
  modified_base 12: mod_base = OTHER; note = 2'-O-methyluridine-3'-phosphate
  modified_base 13: mod_base = OTHER; note = 2'-O-methylguanosine-3'-phosphate
  modified_base 14: mod_base = OTHER; note = 2'-O-methyluridine-3'-phosphate
  modified_base 15: mod_base = OTHER; note = 2'-O-methyluridine-3'-phosphate
  modified_base 16: mod_base = OTHER; note = 2'-O-methylguanosine-3'-phosphate
  modified_base 17: mod_base = OTHER; note = 2'-O-methylguanosine-3'-phosphate
  modified_base 18: mod_base = OTHER; note = 2'-O-methyluridine-3'-phosphate
  modified_base 19: mod_base = OTHER; note = 2'-O-methyladenosine-3'-phosphate
  modified_base 20: mod_base = OTHER; note = 2'-O-methyladenosine-3'-phosphate
  modified_base 21: mod_base = OTHER; note = 2'-O-methyluridine-3'-phosphate ((2S,4R)-1-[29-[[2-(acetylamino)-2-deoxy-beta-D-galactopyra nosyl]oxy]-14,14-bis[[3-[[3-[[5-[[2-(acetylamino)-2-deoxy-b eta-D-galactopyranosyl]oxy]-1-oxopentyl]amino]propyl]amino] -3-oxopropoxy]methyl]-1,12,19,25-tetraoxo-16-oxa-13,20,24-t riazanonacos-1-yl]-4-hydroxy-2-pyrrolidinyl)methyl ester
caggttcaaagtgttggtaat

SEQ ID NO: 2679 - RNA, 23 nt, synthetic construct
  source 1..23: mol_type = other RNA
  modified_base 1: mod_base = OTHER; note = 2'-O-methyladenosine-3'-phosphorothioate
  modified_base 2: mod_base = OTHER; note = 2'-deoxy-2'-fluorouridine-3'-phosphorothioate
  modified_base 3: mod_base = OTHER; note = 2'-O-methyluridine-3'-phosphate
  modified_base 4: mod_base = OTHER; note = 2'-O-methyladenosine-3'-phosphate
  modified_base 5: mod_base = OTHER; note = 2'-O-methylcytidine-3'-phosphate
  modified_base 6: mod_base = OTHER; note = 2'-deoxy-2'-fluorocytidine-3'-phosphate
  modified_base 7: mod_base = OTHER; note = 2'-O-methyladenosine-3'-phosphate
  modified_base 8: mod_base = OTHER; note = 2'-deoxy-2'-fluoroadenosine-3'-phosphate
  modified_base 9: mod_base = OTHER; note = 2'-deoxy-2'-fluorocytidine-3'-phosphate
  modified_base 10: mod_base = OTHER; note = 2'-O-methyladenosine-3'-phosphate
  modified_base 11: mod_base = OTHER; note = 2'-O-methylcytidine-3'-phosphate
  modified_base 12: mod_base = OTHER; note = 2'-O-methyluridine-3'-phosphate
  modified_base 13: mod_base = OTHER; note = 2'-O-methyluridine-3'-phosphate
  modified_base 14: mod_base = OTHER; note = 2'-deoxy-2'-fluorouridine-3'-phosphate
  modified_base 15: mod_base = OTHER; note = 2'-O-methylguanosine-3'-phosphate
  modified_base 16: mod_base = OTHER; note = 2'-deoxy-2'-fluoroadenosine-3'-phosphate
  modified_base 17: mod_base = OTHER; note = 2'-O-methyladenosine-3'-phosphate
  modified_base 18: mod_base = OTHER; note = 2'-O-methylcytidine-3'-phosphate
  modified_base 19: mod_base = OTHER; note = 2'-O-methylcytidine-3'-phosphate
  modified_base 20: mod_base = OTHER; note = 2'-O-methyluridine-3'-phosphate
  modified_base 21: mod_base = OTHER; note = 2'-O-methylguanosine-3'-phosphorothioate
  modified_base 22: mod_base = OTHER; note = 2'-O-methyladenosine-3'-phosphorothioate
  modified_base 23: mod_base = OTHER; note = 2'-O-methylguanosine
attaccaacactttgaacctgag

SEQ ID NO: 2680 - RNA, 21 nt, synthetic construct
  source 1..21: mol_type = other RNA
  modified_base 1: mod_base = OTHER; note = 2'-O-methyluridine-3'-phosphorothioate
  modified_base 2: mod_base = OTHER; note = 2'-O-methylcytidine-3'-phosphorothioate
  modified_base 3: mod_base = OTHER; note = 2'-O-methyladenosine-3'-phosphate
  modified_base 4: mod_base = OTHER; note = 2'-O-methylguanosine-3'-phosphate
  modified_base 5: mod_base = OTHER; note = 2'-O-methylguanosine-3'-phosphate
  modified_base 6: mod_base = OTHER; note = 2'-O-methyluridine-3'-phosphate
  modified_base 7: mod_base = OTHER; note = 2'-deoxy-2'-fluorouridine-3'-phosphate
  modified_base 8: mod_base = OTHER; note = 2'-O-methylcytidine-3'-phosphate
  modified_base 9: mod_base = OTHER; note = 2'-deoxy-2'-fluoroadenosine-3'-phosphate
  modified_base 10: mod_base = OTHER; note = 2'-deoxy-2'-fluoroadenosine-3'-phosphate
  modified_base 11: mod_base = OTHER; note = 2'-deoxy-2'-fluoroadenosine-3'-phosphate
  modified_base 12: mod_base = OTHER; note = 2'-O-methylguanosine-3'-phosphate
  modified_base 13: mod_base = OTHER; note = 2'-O-methyluridine-3'-phosphate
  modified_base 14: mod_base = OTHER; note = 2'-O-methylguanosine-3'-phosphate
  modified_base 15: mod_base = OTHER; note = 2'-O-methyluridine-3'-phosphate
  modified_base 16: mod_base = OTHER; note = 2'-O-methyluridine-3'-phosphate
  modified_base 17: mod_base = OTHER; note = 2'-O-methylguanosine-3'-phosphate
  modified_base 18: mod_base = OTHER; note = 2'-O-methylguanosine-3'-phosphate
  modified_base 19: mod_base = OTHER; note = 2'-O-methyluridine-3'-phosphate
  modified_base 20: mod_base = OTHER; note = 2'-O-methyladenosine-3'-phosphate
  modified_base 21: mod_base = OTHER; note = 2'-O-methyladenosine-3'-phosphate ((2S,4R)-1-[29-[[2-(acetylamino)-2-deoxy-beta-D-galactopyra nosyl]oxy]-14,14-bis[[3-[[3-[[5-[[2-(acetylamino)-2-deoxy-b eta-D-galactopyranosyl]oxy]-1-oxopentyl]amino]propyl]amino] -3-oxopropoxy]methyl]-1,12,19,25-tetraoxo-16-oxa-13,20,24-t riazanonacos-1-yl]-4-hydroxy-2-pyrrolidinyl)methyl ester
tcaggttcaaagtgttggtaa

SEQ ID NO: 2681 - RNA, 23 nt, synthetic construct
  source 1..23: mol_type = other RNA
  modified_base 1: mod_base = OTHER; note = 2'-O-methyluridine-3'-phosphorothioate
  modified_base 2: mod_base = OTHER; note = 2'-deoxy-2'-fluorouridine-3'-phosphorothioate
  modified_base 3: mod_base = OTHER; note = 2'-O-methyladenosine-3'-phosphate
  modified_base 4: mod_base = OTHER; note = 2'-O-methylcytidine-3'-phosphate
  modified_base 5: mod_base = OTHER; note = 2'-O-methylcytidine-3'-phosphate
  modified_base 6: mod_base = OTHER; note = 2'-deoxy-2'-fluoroadenosine-3'-phosphate
  modified_base 7: mod_base = OTHER; note = 2'-O-methyladenosine-3'-phosphate
  modified_base 8: mod_base = OTHER; note = 2'-deoxy-2'-fluorocytidine-3'-phosphate
  modified_base 9: mod_base = OTHER; note = 2'-deoxy-2'-fluoroadenosine-3'-phosphate
  modified_base 10: mod_base = OTHER; note = 2'-O-methylcytidine-3'-phosphate
  modified_base 11: mod_base = OTHER; note = 2'-O-methyluridine-3'-phosphate
  modified_base 12: mod_base = OTHER; note = 2'-O-methyluridine-3'-phosphate
  modified_base 13: mod_base = OTHER; note = 2'-O-methyluridine-3'-phosphate
  modified_base 14: mod_base = OTHER; note = 2'-deoxy-2'-fluoroguanosine-3'-phosphate
  modified_base 15: mod_base = OTHER; note = 2'-O-methyladenosine-3'-phosphate
  modified_base 16: mod_base = OTHER; note = 2'-deoxy-2'-fluoroadenosine-3'-phosphate
  modified_base 17: mod_base = OTHER; note = 2'-O-methylcytidine-3'-phosphate
  modified_base 18: mod_base = OTHER; note = 2'-O-methylcytidine-3'-phosphate
  modified_base 19: mod_base = OTHER; note = 2'-O-methyluridine-3'-phosphate
  modified_base 20: mod_base = OTHER; note = 2'-O-methylguanosine-3'-phosphate
  modified_base 21: mod_base = OTHER; note = 2'-O-methyladenosine-3'-phosphorothioate
  modified_base 22: mod_base = OTHER; note = 2'-O-methylguanosine-3'-phosphorothioate
  modified_base 23: mod_base = OTHER; note = 2'-O-methylcytidine
ttaccaacactttgaacctgagc

SEQ ID NO: 2682 - RNA, 21 nt, synthetic construct
  source 1..21: mol_type = other RNA
  modified_base 1: mod_base = OTHER; note = 2'-O-methylcytidine-3'-phosphorothioate
  modified_base 2: mod_base = OTHER; note = 2'-O-methylcytidine-3'-phosphorothioate
  modified_base 3: mod_base = OTHER; note = 2'-O-methyladenosine-3'-phosphate
  modified_base 4: mod_base = OTHER; note = 2'-O-methylcytidine-3'-phosphate
  modified_base 5: mod_base = OTHER; note = 2'-O-methylcytidine-3'-phosphate
  modified_base 6: mod_base = OTHER; note = 2'-O-methyluridine-3'-phosphate
  modified_base 7: mod_base = OTHER; note = 2'-deoxy-2'-fluorocytidine-3'-phosphate
  modified_base 8: mod_base = OTHER; note = 2'-O-methylcytidine-3'-phosphate
  modified_base 9: mod_base = OTHER; note = 2'-deoxy-2'-fluorouridine-3'-phosphate
  modified_base 10: mod_base = OTHER; note = 2'-deoxy-2'-fluorocytidine-3'-phosphate
  modified_base 11: mod_base = OTHER; note = 2'-deoxy-2'-fluoroadenosine-3'-phosphate
  modified_base 12: mod_base = OTHER; note = 2'-O-methyladenosine-3'-phosphate
  modified_base 13: mod_base = OTHER; note = 2'-O-methyluridine-3'-phosphate
  modified_base 14: mod_base = OTHER; note = 2'-O-methyluridine-3'-phosphate
  modified_base 15: mod_base = OTHER; note = 2'-O-methylguanosine-3'-phosphate
  modified_base 16: mod_base = OTHER; note = 2'-O-methyladenosine-3'-phosphate
  modified_base 17: mod_base = OTHER; note = 2'-O-methyladenosine-3'-phosphate
  modified_base 18: mod_base = OTHER; note = 2'-O-methylguanosine-3'-phosphate
  modified_base 19: mod_base = OTHER; note = 2'-O-methyladenosine-3'-phosphate
  modified_base 20: mod_base = OTHER; note = 2'-O-methyladenosine-3'-phosphate
  modified_base 21: mod_base = OTHER; note = 2'-O-methylguanosine-3'-phosphate ((2S,4R)-1-[29-[[2-(acetylamino)-2-deoxy-beta-D-galactopyra nosyl]oxy]-14,14-bis[[3-[[3-[[5-[[2-(acetylamino)-2-deoxy-b eta-D-galactopyranosyl]oxy]-1-oxopentyl]amino]propyl]amino] -3-oxopropoxy]methyl]-1,12,19,25-tetraoxo-16-oxa-13,20,24-t riazanonacos-1-yl]-4-hydroxy-2-pyrrolidinyl)methyl ester
ccacctcctcaattgaagaag

SEQ ID NO: 2683 - RNA, 23 nt, synthetic construct
  source 1..23: mol_type = other RNA
  modified_base 1: mod_base = OTHER; note = 2'-O-methylcytidine-3'-phosphorothioate
  modified_base 2: mod_base = OTHER; note = 2'-deoxy-2'-fluorouridine-3'-phosphorothioate
  modified_base 3: mod_base = OTHER; note = 2'-O-methyluridine-3'-phosphate
  modified_base 4: mod_base = OTHER; note = 2'-O-methylcytidine-3'-phosphate
  modified_base 5: mod_base = OTHER; note = 2'-O-methyluridine-3'-phosphate
  modified_base 6: mod_base = OTHER; note = 2'-deoxy-2'-fluorouridine-3'-phosphate
  modified_base 7: mod_base = OTHER; note = 2'-O-methylcytidine-3'-phosphate
  modified_base 8: mod_base = OTHER; note = 2'-deoxy-2'-fluoroadenosine-3'-phosphate
  modified_base 9: mod_base = OTHER; note = 2'-deoxy-2'-fluoroadenosine-3'-phosphate
  modified_base 10: mod_base = OTHER; note = 2'-O-methyluridine-3'-phosphate
  modified_base 11: mod_base = OTHER; note = 2'-O-methyluridine-3'-phosphate
  modified_base 12: mod_base = OTHER; note = 2'-O-methylguanosine-3'-phosphate
  modified_base 13: mod_base = OTHER; note = 2'-O-methyladenosine-3'-phosphate
  modified_base 14: mod_base = OTHER; note = 2'-deoxy-2'-fluoroguanosine-3'-phosphate
  modified_base 15: mod_base = OTHER; note = 2'-O-methylguanosine-3'-phosphate
  modified_base 16: mod_base = OTHER; note = 2'-deoxy-2'-fluoroadenosine-3'-phosphate
  modified_base 17: mod_base = OTHER; note = 2'-O-methylguanosine-3'-phosphate
  modified_base 18: mod_base = OTHER; note = 2'-O-methylguanosine-3'-phosphate
  modified_base 19: mod_base = OTHER; note = 2'-O-methyluridine-3'-phosphate
  modified_base 20: mod_base = OTHER; note = 2'-O-methylguanosine-3'-phosphate
  modified_base 21: mod_base = OTHER; note = 2'-O-methylguanosine-3'-phosphorothioate
  modified_base 22: mod_base = OTHER; note = 2'-O-methylcytidine-3'-phosphorothioate
  modified_base 23: mod_base = OTHER; note = 2'-O-methylcytidine
cttcttcaattgaggaggtggcc

SEQ ID NO: 2684 - RNA, 21 nt, synthetic construct
  source 1..21: mol_type = other RNA
  modified_base 1: mod_base = OTHER; note = 2'-O-methylcytidine-3'-phosphorothioate
  modified_base 2: mod_base = OTHER; note = 2'-O-methyladenosine-3'-phosphorothioate
  modified_base 3: mod_base = OTHER; note = 2'-O-methylcytidine-3'-phosphate
  modified_base 4: mod_base = OTHER; note = 2'-O-methylcytidine-3'-phosphate
  modified_base 5: mod_base = OTHER; note = 2'-O-methyluridine-3'-phosphate
  modified_base 6: mod_base = OTHER; note = 2'-O-methylcytidine-3'-phosphate
  modified_base 7: mod_base = OTHER; note = 2'-deoxy-2'-fluorocytidine-3'-phosphate
  modified_base 8: mod_base = OTHER; note = 2'-O-methyluridine-3'-phosphate
  modified_base 9: mod_base = OTHER; note = 2'-deoxy-2'-fluorocytidine-3'-phosphate
  modified_base 10: mod_base = OTHER; note = 2'-deoxy-2'-fluoroadenosine-3'-phosphate
  modified_base 11: mod_base = OTHER; note = 2'-deoxy-2'-fluoroadenosine-3'-phosphate
  modified_base 12: mod_base = OTHER; note = 2'-O-methyluridine-3'-phosphate
  modified_base 13: mod_base = OTHER; note = 2'-O-methyluridine-3'-phosphate
  modified_base 14: mod_base = OTHER; note = 2'-O-methylguanosine-3'-phosphate
  modified_base 15: mod_base = OTHER; note = 2'-O-methyladenosine-3'-phosphate
  modified_base 16: mod_base = OTHER; note = 2'-O-methyladenosine-3'-phosphate
  modified_base 17: mod_base = OTHER; note = 2'-O-methylguanosine-3'-phosphate
  modified_base 18: mod_base = OTHER; note = 2'-O-methyladenosine-3'-phosphate
  modified_base 19: mod_base = OTHER; note = 2'-O-methyladenosine-3'-phosphate
  modified_base 20: mod_base = OTHER; note = 2'-O-methylguanosine-3'-phosphate
  modified_base 21: mod_base = OTHER; note = 2'-O-methyluridine-3'-phosphate ((2S,4R)-1-[29-[[2-(acetylamino)-2-deoxy-beta-D-galactopyra nosyl]oxy]-14,14-bis[[3-[[3-[[5-[[2-(acetylamino)-2-deoxy-b eta-D-galactopyranosyl]oxy]-1-oxopentyl]amino]propyl]amino] -3-oxopropoxy]methyl]-1,12,19,25-tetraoxo-16-oxa-13,20,24-t riazanonacos-1-yl]-4-hydroxy-2-pyrrolidinyl)methyl ester
cacctcctcaattgaagaagt

SEQ ID NO: 2685 - RNA, 23 nt, synthetic construct
  source 1..23: mol_type = other RNA
  modified_base 1: mod_base = OTHER; note = 2'-O-methyladenosine-3'-phosphorothioate
  modified_base 2: mod_base = OTHER; note = 2'-deoxy-2'-fluorocytidine-3'-phosphorothioate
  modified_base 3: mod_base = OTHER; note = 2'-O-methyluridine-3'-phosphate
  modified_base 4: mod_base = OTHER; note = 2'-O-methyluridine-3'-phosphate
  modified_base 5: mod_base = OTHER; note = 2'-O-methylcytidine-3'-phosphate
  modified_base 6: mod_base = OTHER; note = 2'-deoxy-2'-fluorouridine-3'-phosphate
  modified_base 7: mod_base = OTHER; note = 2'-O-methyluridine-3'-phosphate
  modified_base 8: mod_base = OTHER; note = 2'-deoxy-2'-fluorocytidine-3'-phosphate
  modified_base 9: mod_base = OTHER; note = 2'-deoxy-2'-fluoroadenosine-3'-phosphate
  modified_base 10: mod_base = OTHER; note = 2'-O-methyladenosine-3'-phosphate
  modified_base 11: mod_base = OTHER; note = 2'-O-methyluridine-3'-phosphate
  modified_base 12: mod_base = OTHER; note = 2'-O-methyluridine-3'-phosphate
  modified_base 13: mod_base = OTHER; note = 2'-O-methylguanosine-3'-phosphate
  modified_base 14: mod_base = OTHER; note = 2'-deoxy-2'-fluoroadenosine-3'-phosphate
  modified_base 15: mod_base = OTHER; note = 2'-O-methylguanosine-3'-phosphate
  modified_base 16: mod_base = OTHER; note = 2'-deoxy-2'-fluoroguanosine-3'-phosphate
  modified_base 17: mod_base = OTHER; note = 2'-O-methyladenosine-3'-phosphate
  modified_base 18: mod_base = OTHER; note = 2'-O-methylguanosine-3'-phosphate
  modified_base 19: mod_base = OTHER; note = 2'-O-methylguanosine-3'-phosphate
  modified_base 20: mod_base = OTHER; note = 2'-O-methyluridine-3'-phosphate
  modified_base 21: mod_base = OTHER; note = 2'-O-methylguanosine-3'-phosphorothioate
  modified_base 22: mod_base = OTHER; note = 2'-O-methylguanosine-3'-phosphorothioate
  modified_base 23: mod_base = OTHER; note = 2'-O-methylcytidine
acttcttcaattgaggaggtggc

SEQ ID NO: 2686 - RNA, 21 nt, synthetic construct
  source 1..21: mol_type = other RNA
  modified_base 1: mod_base = OTHER; note = 2'-O-methyluridine-3'-phosphorothioate
  modified_base 2: mod_base = OTHER; note = 2'-O-methylguanosine-3'-phosphorothioate
  modified_base 3: mod_base = OTHER; note = 2'-O-methylguanosine-3'-phosphate
  modified_base 4: mod_base = OTHER; note = 2'-O-methylguanosine-3'-phosphate
  modified_base 5: mod_base = OTHER; note = 2'-O-methylcytidine-3'-phosphate
  modified_base 6: mod_base = OTHER; note = 2'-O-methylcytidine-3'-phosphate
  modified_base 7: mod_base = OTHER; note = 2'-deoxy-2'-fluoroadenosine-3'-phosphate
  modified_base 8: mod_base = OTHER; note = 2'-O-methylcytidine-3'-phosphate
  modified_base 9: mod_base = OTHER; note = 2'-deoxy-2'-fluorocytidine-3'-phosphate
  modified_base 10: mod_base = OTHER; note = 2'-deoxy-2'-fluorouridine-3'-phosphate
  modified_base 11: mod_base = OTHER; note = 2'-deoxy-2'-fluorocytidine-3'-phosphate
  modified_base 12: mod_base = OTHER; note = 2'-O-methylcytidine-3'-phosphate
  modified_base 13: mod_base = OTHER; note = 2'-O-methyluridine-3'-phosphate
  modified_base 14: mod_base = OTHER; note = 2'-O-methylcytidine-3'-phosphate
  modified_base 15: mod_base = OTHER; note = 2'-O-methyladenosine-3'-phosphate
  modified_base 16: mod_base = OTHER; note = 2'-O-methyladenosine-3'-phosphate
  modified_base 17: mod_base = OTHER; note = 2'-O-methyluridine-3'-phosphate
  modified_base 18: mod_base = OTHER; note = 2'-O-methyluridine-3'-phosphate
  modified_base 19: mod_base = OTHER; note = 2'-O-methylguanosine-3'-phosphate
  modified_base 20: mod_base = OTHER; note = 2'-O-methyladenosine-3'-phosphate
  modified_base 21: mod_base = OTHER; note = 2'-O-methyladenosine-3'-phosphate ((2S,4R)-1-[29-[[2-(acetylamino)-2-deoxy-beta-D-galactopyra nosyl]oxy]-14,14-bis[[3-[[3-[[5-[[2-(acetylamino)-2-deoxy-b eta-D-galactopyranosyl]oxy]-1-oxopentyl]amino]propyl]amino] -3-oxopropoxy]methyl]-1,12,19,25-tetraoxo-16-oxa-13,20,24-t riazanonacos-1-yl]-4-hydroxy-2-pyrrolidinyl)methyl ester
tgggccacctcctcaattgaa

SEQ ID NO: 2687 - RNA, 23 nt, synthetic construct
  source 1..23: mol_type = other RNA
  modified_base 1: mod_base = OTHER; note = 2'-O-methyluridine-3'-phosphorothioate
  modified_base 2: mod_base = OTHER; note = 2'-deoxy-2'-fluorouridine-3'-phosphorothioate
  modified_base 3: mod_base = OTHER; note = 2'-O-methylcytidine-3'-phosphate
  modified_base 4: mod_base = OTHER; note = 2'-O-methyladenosine-3'-phosphate
  modified_base 5: mod_base = OTHER; note = 2'-O-methyladenosine-3'-phosphate
  modified_base 6: mod_base = OTHER; note = 2'-deoxy-2'-fluorouridine-3'-phosphate
  modified_base 7: mod_base = OTHER; note = 2'-O-methyluridine-3'-phosphate
  modified_base 8: mod_base = OTHER; note = 2'-deoxy-2'-fluoroguanosine-3'-phosphate
  modified_base 9: mod_base = OTHER; note = 2'-deoxy-2'-fluoroadenosine-3'-phosphate
  modified_base 10: mod_base = OTHER; note = 2'-O-methylguanosine-3'-phosphate
  modified_base 11: mod_base = OTHER; note = 2'-O-methylguanosine-3'-phosphate
  modified_base 12: mod_base = OTHER; note = 2'-O-methyladenosine-3'-phosphate
  modified_base 13: mod_base = OTHER; note = 2'-O-methylguanosine-3'-phosphate
  modified_base 14: mod_base = OTHER; note = 2'-deoxy-2'-fluoroguanosine-3'-phosphate
  modified_base 15: mod_base = OTHER; note = 2'-O-methyluridine-3'-phosphate
  modified_base 16: mod_base = OTHER; note = 2'-deoxy-2'-fluoroguanosine-3'-phosphate
  modified_base 17: mod_base = OTHER; note = 2'-O-methylguanosine-3'-phosphate
  modified_base 18: mod_base = OTHER; note = 2'-O-methylcytidine-3'-phosphate
  modified_base 19: mod_base = OTHER; note = 2'-O-methylcytidine-3'-phosphate
  modified_base 20: mod_base = OTHER; note = 2'-O-methylcytidine-3'-phosphate
  modified_base 21: mod_base = OTHER; note = 2'-O-methyladenosine-3'-phosphorothioate
  modified_base 22: mod_base = OTHER; note = 2'-O-methylguanosine-3'-phosphorothioate
  modified_base 23: mod_base = OTHER; note = 2'-O-methylguanosine
ttcaattgaggaggtggcccagg

SEQ ID NO: 2688 - RNA, 21 nt, synthetic construct
  source 1..21: mol_type = other RNA
  modified_base 1: mod_base = OTHER; note = 2'-O-methylcytidine-3'-phosphorothioate
  modified_base 2: mod_base = OTHER; note = 2'-O-methyluridine-3'-phosphorothioate
  modified_base 3: mod_base = OTHER; note = 2'-O-methylguanosine-3'-phosphate
  modified_base 4: mod_base = OTHER; note = 2'-O-methylguanosine-3'-phosphate
  modified_base 5: mod_base = OTHER; note = 2'-O-methylguanosine-3'-phosphate
  modified_base 6: mod_base = OTHER; note = 2'-O-methylcytidine-3'-phosphate
  modified_base 7: mod_base = OTHER; note = 2'-deoxy-2'-fluorocytidine-3'-phosphate
  modified_base 8: mod_base = OTHER; note = 2'-O-methyladenosine-3'-phosphate
  modified_base 9: mod_base = OTHER; note = 2'-deoxy-2'-fluorocytidine-3'-phosphate
  modified_base 10: mod_base = OTHER; note = 2'-deoxy-2'-fluorocytidine-3'-phosphate
  modified_base 11: mod_base = OTHER; note = 2'-deoxy-2'-fluorouridine-3'-phosphate
  modified_base 12: mod_base = OTHER; note = 2'-O-methylcytidine-3'-phosphate
  modified_base 13: mod_base = OTHER; note = 2'-O-methylcytidine-3'-phosphate
  modified_base 14: mod_base = OTHER; note = 2'-O-methyluridine-3'-phosphate
  modified_base 15: mod_base = OTHER; note = 2'-O-methylcytidine-3'-phosphate
  modified_base 16: mod_base = OTHER; note = 2'-O-methyladenosine-3'-phosphate
  modified_base 17: mod_base = OTHER; note = 2'-O-methyladenosine-3'-phosphate
  modified_base 18: mod_base = OTHER; note = 2'-O-methyluridine-3'-phosphate
  modified_base 19: mod_base = OTHER; note = 2'-O-methyluridine-3'-phosphate
  modified_base 20: mod_base = OTHER; note = 2'-O-methylguanosine-3'-phosphate
  modified_base 21: mod_base = OTHER; note = 2'-O-methyladenosine-3'-phosphate ((2S,4R)-1-[29-[[2-(acetylamino)-2-deoxy-beta-D-galactopyra nosyl]oxy]-14,14-bis[[3-[[3-[[5-[[2-(acetylamino)-2-deoxy-b eta-D-galactopyranosyl]oxy]-1-oxopentyl]amino]propyl]amino] -3-oxopropoxy]methyl]-1,12,19,25-tetraoxo-16-oxa-13,20,24-t riazanonacos-1-yl]-4-hydroxy-2-pyrrolidinyl)methyl ester
ctgggccacctcctcaattga

SEQ ID NO: 2689 - RNA, 23 nt, synthetic construct
  source 1..23: mol_type = other RNA
  modified_base 1: mod_base = OTHER; note = 2'-O-methyluridine-3'-phosphorothioate
  modified_base 2: mod_base = OTHER; note = 2'-deoxy-2'-fluorocytidine-3'-phosphorothioate
  modified_base 3: mod_base = OTHER; note = 2'-O-methyladenosine-3'-phosphate
  modified_base 4: mod_base = OTHER; note = 2'-O-methyladenosine-3'-phosphate
  modified_base 5: mod_base = OTHER; note = 2'-O-methyluridine-3'-phosphate
  modified_base 6: mod_base = OTHER; note = 2'-deoxy-2'-fluorouridine-3'-phosphate
  modified_base 7: mod_base = OTHER; note = 2'-O-methylguanosine-3'-phosphate
  modified_base 8: mod_base = OTHER; note = 2'-deoxy-2'-fluoroadenosine-3'-phosphate
  modified_base 9: mod_base = OTHER; note = 2'-deoxy-2'-fluoroguanosine-3'-phosphate
  modified_base 10: mod_base = OTHER; note = 2'-O-methylguanosine-3'-phosphate
  modified_base 11: mod_base = OTHER; note = 2'-O-methyladenosine-3'-phosphate
  modified_base 12: mod_base = OTHER; note = 2'-O-methylguanosine-3'-phosphate
  modified_base 13: mod_base = OTHER; note = 2'-O-methylguanosine-3'-phosphate
  modified_base 14: mod_base = OTHER; note = 2'-deoxy-2'-fluorouridine-3'-phosphate
  modified_base 15: mod_base = OTHER; note = 2'-O-methylguanosine-3'-phosphate
  modified_base 16: mod_base = OTHER; note = 2'-deoxy-2'-fluoroguanosine-3'-phosphate
  modified_base 17: mod_base = OTHER; note = 2'-O-methylcytidine-3'-phosphate
  modified_base 18: mod_base = OTHER; note = 2'-O-methylcytidine-3'-phosphate
  modified_base 19: mod_base = OTHER; note = 2'-O-methylcytidine-3'-phosphate
  modified_base 20: mod_base = OTHER; note = 2'-O-methyladenosine-3'-phosphate
  modified_base 21: mod_base = OTHER; note = 2'-O-methylguanosine-3'-phosphorothioate
  modified_base 22: mod_base = OTHER; note = 2'-O-methylguanosine-3'-phosphorothioate
  modified_base 23: mod_base = OTHER; note = 2'-O-methyladenosine
tcaattgaggaggtggcccagga

SEQ ID NO: 2690 - RNA, 21 nt, synthetic construct
  source 1..21: mol_type = other RNA
  modified_base 1: mod_base = OTHER; note = 2'-O-methylguanosine-3'-phosphorothioate
  modified_base 2: mod_base = OTHER; note = 2'-O-methyladenosine-3'-phosphorothioate
  modified_base 3: mod_base = OTHER; note = 2'-O-methylguanosine-3'-phosphate
  modified_base 4: mod_base = OTHER; note = 2'-O-methyluridine-3'-phosphate
  modified_base 5: mod_base = OTHER; note = 2'-O-methylguanosine-3'-phosphate
  modified_base 6: mod_base = OTHER; note = 2'-O-methylguanosine-3'-phosphate
  modified_base 7: mod_base = OTHER; note = 2'-deoxy-2'-fluoroguanosine-3'-phosphate
  modified_base 8: mod_base = OTHER; note = 2'-O-methyluridine-3'-phosphate
  modified_base 9: mod_base = OTHER; note = 2'-deoxy-2'-fluoroguanosine-3'-phosphate
  modified_base 10: mod_base = OTHER; note = 2'-deoxy-2'-fluorocytidine-3'-phosphate
  modified_base 11: mod_base = OTHER; note = 2'-deoxy-2'-fluorocytidine-3'-phosphate
  modified_base 12: mod_base = OTHER; note = 2'-O-methyladenosine-3'-phosphate
  modified_base 13: mod_base = OTHER; note = 2'-O-methylguanosine-3'-phosphate
  modified_base 14: mod_base = OTHER; note = 2'-O-methyladenosine-3'-phosphate
  modified_base 15: mod_base = OTHER; note = 2'-O-methyladenosine-3'-phosphate
  modified_base 16: mod_base = OTHER; note = 2'-O-methyluridine-3'-phosphate
  modified_base 17: mod_base = OTHER; note = 2'-O-methylguanosine-3'-phosphate
  modified_base 18: mod_base = OTHER; note = 2'-O-methyluridine-3'-phosphate
  modified_base 19: mod_base = OTHER; note = 2'-O-methylguanosine-3'-phosphate
  modified_base 20: mod_base = OTHER; note = 2'-O-methyladenosine-3'-phosphate
  modified_base 21: mod_base = OTHER; note = 2'-O-methyladenosine-3'-phosphate ((2S,4R)-1-[29-[[2-(acetylamino)-2-deoxy-beta-D-galactopyra nosyl]oxy]-14,14-bis[[3-[[3-[[5-[[2-(acetylamino)-2-deoxy-b eta-D-galactopyranosyl]oxy]-1-oxopentyl]amino]propyl]amino] -3-oxopropoxy]methyl]-1,12,19,25-tetraoxo-16-oxa-13,20,24-t riazanonacos-1-yl]-4-hydroxy-2-pyrrolidinyl)methyl ester
gagtgggtgccagaatgtgaa

SEQ ID NO: 2691 - RNA, 23 nt, synthetic construct
  source 1..23: mol_type = other RNA
  modified_base 1: mod_base = OTHER; note = 2'-O-methyluridine-3'-phosphorothioate
  modified_base 2: mod_base = OTHER; note = 2'-deoxy-2'-fluorouridine-3'-phosphorothioate
  modified_base 3: mod_base = OTHER; note = 2'-O-methylcytidine-3'-phosphate
  modified_base 4: mod_base = OTHER; note = 2'-O-methyladenosine-3'-phosphate
  modified_base 5: mod_base = OTHER; note = 2'-O-methylcytidine-3'-phosphate
  modified_base 6: mod_base = OTHER; note = 2'-deoxy-2'-fluoroadenosine-3'-phosphate
  modified_base 7: mod_base = OTHER; note = 2'-O-methyluridine-3'-phosphate
  modified_base 8: mod_base = OTHER; note = 2'-deoxy-2'-fluorouridine-3'-phosphate
  modified_base 9: mod_base = OTHER; note = 2'-deoxy-2'-fluorocytidine-3'-phosphate
  modified_base 10: mod_base = OTHER; note = 2'-O-methyluridine-3'-phosphate
  modified_base 11: mod_base = OTHER; note = 2'-O-methylguanosine-3'-phosphate
  modified_base 12: mod_base = OTHER; note = 2'-O-methylguanosine-3'-phosphate
  modified_base 13: mod_base = OTHER; note = 2'-O-methylcytidine-3'-phosphate
  modified_base 14: mod_base = OTHER; note = 2'-deoxy-2'-fluoroadenosine-3'-phosphate
  modified_base 15: mod_base = OTHER; note = 2'-O-methylcytidine-3'-phosphate
  modified_base 16: mod_base = OTHER; note = 2'-deoxy-2'-fluorocytidine-3'-phosphate
  modified_base 17: mod_base = OTHER; note = 2'-O-methylcytidine-3'-phosphate
  modified_base 18: mod_base = OTHER; note = 2'-O-methyladenosine-3'-phosphate
  modified_base 19: mod_base = OTHER; note = 2'-O-methylcytidine-3'-phosphate
  modified_base 20: mod_base = OTHER; note = 2'-O-methyluridine-3'-phosphate
  modified_base 21: mod_base = OTHER; note = 2'-O-methylcytidine-3'-phosphorothioate
  modified_base 22: mod_base = OTHER; note = 2'-O-methyladenosine-3'-phosphorothioate
  modified_base 23: mod_base = OTHER; note = 2'-O-methylguanosine
ttcacattctggcacccactcag

SEQ ID NO: 2692 - RNA, 21 nt, synthetic construct
  source 1..21: mol_type = other RNA
  modified_base 1: mod_base = OTHER; note = 2'-O-methyladenosine-3'-phosphorothioate
  modified_base 2: mod_base = OTHER; note = 2'-O-methylguanosine-3'-phosphorothioate
  modified_base 3: mod_base = OTHER; note = 2'-O-methyluridine-3'-phosphate
  modified_base 4: mod_base = OTHER; note = 2'-O-methylguanosine-3'-phosphate
  modified_base 5: mod_base = OTHER; note = 2'-O-methylguanosine-3'-phosphate
  modified_base 6: mod_base = OTHER; note = 2'-O-methylguanosine-3'-phosphate
  modified_base 7: mod_base = OTHER; note = 2'-deoxy-2'-fluorouridine-3'-phosphate
  modified_base 8: mod_base = OTHER; note = 2'-O-methylguanosine-3'-phosphate
  modified_base 9: mod_base = OTHER; note = 2'-deoxy-2'-fluorocytidine-3'-phosphate
  modified_base 10: mod_base = OTHER; note = 2'-deoxy-2'-fluorocytidine-3'-phosphate
  modified_base 11: mod_base = OTHER; note = 2'-deoxy-2'-fluoroadenosine-3'-phosphate
  modified_base 12: mod_base = OTHER; note = 2'-O-methylguanosine-3'-phosphate
  modified_base 13: mod_base = OTHER; note = 2'-O-methyladenosine-3'-phosphate
  modified_base 14: mod_base = OTHER; note = 2'-O-methyladenosine-3'-phosphate
  modified_base 15: mod_base = OTHER; note = 2'-O-methyluridine-3'-phosphate
  modified_base 16: mod_base = OTHER; note = 2'-O-methylguanosine-3'-phosphate
  modified_base 17: mod_base = OTHER; note = 2'-O-methyluridine-3'-phosphate
  modified_base 18: mod_base = OTHER; note = 2'-O-methylguanosine-3'-phosphate
  modified_base 19: mod_base = OTHER; note = 2'-O-methyladenosine-3'-phosphate
  modified_base 20: mod_base = OTHER; note = 2'-O-methyladenosine-3'-phosphate
  modified_base 21: mod_base = OTHER; note = 2'-O-methyladenosine-3'-phosphate ((2S,4R)-1-[29-[[2-(acetylamino)-2-deoxy-beta-D-galactopyra nosyl]oxy]-14,14-bis[[3-[[3-[[5-[[2-(acetylamino)-2-deoxy-b eta-D-galactopyranosyl]oxy]-1-oxopentyl]amino]propyl]amino] -3-oxopropoxy]methyl]-1,12,19,25-tetraoxo-16-oxa-13,20,24-t riazanonacos-1-yl]-4-hydroxy-2-pyrrolidinyl)methyl ester
agtgggtgccagaatgtgaaa

SEQ ID NO: 2693 - RNA, 23 nt, synthetic construct
  source 1..23: mol_type = other RNA
  modified_base 1: mod_base = OTHER; note = 2'-O-methyluridine-3'-phosphorothioate
  modified_base 2: mod_base = OTHER; note = 2'-deoxy-2'-fluorouridine-3'-phosphorothioate
  modified_base 3: mod_base = OTHER; note = 2'-O-methyluridine-3'-phosphate
  modified_base 4: mod_base = OTHER; note = 2'-O-methylcytidine-3'-phosphate
  modified_base 5: mod_base = OTHER; note = 2'-O-methyladenosine-3'-phosphate
  modified_base 6: mod_base = OTHER; note = 2'-deoxy-2'-fluorocytidine-3'-phosphate
  modified_base 7: mod_base = OTHER; note = 2'-O-methyladenosine-3'-phosphate
  modified_base 8: mod_base = OTHER; note = 2'-deoxy-2'-fluorouridine-3'-phosphate
  modified_base 9: mod_base = OTHER; note = 2'-deoxy-2'-fluorouridine-3'-phosphate
  modified_base 10: mod_base = OTHER; note = 2'-O-methylcytidine-3'-phosphate
  modified_base 11: mod_base = OTHER; note = 2'-O-methyluridine-3'-phosphate
  modified_base 12: mod_base = OTHER; note = 2'-O-methylguanosine-3'-phosphate
  modified_base 13: mod_base = OTHER; note = 2'-O-methylguanosine-3'-phosphate
  modified_base 14: mod_base = OTHER; note = 2'-deoxy-2'-fluorocytidine-3'-phosphate
  modified_base 15: mod_base = OTHER; note = 2'-O-methyladenosine-3'-phosphate
  modified_base 16: mod_base = OTHER; note = 2'-deoxy-2'-fluorocytidine-3'-phosphate
  modified_base 17: mod_base = OTHER; note = 2'-O-methylcytidine-3'-phosphate
  modified_base 18: mod_base = OTHER; note = 2'-O-methylcytidine-3'-phosphate
  modified_base 19: mod_base = OTHER; note = 2'-O-methyladenosine-3'-phosphate
  modified_base 20: mod_base = OTHER; note = 2'-O-methylcytidine-3'-phosphate
  modified_base 21: mod_base = OTHER; note = 2'-O-methyluridine-3'-phosphorothioate
  modified_base 22: mod_base = OTHER; note = 2'-O-methylcytidine-3'-phosphorothioate
  modified_base 23: mod_base = OTHER; note = 2'-O-methyladenosine
tttcacattctggcacccactca

SEQ ID NO: 2694 - RNA, 21 nt, synthetic construct
  source 1..21: mol_type = other RNA
  modified_base 1: mod_base = OTHER; note = 2'-O-methylcytidine-3'-phosphorothioate
  modified_base 2: mod_base = OTHER; note = 2'-O-methyluridine-3'-phosphorothioate
  modified_base 3: mod_base = OTHER; note = 2'-O-methylcytidine-3'-phosphate
  modified_base 4: mod_base = OTHER; note = 2'-O-methyluridine-3'-phosphate
  modified_base 5: mod_base = OTHER; note = 2'-O-methylguanosine-3'-phosphate
  modified_base 6: mod_base = OTHER; note = 2'-O-methyladenosine-3'-phosphate
  modified_base 7: mod_base = OTHER; note = 2'-deoxy-2'-fluoroguanosine-3'-phosphate
  modified_base 8: mod_base = OTHER; note = 2'-O-methyluridine-3'-phosphate
  modified_base 9: mod_base = OTHER; note = 2'-deoxy-2'-fluoroguanosine-3'-phosphate
  modified_base 10: mod_base = OTHER; note = 2'-deoxy-2'-fluoroguanosine-3'-phosphate
  modified_base 11: mod_base = OTHER; note = 2'-deoxy-2'-fluoroguanosine-3'-phosphate
  modified_base 12: mod_base = OTHER; note = 2'-O-methyluridine-3'-phosphate
  modified_base 13: mod_base = OTHER; note = 2'-O-methylguanosine-3'-phosphate
  modified_base 14: mod_base = OTHER; note = 2'-O-methylcytidine-3'-phosphate
  modified_base 15: mod_base = OTHER; note = 2'-O-methylcytidine-3'-phosphate
  modified_base 16: mod_base = OTHER; note = 2'-O-methyladenosine-3'-phosphate
  modified_base 17: mod_base = OTHER; note = 2'-O-methylguanosine-3'-phosphate
  modified_base 18: mod_base = OTHER; note = 2'-O-methyladenosine-3'-phosphate
  modified_base 19: mod_base = OTHER; note = 2'-O-methyladenosine-3'-phosphate
  modified_base 20: mod_base = OTHER; note = 2'-O-methyluridine-3'-phosphate
  modified_base 21: mod_base = OTHER; note = 2'-O-methylguanosine-3'-phosphate ((2S,4R)-1-[29-[[2-(acetylamino)-2-deoxy-beta-D-galactopyra nosyl]oxy]-14,14-bis[[3-[[3-[[5-[[2-(acetylamino)-2-deoxy-b eta-D-galactopyranosyl]oxy]-1-oxopentyl]amino]propyl]amino] -3-oxopropoxy]methyl]-1,12,19,25-tetraoxo-16-oxa-13,20,24-t riazanonacos-1-yl]-4-hydroxy-2-pyrrolidinyl)methyl ester
ctctgagtgggtgccagaatg

SEQ ID NO: 2695 - RNA, 23 nt, synthetic construct
  source 1..23: mol_type = other RNA
  modified_base 1: mod_base = OTHER; note = 2'-O-methylcytidine-3'-phosphorothioate
  modified_base 2: mod_base = OTHER; note = 2'-deoxy-2'-fluoroadenosine-3'-phosphorothioate
  modified_base 3: mod_base = OTHER; note = 2'-O-methyluridine-3'-phosphate
  modified_base 4: mod_base = OTHER; note = 2'-O-methyluridine-3'-phosphate
  modified_base 5: mod_base = OTHER; note = 2'-O-methylcytidine-3'-phosphate
  modified_base 6: mod_base = OTHER; note = 2'-deoxy-2'-fluorouridine-3'-phosphate
  modified_base 7: mod_base = OTHER; note = 2'-O-methylguanosine-3'-phosphate
  modified_base 8: mod_base = OTHER; note = 2'-deoxy-2'-fluoroguanosine-3'-phosphate
  modified_base 9: mod_base = OTHER; note = 2'-deoxy-2'-fluorocytidine-3'-phosphate
  modified_base 10: mod_base = OTHER; note = 2'-O-methyladenosine-3'-phosphate
  modified_base 11: mod_base = OTHER; note = 2'-O-methylcytidine-3'-phosphate
  modified_base 12: mod_base = OTHER; note = 2'-O-methylcytidine-3'-phosphate
  modified_base 13: mod_base = OTHER; note = 2'-O-methylcytidine-3'-phosphate
  modified_base 14: mod_base = OTHER; note = 2'-deoxy-2'-fluoroadenosine-3'-phosphate
  modified_base 15: mod_base = OTHER; note = 2'-O-methylcytidine-3'-phosphate
  modified_base 16: mod_base = OTHER; note = 2'-deoxy-2'-fluorouridine-3'-phosphate
  modified_base 17: mod_base = OTHER; note = 2'-O-methylcytidine-3'-phosphate
  modified_base 18: mod_base = OTHER; note = 2'-O-methyladenosine-3'-phosphate
  modified_base 19: mod_base = OTHER; note = 2'-O-methylguanosine-3'-phosphate
  modified_base 20: mod_base = OTHER; note = 2'-O-methyladenosine-3'-phosphate
  modified_base 21: mod_base = OTHER; note = 2'-O-methylguanosine-3'-phosphorothioate
  modified_base 22: mod_base = OTHER; note = 2'-O-methylcytidine-3'-phosphorothioate
  modified_base 23: mod_base = OTHER; note = 2'-O-methylcytidine
cattctggcacccactcagagcc

SEQ ID NO: 2696 - RNA, 21 nt, synthetic construct
  source 1..21: mol_type = other RNA
  modified_base 1: mod_base = OTHER; note = 2'-O-methylguanosine-3'-phosphorothioate
  modified_base 2: mod_base = OTHER; note = 2'-O-methylcytidine-3'-phosphorothioate
  modified_base 3: mod_base = OTHER; note = 2'-O-methyluridine-3'-phosphate
  modified_base 4: mod_base = OTHER; note = 2'-O-methylcytidine-3'-phosphate
  modified_base 5: mod_base = OTHER; note = 2'-O-methyluridine-3'-phosphate
  modified_base 6: mod_base = OTHER; note = 2'-O-methylguanosine-3'-phosphate
  modified_base 7: mod_base = OTHER; note = 2'-deoxy-2'-fluoroadenosine-3'-phosphate
  modified_base 8: mod_base = OTHER; note = 2'-O-methylguanosine-3'-phosphate
  modified_base 9: mod_base = OTHER; note = 2'-deoxy-2'-fluorouridine-3'-phosphate
  modified_base 10: mod_base = OTHER; note = 2'-deoxy-2'-fluoroguanosine-3'-phosphate
  modified_base 11: mod_base = OTHER; note = 2'-deoxy-2'-fluoroguanosine-3'-phosphate
  modified_base 12: mod_base = OTHER; note = 2'-O-methylguanosine-3'-phosphate
  modified_base 13: mod_base = OTHER; note = 2'-O-methyluridine-3'-phosphate
  modified_base 14: mod_base = OTHER; note = 2'-O-methylguanosine-3'-phosphate
  modified_base 15: mod_base = OTHER; note = 2'-O-methylcytidine-3'-phosphate
  modified_base 16: mod_base = OTHER; note = 2'-O-methylcytidine-3'-phosphate
  modified_base 17: mod_base = OTHER; note = 2'-O-methyladenosine-3'-phosphate
  modified_base 18: mod_base = OTHER; note = 2'-O-methylguanosine-3'-phosphate
  modified_base 19: mod_base = OTHER; note = 2'-O-methyladenosine-3'-phosphate
  modified_base 20: mod_base = OTHER; note = 2'-O-methyladenosine-3'-phosphate
  modified_base 21: mod_base = OTHER; note = 2'-O-methyluridine-3'-phosphate ((2S,4R)-1-[29-[[2-(acetylamino)-2-deoxy-beta-D-galactopyra nosyl]oxy]-14,14-bis[[3-[[3-[[5-[[2-(acetylamino)-2-deoxy-b eta-D-galactopyranosyl]oxy]-1-oxopentyl]amino]propyl]amino] -3-oxopropoxy]methyl]-1,12,19,25-tetraoxo-16-oxa-13,20,24-t riazanonacos-1-yl]-4-hydroxy-2-pyrrolidinyl)methyl ester
gctctgagtgggtgccagaat

SEQ ID NO: 2697 - RNA, 23 nt, synthetic construct
  source 1..23: mol_type = other RNA
  modified_base 1: mod_base = OTHER; note = 2'-O-methyladenosine-3'-phosphorothioate
  modified_base 2: mod_base = OTHER; note = 2'-deoxy-2'-fluorouridine-3'-phosphorothioate
  modified_base 3: mod_base = OTHER; note = 2'-O-methyluridine-3'-phosphate
  modified_base 4: mod_base = OTHER; note = 2'-O-methylcytidine-3'-phosphate
  modified_base 5: mod_base = OTHER; note = 2'-O-methyluridine-3'-phosphate
  modified_base 6: mod_base = OTHER; note = 2'-deoxy-2'-fluoroguanosine-3'-phosphate
  modified_base 7: mod_base = OTHER; note = 2'-O-methylguanosine-3'-phosphate
  modified_base 8: mod_base = OTHER; note = 2'-deoxy-2'-fluorocytidine-3'-phosphate
  modified_base 9: mod_base = OTHER; note = 2'-deoxy-2'-fluoroadenosine-3'-phosphate
  modified_base 10: mod_base = OTHER; note = 2'-O-methylcytidine-3'-phosphate
  modified_base 11: mod_base = OTHER; note = 2'-O-methylcytidine-3'-phosphate
  modified_base 12: mod_base = OTHER; note = 2'-O-methylcytidine-3'-phosphate
  modified_base 13: mod_base = OTHER; note = 2'-O-methyladenosine-3'-phosphate
  modified_base 14: mod_base = OTHER; note = 2'-deoxy-2'-fluorocytidine-3'-phosphate
  modified_base 15: mod_base = OTHER; note = 2'-O-methyluridine-3'-phosphate
  modified_base 16: mod_base = OTHER; note = 2'-deoxy-2'-fluorocytidine-3'-phosphate
  modified_base 17: mod_base = OTHER; note = 2'-O-methyladenosine-3'-phosphate
  modified_base 18: mod_base = OTHER; note = 2'-O-methylguanosine-3'-phosphate
  modified_base 19: mod_base = OTHER; note = 2'-O-methyladenosine-3'-phosphate
  modified_base 20: mod_base = OTHER; note = 2'-O-methylguanosine-3'-phosphate
  modified_base 21: mod_base = OTHER; note = 2'-O-methylcytidine-3'-phosphorothioate
  modified_base 22: mod_base = OTHER; note = 2'-O-methylcytidine-3'-phosphorothioate
  modified_base 23: mod_base = OTHER; note = 2'-O-methyladenosine
attctggcacccactcagagcca

SEQ ID NO: 2698 - RNA, 21 nt, synthetic construct
  source 1..21: mol_type = other RNA
  modified_base 1: mod_base = OTHER; note = 2'-O-methylguanosine-3'-phosphorothioate
  modified_base 2: mod_base = OTHER; note = 2'-O-methylcytidine-3'-phosphorothioate
  modified_base 3: mod_base = OTHER; note = 2'-O-methyladenosine-3'-phosphate
  modified_base 4: mod_base = OTHER; note = 2'-O-methylcytidine-3'-phosphate
  modified_base 5: mod_base = OTHER; note = 2'-O-methyluridine-3'-phosphate
  modified_base 6: mod_base = OTHER; note = 2'-O-methylguanosine-3'-phosphate
  modified_base 7: mod_base = OTHER; note = 2'-deoxy-2'-fluoroadenosine-3'-phosphate
  modified_base 8: mod_base = OTHER; note = 2'-O-methyluridine-3'-phosphate
  modified_base 9: mod_base = OTHER; note = 2'-deoxy-2'-fluoroguanosine-3'-phosphate
  modified_base 10: mod_base = OTHER; note = 2'-deoxy-2'-fluorouridine-3'-phosphate
  modified_base 11: mod_base = OTHER; note = 2'-deoxy-2'-fluorouridine-3'-phosphate
  modified_base 12: mod_base = OTHER; note = 2'-O-methylcytidine-3'-phosphate
  modified_base 13: mod_base = OTHER; note = 2'-O-methyluridine-3'-phosphate
  modified_base 14: mod_base = OTHER; note = 2'-O-methylguanosine-3'-phosphate
  modified_base 15: mod_base = OTHER; note = 2'-O-methyladenosine-3'-phosphate
  modified_base 16: mod_base = OTHER; note = 2'-O-methyladenosine-3'-phosphate
  modified_base 17: mod_base = OTHER; note = 2'-O-methyladenosine-3'-phosphate
  modified_base 18: mod_base = OTHER; note = 2'-O-methylguanosine-3'-phosphate
  modified_base 19: mod_base = OTHER; note = 2'-O-methylcytidine-3'-phosphate
  modified_base 20: mod_base = OTHER; note = 2'-O-methyluridine-3'-phosphate
  modified_base 21: mod_base = OTHER; note = 2'-O-methylcytidine-3'-phosphate ((2S,4R)-1-[29-[[2-(acetylamino)-2-deoxy-beta-D-galactopyra nosyl]oxy]-14,14-bis[[3-[[3-[[5-[[2-(acetylamino)-2-deoxy-b eta-D-galactopyranosyl]oxy]-1-oxopentyl]amino]propyl]amino] -3-oxopropoxy]methyl]-1,12,19,25-tetraoxo-16-oxa-13,20,24-t riazanonacos-1-yl]-4-hydroxy-2-pyrrolidinyl)methyl ester
gcactgatgttctgaaagctc

SEQ ID NO: 2699 - RNA, 23 nt, synthetic construct
  source 1..23: mol_type = other RNA
  modified_base 1: mod_base = OTHER; note = 2'-O-methylguanosine-3'-phosphorothioate
  modified_base 2: mod_base = OTHER; note = 2'-deoxy-2'-fluoroadenosine-3'-phosphorothioate
  modified_base 3: mod_base = OTHER; note = 2'-O-methylguanosine-3'-phosphate
  modified_base 4: mod_base = OTHER; note = 2'-O-methylcytidine-3'-phosphate
  modified_base 5: mod_base = OTHER; note = 2'-O-methyluridine-3'-phosphate
  modified_base 6: mod_base = OTHER; note = 2'-deoxy-2'-fluorouridine-3'-phosphate
  modified_base 7: mod_base = OTHER; note = 2'-O-methyluridine-3'-phosphate
  modified_base 8: mod_base = OTHER; note = 2'-deoxy-2'-fluorocytidine-3'-phosphate
  modified_base 9: mod_base = OTHER; note = 2'-deoxy-2'-fluoroadenosine-3'-phosphate
  modified_base 10: mod_base = OTHER; note = 2'-O-methylguanosine-3'-phosphate
  modified_base 11: mod_base = OTHER; note = 2'-O-methyladenosine-3'-phosphate
  modified_base 12: mod_base = OTHER; note = 2'-O-methyladenosine-3'-phosphate
  modified_base 13: mod_base = OTHER; note = 2'-O-methylcytidine-3'-phosphate
  modified_base 14: mod_base = OTHER; note = 2'-deoxy-2'-fluoroadenosine-3'-phosphate
  modified_base 15: mod_base = OTHER; note = 2'-O-methyluridine-3'-phosphate
  modified_base 16: mod_base = OTHER; note = 2'-deoxy-2'-fluorocytidine-3'-phosphate
  modified_base 17: mod_base = OTHER; note = 2'-O-methyladenosine-3'-phosphate
  modified_base 18: mod_base = OTHER; note = 2'-O-methylguanosine-3'-phosphate
  modified_base 19: mod_base = OTHER; note = 2'-O-methyluridine-3'-phosphate
  modified_base 20: mod_base = OTHER; note = 2'-O-methylguanosine-3'-phosphate
  modified_base 21: mod_base = OTHER; note = 2'-O-methylcytidine-3'-phosphorothioate
  modified_base 22: mod_base = OTHER; note = 2'-O-methylcytidine-3'-phosphorothioate
  modified_base 23: mod_base = OTHER; note = 2'-O-methyluridine
gagctttcagaacatcagtgcct

SEQ ID NO: 2700 - RNA, 21 nt, synthetic construct
  source 1..21: mol_type = other RNA
  modified_base 1: mod_base = OTHER; note = 2'-O-methylcytidine-3'-phosphorothioate
  modified_base 2: mod_base = OTHER; note = 2'-O-methyladenosine-3'-phosphorothioate
  modified_base 3: mod_base = OTHER; note = 2'-O-methylcytidine-3'-phosphate
  modified_base 4: mod_base = OTHER; note = 2'-O-methyluridine-3'-phosphate
  modified_base 5: mod_base = OTHER; note = 2'-O-methylguanosine-3'-phosphate
  modified_base 6: mod_base = OTHER; note = 2'-O-methyladenosine-3'-phosphate
  modified_base 7: mod_base = OTHER; note = 2'-deoxy-2'-fluorouridine-3'-phosphate
  modified_base 8: mod_base = OTHER; note = 2'-O-methylguanosine-3'-phosphate
  modified_base 9: mod_base = OTHER; note = 2'-deoxy-2'-fluorouridine-3'-phosphate
  modified_base 10: mod_base = OTHER; note = 2'-deoxy-2'-fluorouridine-3'-phosphate
  modified_base 11: mod_base = OTHER; note = 2'-deoxy-2'-fluorocytidine-3'-phosphate
  modified_base 12: mod_base = OTHER; note = 2'-O-methyluridine-3'-phosphate
  modified_base 13: mod_base = OTHER; note = 2'-O-methylguanosine-3'-phosphate
  modified_base 14: mod_base = OTHER; note = 2'-O-methyladenosine-3'-phosphate
  modified_base 15: mod_base = OTHER; note = 2'-O-methyladenosine-3'-phosphate
  modified_base 16: mod_base = OTHER; note = 2'-O-methyladenosine-3'-phosphate
  modified_base 17: mod_base = OTHER; note = 2'-O-methylguanosine-3'-phosphate
  modified_base 18: mod_base = OTHER; note = 2'-O-methylcytidine-3'-phosphate
  modified_base 19: mod_base = OTHER; note = 2'-O-methyluridine-3'-phosphate
  modified_base 20: mod_base = OTHER; note = 2'-O-methylcytidine-3'-phosphate
  modified_base 21: mod_base = OTHER; note = 2'-O-methyluridine-3'-phosphate ((2S,4R)-1-[29-[[2-(acetylamino)-2-deoxy-beta-D-galactopyra nosyl]oxy]-14,14-bis[[3-[[3-[[5-[[2-(acetylamino)-2-deoxy-b eta-D-galactopyranosyl]oxy]-1-oxopentyl]amino]propyl]amino] -3-oxopropoxy]methyl]-1,12,19,25-tetraoxo-16-oxa-13,20,24-t riazanonacos-1-yl]-4-hydroxy-2-pyrrolidinyl)methyl ester
cactgatgttctgaaagctct

SEQ ID NO: 2701 - RNA, 23 nt, synthetic construct
  source 1..23: mol_type = other RNA
  modified_base 1: mod_base = OTHER; note = 2'-O-methyladenosine-3'-phosphorothioate
  modified_base 2: mod_base = OTHER; note = 2'-deoxy-2'-fluoroguanosine-3'-phosphorothioate
  modified_base 3: mod_base = OTHER; note = 2'-O-methyladenosine-3'-phosphate
  modified_base 4: mod_base = OTHER; note = 2'-O-methylguanosine-3'-phosphate
  modified_base 5: mod_base = OTHER; note = 2'-O-methylcytidine-3'-phosphate
  modified_base 6: mod_base = OTHER; note = 2'-deoxy-2'-fluorouridine-3'-phosphate
  modified_base 7: mod_base = OTHER; note = 2'-O-methyluridine-3'-phosphate
  modified_base 8: mod_base = OTHER; note = 2'-deoxy-2'-fluorouridine-3'-phosphate
  modified_base 9: mod_base = OTHER; note = 2'-deoxy-2'-fluorocytidine-3'-phosphate
  modified_base 10: mod_base = OTHER; note = 2'-O-methyladenosine-3'-phosphate
  modified_base 11: mod_base = OTHER; note = 2'-O-methylguanosine-3'-phosphate
  modified_base 12: mod_base = OTHER; note = 2'-O-methyladenosine-3'-phosphate
  modified_base 13: mod_base = OTHER; note = 2'-O-methyladenosine-3'-phosphate
  modified_base 14: mod_base = OTHER; note = 2'-deoxy-2'-fluorocytidine-3'-phosphate
  modified_base 15: mod_base = OTHER; note = 2'-O-methyladenosine-3'-phosphate
  modified_base 16: mod_base = OTHER; note = 2'-deoxy-2'-fluorouridine-3'-phosphate
  modified_base 17: mod_base = OTHER; note = 2'-O-methylcytidine-3'-phosphate
  modified_base 18: mod_base = OTHER; note = 2'-O-methyladenosine-3'-phosphate
  modified_base 19: mod_base = OTHER; note = 2'-O-methylguanosine-3'-phosphate
  modified_base 20: mod_base = OTHER; note = 2'-O-methyluridine-3'-phosphate
  modified_base 21: mod_base = OTHER; note = 2'-O-methylguanosine-3'-phosphorothioate
  modified_base 22: mod_base = OTHER; note = 2'-O-methylcytidine-3'-phosphorothioate
  modified_base 23: mod_base = OTHER; note = 2'-O-methylcytidine
agagctttcagaacatcagtgcc

SEQ ID NO: 2702 - RNA, 21 nt, synthetic construct
  source 1..21: mol_type = other RNA
  modified_base 1: mod_base = OTHER; note = 2'-O-methyladenosine-3'-phosphorothioate
  modified_base 2: mod_base = OTHER; note = 2'-O-methyladenosine-3'-phosphorothioate
  modified_base 3: mod_base = OTHER; note = 2'-O-methyladenosine-3'-phosphate
  modified_base 4: mod_base = OTHER; note = 2'-O-methylguanosine-3'-phosphate
  modified_base 5: mod_base = OTHER; note = 2'-O-methylguanosine-3'-phosphate
  modified_base 6: mod_base = OTHER; note = 2'-O-methylcytidine-3'-phosphate
  modified_base 7: mod_base = OTHER; note = 2'-deoxy-2'-fluoroadenosine-3'-phosphate
  modified_base 8: mod_base = OTHER; note = 2'-O-methylcytidine-3'-phosphate
  modified_base 9: mod_base = OTHER; note = 2'-deoxy-2'-fluorouridine-3'-phosphate
  modified_base 10: mod_base = OTHER; note = 2'-deoxy-2'-fluoroguanosine-3'-phosphate
  modified_base 11: mod_base = OTHER; note = 2'-deoxy-2'-fluoroadenosine-3'-phosphate
  modified_base 12: mod_base = OTHER; note = 2'-O-methyluridine-3'-phosphate
  modified_base 13: mod_base = OTHER; note = 2'-O-methylguanosine-3'-phosphate
  modified_base 14: mod_base = OTHER; note = 2'-O-methyluridine-3'-phosphate
  modified_base 15: mod_base = OTHER; note = 2'-O-methyluridine-3'-phosphate
  modified_base 16: mod_base = OTHER; note = 2'-O-methylcytidine-3'-phosphate
  modified_base 17: mod_base = OTHER; note = 2'-O-methyluridine-3'-phosphate
  modified_base 18: mod_base = OTHER; note = 2'-O-methylguanosine-3'-phosphate
  modified_base 19: mod_base = OTHER; note = 2'-O-methyladenosine-3'-phosphate
  modified_base 20: mod_base = OTHER; note = 2'-O-methyladenosine-3'-phosphate
  modified_base 21: mod_base = OTHER; note = 2'-O-methyladenosine-3'-phosphate ((2S,4R)-1-[29-[[2-(acetylamino)-2-deoxy-beta-D-galactopyra nosyl]oxy]-14,14-bis[[3-[[3-[[5-[[2-(acetylamino)-2-deoxy-b eta-D-galactopyranosyl]oxy]-1-oxopentyl]amino]propyl]amino] -3-oxopropoxy]methyl]-1,12,19,25-tetraoxo-16-oxa-13,20,24-t riazanonacos-1-yl]-4-hydroxy-2-pyrrolidinyl)methyl ester
aaaggcactgatgttctgaaa

SEQ ID NO: 2703 - RNA, 23 nt, synthetic construct
  source 1..23: mol_type = other RNA
  modified_base 1: mod_base = OTHER; note = 2'-O-methyluridine-3'-phosphorothioate
  modified_base 2: mod_base = OTHER; note = 2'-deoxy-2'-fluorouridine-3'-phosphorothioate
  modified_base 3: mod_base = OTHER; note = 2'-O-methyluridine-3'-phosphate
  modified_base 4: mod_base = OTHER; note = 2'-O-methylcytidine-3'-phosphate
  modified_base 5: mod_base = OTHER; note = 2'-O-methyladenosine-3'-phosphate
  modified_base 6: mod_base = OTHER; note = 2'-deoxy-2'-fluoroguanosine-3'-phosphate
  modified_base 7: mod_base = OTHER; note = 2'-O-methyladenosine-3'-phosphate
  modified_base 8: mod_base = OTHER; note = 2'-deoxy-2'-fluoroadenosine-3'-phosphate
  modified_base 9: mod_base = OTHER; note = 2'-deoxy-2'-fluorocytidine-3'-phosphate
  modified_base 10: mod_base = OTHER; note = 2'-O-methyladenosine-3'-phosphate
  modified_base 11: mod_base = OTHER; note = 2'-O-methyluridine-3'-phosphate
  modified_base 12: mod_base = OTHER; note = 2'-O-methylcytidine-3'-phosphate
  modified_base 13: mod_base = OTHER; note = 2'-O-methyladenosine-3'-phosphate
  modified_base 14: mod_base = OTHER; note = 2'-deoxy-2'-fluoroguanosine-3'-phosphate
  modified_base 15: mod_base = OTHER; note = 2'-O-methyluridine-3'-phosphate
  modified_base 16: mod_base = OTHER; note = 2'-deoxy-2'-fluoroguanosine-3'-phosphate
  modified_base 17: mod_base = OTHER; note = 2'-O-methylcytidine-3'-phosphate
  modified_base 18: mod_base = OTHER; note = 2'-O-methylcytidine-3'-phosphate
  modified_base 19: mod_base = OTHER; note = 2'-O-methyluridine-3'-phosphate
  modified_base 20: mod_base = OTHER; note = 2'-O-methyluridine-3'-phosphate
  modified_base 21: mod_base = OTHER; note = 2'-O-methyluridine-3'-phosphorothioate
  modified_base 22: mod_base = OTHER; note = 2'-O-methylcytidine-3'-phosphorothioate
  modified_base 23: mod_base = OTHER; note = 2'-O-methylcytidine
tttcagaacatcagtgcctttcc

SEQ ID NO: 2704 - RNA, 21 nt, synthetic construct
  source 1..21: mol_type = other RNA
  modified_base 1: mod_base = OTHER; note = 2'-O-methylguanosine-3'-phosphorothioate
  modified_base 2: mod_base = OTHER; note = 2'-O-methyladenosine-3'-phosphorothioate
  modified_base 3: mod_base = OTHER; note = 2'-O-methyladenosine-3'-phosphate
  modified_base 4: mod_base = OTHER; note = 2'-O-methyladenosine-3'-phosphate
  modified_base 5: mod_base = OTHER; note = 2'-O-methylguanosine-3'-phosphate
  modified_base 6: mod_base = OTHER; note = 2'-O-methylguanosine-3'-phosphate
  modified_base 7: mod_base = OTHER; note = 2'-deoxy-2'-fluorocytidine-3'-phosphate
  modified_base 8: mod_base = OTHER; note = 2'-O-methyladenosine-3'-phosphate
  modified_base 9: mod_base = OTHER; note = 2'-deoxy-2'-fluorocytidine-3'-phosphate
  modified_base 10: mod_base = OTHER; note = 2'-deoxy-2'-fluorouridine-3'-phosphate
  modified_base 11: mod_base = OTHER; note = 2'-deoxy-2'-fluoroguanosine-3'-phosphate
  modified_base 12: mod_base = OTHER; note = 2'-O-methyladenosine-3'-phosphate
  modified_base 13: mod_base = OTHER; note = 2'-O-methyluridine-3'-phosphate
  modified_base 14: mod_base = OTHER; note = 2'-O-methylguanosine-3'-phosphate
  modified_base 15: mod_base = OTHER; note = 2'-O-methyluridine-3'-phosphate
  modified_base 16: mod_base = OTHER; note = 2'-O-methyluridine-3'-phosphate
  modified_base 17: mod_base = OTHER; note = 2'-O-methylcytidine-3'-phosphate
  modified_base 18: mod_base = OTHER; note = 2'-O-methyluridine-3'-phosphate
  modified_base 19: mod_base = OTHER; note = 2'-O-methylguanosine-3'-phosphate
  modified_base 20: mod_base = OTHER; note = 2'-O-methyladenosine-3'-phosphate
  modified_base 21: mod_base = OTHER; note = 2'-O-methyladenosine-3'-phosphate ((2S,4R)-1-[29-[[2-(acetylamino)-2-deoxy-beta-D-galactopyra nosyl]oxy]-14,14-bis[[3-[[3-[[5-[[2-(acetylamino)-2-deoxy-b eta-D-galactopyranosyl]oxy]-1-oxopentyl]amino]propyl]amino] -3-oxopropoxy]methyl]-1,12,19,25-tetraoxo-16-oxa-13,20,24-t riazanonacos-1-yl]-4-hydroxy-2-pyrrolidinyl)methyl ester
gaaaggcactgatgttctgaa

SEQ ID NO: 2705 - RNA, 23 nt, synthetic construct
  source 1..23: mol_type = other RNA
  modified_base 1: mod_base = OTHER; note = 2'-O-methyluridine-3'-phosphorothioate
  modified_base 2: mod_base = OTHER; note = 2'-deoxy-2'-fluorouridine-3'-phosphorothioate
  modified_base 3: mod_base = OTHER; note = 2'-O-methylcytidine-3'-phosphate
  modified_base 4: mod_base = OTHER; note = 2'-O-methyladenosine-3'-phosphate
  modified_base 5: mod_base = OTHER; note = 2'-O-methylguanosine-3'-phosphate
  modified_base 6: mod_base = OTHER; note = 2'-deoxy-2'-fluoroadenosine-3'-phosphate
  modified_base 7: mod_base = OTHER; note = 2'-O-methyladenosine-3'-phosphate
  modified_base 8: mod_base = OTHER; note = 2'-deoxy-2'-fluorocytidine-3'-phosphate
  modified_base 9: mod_base = OTHER; note = 2'-deoxy-2'-fluoroadenosine-3'-phosphate
  modified_base 10: mod_base = OTHER; note = 2'-O-methyluridine-3'-phosphate
  modified_base 11: mod_base = OTHER; note = 2'-O-methylcytidine-3'-phosphate
  modified_base 12: mod_base = OTHER; note = 2'-O-methyladenosine-3'-phosphate
  modified_base 13: mod_base = OTHER; note = 2'-O-methylguanosine-3'-phosphate
  modified_base 14: mod_base = OTHER; note = 2'-deoxy-2'-fluorouridine-3'-phosphate
  modified_base 15: mod_base = OTHER; note = 2'-O-methylguanosine-3'-phosphate
  modified_base 16: mod_base = OTHER; note = 2'-deoxy-2'-fluorocytidine-3'-phosphate
  modified_base 17: mod_base = OTHER; note = 2'-O-methylcytidine-3'-phosphate
  modified_base 18: mod_base = OTHER; note = 2'-O-methyluridine-3'-phosphate
  modified_base 19: mod_base = OTHER; note = 2'-O-methyluridine-3'-phosphate
  modified_base 20: mod_base = OTHER; note = 2'-O-methyluridine-3'-phosphate
  modified_base 21: mod_base = OTHER; note = 2'-O-methylcytidine-3'-phosphorothioate
  modified_base 22: mod_base = OTHER; note = 2'-O-methylcytidine-3'-phosphorothioate
  modified_base 23: mod_base = OTHER; note = 2'-O-methylguanosine
ttcagaacatcagtgcctttccg

SEQ ID NO: 2706 - RNA, 21 nt, synthetic construct
  source 1..21: mol_type = other RNA
  modified_base 1: mod_base = OTHER; note = 2'-O-methylguanosine-3'-phosphorothioate
  modified_base 2: mod_base = OTHER; note = 2'-O-methylguanosine-3'-phosphorothioate
  modified_base 3: mod_base = OTHER; note = 2'-O-methylguanosine-3'-phosphate
  modified_base 4: mod_base = OTHER; note = 2'-O-methyladenosine-3'-phosphate
  modified_base 5: mod_base = OTHER; note = 2'-O-methyladenosine-3'-phosphate
  modified_base 6: mod_base = OTHER; note = 2'-O-methylguanosine-3'-phosphate
  modified_base 7: mod_base = OTHER; note = 2'-deoxy-2'-fluoroguanosine-3'-phosphate
  modified_base 8: mod_base = OTHER; note = 2'-O-methyluridine-3'-phosphate
  modified_base 9: mod_base = OTHER; note = 2'-deoxy-2'-fluoroguanosine-3'-phosphate
  modified_base 10: mod_base = OTHER; note = 2'-deoxy-2'-fluoroguanosine-3'-phosphate
  modified_base 11: mod_base = OTHER; note = 2'-deoxy-2'-fluoroadenosine-3'-phosphate
  modified_base 12: mod_base = OTHER; note = 2'-O-methyladenosine-3'-phosphate
  modified_base 13: mod_base = OTHER; note = 2'-O-methylguanosine-3'-phosphate
  modified_base 14: mod_base = OTHER; note = 2'-O-methyluridine-3'-phosphate
  modified_base 15: mod_base = OTHER; note = 2'-O-methylcytidine-3'-phosphate
  modified_base 16: mod_base = OTHER; note = 2'-O-methyluridine-3'-phosphate
  modified_base 17: mod_base = OTHER; note = 2'-O-methyluridine-3'-phosphate
  modified_base 18: mod_base = OTHER; note = 2'-O-methylcytidine-3'-phosphate
  modified_base 19: mod_base = OTHER; note = 2'-O-methylcytidine-3'-phosphate
  modified_base 20: mod_base = OTHER; note = 2'-O-methyluridine-3'-phosphate
  modified_base 21: mod_base = OTHER; note = 2'-O-methylguanosine-3'-phosphate ((2S,4R)-1-[29-[[2-(acetylamino)-2-deoxy-beta-D-galactopyra nosyl]oxy]-14,14-bis[[3-[[3-[[5-[[2-(acetylamino)-2-deoxy-b eta-D-galactopyranosyl]oxy]-1-oxopentyl]amino]propyl]amino] -3-oxopropoxy]methyl]-1,12,19,25-tetraoxo-16-oxa-13,20,24-t riazanonacos-1-yl]-4-hydroxy-2-pyrrolidinyl)methyl ester
gggaaggtggaagtcttcctg

SEQ ID NO: 2707 - RNA, 23 nt, synthetic construct
  source 1..23: mol_type = other RNA
  modified_base 1: mod_base = OTHER; note = 2'-O-methylcytidine-3'-phosphorothioate
  modified_base 2: mod_base = OTHER; note = 2'-deoxy-2'-fluoroadenosine-3'-phosphorothioate
  modified_base 3: mod_base = OTHER; note = 2'-O-methylguanosine-3'-phosphate
  modified_base 4: mod_base = OTHER; note = 2'-O-methylguanosine-3'-phosphate
  modified_base 5: mod_base = OTHER; note = 2'-O-methyladenosine-3'-phosphate
  modified_base 6: mod_base = OTHER; note = 2'-deoxy-2'-fluoroadenosine-3'-phosphate
  modified_base 7: mod_base = OTHER; note = 2'-O-methylguanosine-3'-phosphate
  modified_base 8: mod_base = OTHER; note = 2'-deoxy-2'-fluoroadenosine-3'-phosphate
  modified_base 9: mod_base = OTHER; note = 2'-deoxy-2'-fluorocytidine-3'-phosphate
  modified_base 10: mod_base = OTHER; note = 2'-O-methyluridine-3'-phosphate
  modified_base 11: mod_base = OTHER; note = 2'-O-methyluridine-3'-phosphate
  modified_base 12: mod_base = OTHER; note = 2'-O-methylcytidine-3'-phosphate
  modified_base 13: mod_base = OTHER; note = 2'-O-methylcytidine-3'-phosphate
  modified_base 14: mod_base = OTHER; note = 2'-deoxy-2'-fluoroadenosine-3'-phosphate
  modified_base 15: mod_base = OTHER; note = 2'-O-methylcytidine-3'-phosphate
  modified_base 16: mod_base = OTHER; note = 2'-deoxy-2'-fluorocytidine-3'-phosphate
  modified_base 17: mod_base = OTHER; note = 2'-O-methyluridine-3'-phosphate
  modified_base 18: mod_base = OTHER; note = 2'-O-methyluridine-3'-phosphate
  modified_base 19: mod_base = OTHER; note = 2'-O-methylcytidine-3'-phosphate
  modified_base 20: mod_base = OTHER; note = 2'-O-methylcytidine-3'-phosphate
  modified_base 21: mod_base = OTHER; note = 2'-O-methylcytidine-3'-phosphorothioate
  modified_base 22: mod_base = OTHER; note = 2'-O-methyluridine-3'-phosphorothioate
  modified_base 23: mod_base = OTHER; note = 2'-O-methyluridine
caggaagacttccaccttccctt

SEQ ID NO: 2708 - RNA, 21 nt, synthetic construct
  source 1..21: mol_type = other RNA
  modified_base 1: mod_base = OTHER; note = 2'-O-methylguanosine-3'-phosphorothioate
  modified_base 2: mod_base = OTHER; note = 2'-O-methylguanosine-3'-phosphorothioate
  modified_base 3: mod_base = OTHER; note = 2'-O-methyladenosine-3'-phosphate
  modified_base 4: mod_base = OTHER; note = 2'-O-methyladenosine-3'-phosphate
  modified_base 5: mod_base = OTHER; note = 2'-O-methylguanosine-3'-phosphate
  modified_base 6: mod_base = OTHER; note = 2'-O-methylguanosine-3'-phosphate
  modified_base 7: mod_base = OTHER; note = 2'-deoxy-2'-fluorouridine-3'-phosphate
  modified_base 8: mod_base = OTHER; note = 2'-O-methylguanosine-3'-phosphate
  modified_base 9: mod_base = OTHER; note = 2'-deoxy-2'-fluoroguanosine-3'-phosphate
  modified_base 10: mod_base = OTHER; note = 2'-deoxy-2'-fluoroadenosine-3'-phosphate
  modified_base 11: mod_base = OTHER; note = 2'-deoxy-2'-fluoroadenosine-3'-phosphate
  modified_base 12: mod_base = OTHER; note = 2'-O-methylguanosine-3'-phosphate
  modified_base 13: mod_base = OTHER; note = 2'-O-methyluridine-3'-phosphate
  modified_base 14: mod_base = OTHER; note = 2'-O-methylcytidine-3'-phosphate
  modified_base 15: mod_base = OTHER; note = 2'-O-methyluridine-3'-phosphate
  modified_base 16: mod_base = OTHER; note = 2'-O-methyluridine-3'-phosphate
  modified_base 17: mod_base = OTHER; note = 2'-O-methylcytidine-3'-phosphate
  modified_base 18: mod_base = OTHER; note = 2'-O-methylcytidine-3'-phosphate
  modified_base 19: mod_base = OTHER; note = 2'-O-methyluridine-3'-phosphate
  modified_base 20: mod_base = OTHER; note = 2'-O-methylguanosine-3'-phosphate
  modified_base 21: mod_base = OTHER; note = 2'-O-methylguanosine-3'-phosphate ((2S,4R)-1-[29-[[2-(acetylamino)-2-deoxy-beta-D-galactopyra nosyl]oxy]-14,14-bis[[3-[[3-[[5-[[2-(acetylamino)-2-deoxy-b eta-D-galactopyranosyl]oxy]-1-oxopentyl]amino]propyl]amino] -3-oxopropoxy]methyl]-1,12,19,25-tetraoxo-16-oxa-13,20,24-t riazanonacos-1-yl]-4-hydroxy-2-pyrrolidinyl)methyl ester
ggaaggtggaagtcttcctgg

SEQ ID NO: 2709 - RNA, 23 nt, synthetic construct
  source 1..23: mol_type = other RNA
  modified_base 1: mod_base = OTHER; note = 2'-O-methylcytidine-3'-phosphorothioate
  modified_base 2: mod_base = OTHER; note = 2'-deoxy-2'-fluorocytidine-3'-phosphorothioate
  modified_base 3: mod_base = OTHER; note = 2'-O-methyladenosine-3'-phosphate
  modified_base 4: mod_base = OTHER; note = 2'-O-methylguanosine-3'-phosphate
  modified_base 5: mod_base = OTHER; note = 2'-O-methylguanosine-3'-phosphate
  modified_base 6: mod_base = OTHER; note = 2'-deoxy-2'-fluoroadenosine-3'-phosphate
  modified_base 7: mod_base = OTHER; note = 2'-O-methyladenosine-3'-phosphate
  modified_base 8: mod_base = OTHER; note = 2'-deoxy-2'-fluoroguanosine-3'-phosphate
  modified_base 9: mod_base = OTHER; note = 2'-deoxy-2'-fluoroadenosine-3'-phosphate
  modified_base 10: mod_base = OTHER; note = 2'-O-methylcytidine-3'-phosphate
  modified_base 11: mod_base = OTHER; note = 2'-O-methyluridine-3'-phosphate
  modified_base 12: mod_base = OTHER; note = 2'-O-methyluridine-3'-phosphate
  modified_base 13: mod_base = OTHER; note = 2'-O-methylcytidine-3'-phosphate
  modified_base 14: mod_base = OTHER; note = 2'-deoxy-2'-fluorocytidine-3'-phosphate
  modified_base 15: mod_base = OTHER; note = 2'-O-methyladenosine-3'-phosphate
  modified_base 16: mod_base = OTHER; note = 2'-deoxy-2'-fluorocytidine-3'-phosphate
  modified_base 17: mod_base = OTHER; note = 2'-O-methylcytidine-3'-phosphate
  modified_base 18: mod_base = OTHER; note = 2'-O-methyluridine-3'-phosphate
  modified_base 19: mod_base = OTHER; note = 2'-O-methyluridine-3'-phosphate
  modified_base 20: mod_base = OTHER; note = 2'-O-methylcytidine-3'-phosphate
  modified_base 21: mod_base = OTHER; note = 2'-O-methylcytidine-3'-phosphorothioate
  modified_base 22: mod_base = OTHER; note = 2'-O-methylcytidine-3'-phosphorothioate
  modified_base 23: mod_base = OTHER; note = 2'-O-methyluridine
ccaggaagacttccaccttccct

SEQ ID NO: 2710 - RNA, 21 nt, synthetic construct
  source 1..21: mol_type = other RNA
  modified_base 1: mod_base = OTHER; note = 2'-O-methylguanosine-3'-phosphorothioate
  modified_base 2: mod_base = OTHER; note = 2'-O-methylguanosine-3'-phosphorothioate
  modified_base 3: mod_base = OTHER; note = 2'-O-methyladenosine-3'-phosphate
  modified_base 4: mod_base = OTHER; note = 2'-O-methyladenosine-3'-phosphate
  modified_base 5: mod_base = OTHER; note = 2'-O-methylguanosine-3'-phosphate
  modified_base 6: mod_base = OTHER; note = 2'-O-methylguanosine-3'-phosphate
  modified_base 7: mod_base = OTHER; note = 2'-deoxy-2'-fluoroguanosine-3'-phosphate
  modified_base 8: mod_base = OTHER; note = 2'-O-methyladenosine-3'-phosphate
  modified_base 9: mod_base = OTHER; note = 2'-deoxy-2'-fluoroadenosine-3'-phosphate
  modified_base 10: mod_base = OTHER; note = 2'-deoxy-2'-fluoroguanosine-3'-phosphate
  modified_base 11: mod_base = OTHER; note = 2'-deoxy-2'-fluoroguanosine-3'-phosphate
  modified_base 12: mod_base = OTHER; note = 2'-O-methyluridine-3'-phosphate
  modified_base 13: mod_base = OTHER; note = 2'-O-methylguanosine-3'-phosphate
  modified_base 14: mod_base = OTHER; note = 2'-O-methylguanosine-3'-phosphate
  modified_base 15: mod_base = OTHER; note = 2'-O-methyladenosine-3'-phosphate
  modified_base 16: mod_base = OTHER; note = 2'-O-methyladenosine-3'-phosphate
  modified_base 17: mod_base = OTHER; note = 2'-O-methylguanosine-3'-phosphate
  modified_base 18: mod_base = OTHER; note = 2'-O-methyluridine-3'-phosphate
  modified_base 19: mod_base = OTHER; note = 2'-O-methylcytidine-3'-phosphate
  modified_base 20: mod_base = OTHER; note = 2'-O-methyluridine-3'-phosphate
  modified_base 21: mod_base = OTHER; note = 2'-O-methyluridine-3'-phosphate ((2S,4R)-1-[29-[[2-(acetylamino)-2-deoxy-beta-D-galactopyra nosyl]oxy]-14,14-bis[[3-[[3-[[5-[[2-(acetylamino)-2-deoxy-b eta-D-galactopyranosyl]oxy]-1-oxopentyl]amino]propyl]amino] -3-oxopropoxy]methyl]-1,12,19,25-tetraoxo-16-oxa-13,20,24-t riazanonacos-1-yl]-4-hydroxy-2-pyrrolidinyl)methyl ester
ggaagggaaggtggaagtctt

SEQ ID NO: 2711 - RNA, 23 nt, synthetic construct
  source 1..23: mol_type = other RNA
  modified_base 1: mod_base = OTHER; note = 2'-O-methyladenosine-3'-phosphorothioate
  modified_base 2: mod_base = OTHER; note = 2'-deoxy-2'-fluoroadenosine-3'-phosphorothioate
  modified_base 3: mod_base = OTHER; note = 2'-O-methylguanosine-3'-phosphate
  modified_base 4: mod_base = OTHER; note = 2'-O-methyladenosine-3'-phosphate
  modified_base 5: mod_base = OTHER; note = 2'-O-methylcytidine-3'-phosphate
  modified_base 6: mod_base = OTHER; note = 2'-deoxy-2'-fluorouridine-3'-phosphate
  modified_base 7: mod_base = OTHER; note = 2'-O-methyluridine-3'-phosphate
  modified_base 8: mod_base = OTHER; note = 2'-deoxy-2'-fluorocytidine-3'-phosphate
  modified_base 9: mod_base = OTHER; note = 2'-deoxy-2'-fluorocytidine-3'-phosphate
  modified_base 10: mod_base = OTHER; note = 2'-O-methyladenosine-3'-phosphate
  modified_base 11: mod_base = OTHER; note = 2'-O-methylcytidine-3'-phosphate
  modified_base 12: mod_base = OTHER; note = 2'-O-methylcytidine-3'-phosphate
  modified_base 13: mod_base = OTHER; note = 2'-O-methyluridine-3'-phosphate
  modified_base 14: mod_base = OTHER; note = 2'-deoxy-2'-fluorouridine-3'-phosphate
  modified_base 15: mod_base = OTHER; note = 2'-O-methylcytidine-3'-phosphate
  modified_base 16: mod_base = OTHER; note = 2'-deoxy-2'-fluorocytidine-3'-phosphate
  modified_base 17: mod_base = OTHER; note = 2'-O-methylcytidine-3'-phosphate
  modified_base 18: mod_base = OTHER; note = 2'-O-methyluridine-3'-phosphate
  modified_base 19: mod_base = OTHER; note = 2'-O-methyluridine-3'-phosphate
  modified_base 20: mod_base = OTHER; note = 2'-O-methylcytidine-3'-phosphate
  modified_base 21: mod_base = OTHER; note = 2'-O-methylcytidine-3'-phosphorothioate
  modified_base 22: mod_base = OTHER; note = 2'-O-methyladenosine-3'-phosphorothioate
  modified_base 23: mod_base = OTHER; note = 2'-O-methylcytidine
aagacttccaccttcccttccac

SEQ ID NO: 2712 - RNA, 21 nt, synthetic construct
  source 1..21: mol_type = other RNA
  modified_base 1: mod_base = OTHER; note = 2'-O-methyluridine-3'-phosphorothioate
  modified_base 2: mod_base = OTHER; note = 2'-O-methylguanosine-3'-phosphorothioate
  modified_base 3: mod_base = OTHER; note = 2'-O-methylguanosine-3'-phosphate
  modified_base 4: mod_base = OTHER; note = 2'-O-methyladenosine-3'-phosphate
  modified_base 5: mod_base = OTHER; note = 2'-O-methyladenosine-3'-phosphate
  modified_base 6: mod_base = OTHER; note = 2'-O-methylguanosine-3'-phosphate
  modified_base 7: mod_base = OTHER; note = 2'-deoxy-2'-fluoroguanosine-3'-phosphate
  modified_base 8: mod_base = OTHER; note = 2'-O-methylguanosine-3'-phosphate
  modified_base 9: mod_base = OTHER; note = 2'-deoxy-2'-fluoroadenosine-3'-phosphate
  modified_base 10: mod_base = OTHER; note = 2'-deoxy-2'-fluoroadenosine-3'-phosphate
  modified_base 11: mod_base = OTHER; note = 2'-deoxy-2'-fluoroguanosine-3'-phosphate
  modified_base 12: mod_base = OTHER; note = 2'-O-methylguanosine-3'-phosphate
  modified_base 13: mod_base = OTHER; note = 2'-O-methyluridine-3'-phosphate
  modified_base 14: mod_base = OTHER; note = 2'-O-methylguanosine-3'-phosphate
  modified_base 15: mod_base = OTHER; note = 2'-O-methylguanosine-3'-phosphate
  modified_base 16: mod_base = OTHER; note = 2'-O-methyladenosine-3'-phosphate
  modified_base 17: mod_base = OTHER; note = 2'-O-methyladenosine-3'-phosphate
  modified_base 18: mod_base = OTHER; note = 2'-O-methylguanosine-3'-phosphate
  modified_base 19: mod_base = OTHER; note = 2'-O-methyluridine-3'-phosphate
  modified_base 20: mod_base = OTHER; note = 2'-O-methylcytidine-3'-phosphate
  modified_base 21: mod_base = OTHER; note = 2'-O-methyluridine-3'-phosphate ((2S,4R)-1-[29-[[2-(acetylamino)-2-deoxy-beta-D-galactopyra nosyl]oxy]-14,14-bis[[3-[[3-[[5-[[2-(acetylamino)-2-deoxy-b eta-D-galactopyranosyl]oxy]-1-oxopentyl]amino]propyl]amino] -3-oxopropoxy]methyl]-1,12,19,25-tetraoxo-16-oxa-13,20,24-t riazanonacos-1-yl]-4-hydroxy-2-pyrrolidinyl)methyl ester
tggaagggaaggtggaagtct

SEQ ID NO: 2713 - RNA, 23 nt, synthetic construct
  source 1..23: mol_type = other RNA
  modified_base 1: mod_base = OTHER; note = 2'-O-methyladenosine-3'-phosphorothioate
  modified_base 2: mod_base = OTHER; note = 2'-deoxy-2'-fluoroguanosine-3'-phosphorothioate
  modified_base 3: mod_base = OTHER; note = 2'-O-methyladenosine-3'-phosphate
  modified_base 4: mod_base = OTHER; note = 2'-O-methylcytidine-3'-phosphate
  modified_base 5: mod_base = OTHER; note = 2'-O-methyluridine-3'-phosphate
  modified_base 6: mod_base = OTHER; note = 2'-deoxy-2'-fluorouridine-3'-phosphate
  modified_base 7: mod_base = OTHER; note = 2'-O-methylcytidine-3'-phosphate
  modified_base 8: mod_base = OTHER; note = 2'-deoxy-2'-fluorocytidine-3'-phosphate
  modified_base 9: mod_base = OTHER; note = 2'-deoxy-2'-fluoroadenosine-3'-phosphate
  modified_base 10: mod_base = OTHER; note = 2'-O-methylcytidine-3'-phosphate
  modified_base 11: mod_base = OTHER; note = 2'-O-methylcytidine-3'-phosphate
  modified_base 12: mod_base = OTHER; note = 2'-O-methyluridine-3'-phosphate
  modified_base 13: mod_base = OTHER; note = 2'-O-methyluridine-3'-phosphate
  modified_base 14: mod_base = OTHER; note = 2'-deoxy-2'-fluorocytidine-3'-phosphate
  modified_base 15: mod_base = OTHER; note = 2'-O-methylcytidine-3'-phosphate
  modified_base 16: mod_base = OTHER; note = 2'-deoxy-2'-fluorocytidine-3'-phosphate
  modified_base 17: mod_base = OTHER; note = 2'-O-methyluridine-3'-phosphate
  modified_base 18: mod_base = OTHER; note = 2'-O-methyluridine-3'-phosphate
  modified_base 19: mod_base = OTHER; note = 2'-O-methylcytidine-3'-phosphate
  modified_base 20: mod_base = OTHER; note = 2'-O-methylcytidine-3'-phosphate
  modified_base 21: mod_base = OTHER; note = 2'-O-methyladenosine-3'-phosphorothioate
  modified_base 22: mod_base = OTHER; note = 2'-O-methylcytidine-3'-phosphorothioate
  modified_base 23: mod_base = OTHER; note = 2'-O-methyladenosine
agacttccaccttcccttccaca

SEQ ID NO: 2714 - RNA, 21 nt, synthetic construct
  source 1..21: mol_type = other RNA
  modified_base 1: mod_base = OTHER; note = 2'-O-methyluridine-3'-phosphorothioate
  modified_base 2: mod_base = OTHER; note = 2'-O-methylguanosine-3'-phosphorothioate
  modified_base 3: mod_base = OTHER; note = 2'-O-methylcytidine-3'-phosphate
  modified_base 4: mod_base = OTHER; note = 2'-O-methyluridine-3'-phosphate
  modified_base 5: mod_base = OTHER; note = 2'-O-methyladenosine-3'-phosphate
  modified_base 6: mod_base = OTHER; note = 2'-O-methyladenosine-3'-phosphate
  modified_base 7: mod_base = OTHER; note = 2'-deoxy-2'-fluoroadenosine-3'-phosphate
  modified_base 8: mod_base = OTHER; note = 2'-O-methyluridine-3'-phosphate
  modified_base 9: mod_base = OTHER; note = 2'-deoxy-2'-fluorocytidine-3'-phosphate
  modified_base 10: mod_base = OTHER; note = 2'-deoxy-2'-fluoroadenosine-3'-phosphate
  modified_base 11: mod_base = OTHER; note = 2'-deoxy-2'-fluoroguanosine-3'-phosphate
  modified_base 12: mod_base = OTHER; note = 2'-O-methyluridine-3'-phosphate
  modified_base 13: mod_base = OTHER; note = 2'-O-methyladenosine-3'-phosphate
  modified_base 14: mod_base = OTHER; note = 2'-O-methylcytidine-3'-phosphate
  modified_base 15: mod_base = OTHER; note = 2'-O-methyluridine-3'-phosphate
  modified_base 16: mod_base = OTHER; note = 2'-O-methyluridine-3'-phosphate
  modified_base 17: mod_base = OTHER; note = 2'-O-methylcytidine-3'-phosphate
  modified_base 18: mod_base = OTHER; note = 2'-O-methylcytidine-3'-phosphate
  modified_base 19: mod_base = OTHER; note = 2'-O-methyladenosine-3'-phosphate
  modified_base 20: mod_base = OTHER; note = 2'-O-methyladenosine-3'-phosphate
  modified_base 21: mod_base = OTHER; note = 2'-O-methyladenosine-3'-phosphate ((2S,4R)-1-[29-[[2-(acetylamino)-2-deoxy-beta-D-galactopyra nosyl]oxy]-14,14-bis[[3-[[3-[[5-[[2-(acetylamino)-2-deoxy-b eta-D-galactopyranosyl]oxy]-1-oxopentyl]amino]propyl]amino] -3-oxopropoxy]methyl]-1,12,19,25-tetraoxo-16-oxa-13,20,24-t riazanonacos-1-yl]-4-hydroxy-2-pyrrolidinyl)methyl ester
tgctaaatcagtacttccaaa

SEQ ID NO: 2715 - RNA, 23 nt, synthetic construct
  source 1..23: mol_type = other RNA
  modified_base 1: mod_base = OTHER; note = 2'-O-methyluridine-3'-phosphorothioate
  modified_base 2: mod_base = OTHER; note = 2'-deoxy-2'-fluorouridine-3'-phosphorothioate
  modified_base 3: mod_base = OTHER; note = 2'-O-methyluridine-3'-phosphate
  modified_base 4: mod_base = OTHER; note = 2'-O-methylguanosine-3'-phosphate
  modified_base 5: mod_base = OTHER; note = 2'-O-methylguanosine-3'-phosphate
  modified_base 6: mod_base = OTHER; note = 2'-deoxy-2'-fluoroadenosine-3'-phosphate
  modified_base 7: mod_base = OTHER; note = 2'-O-methyladenosine-3'-phosphate
  modified_base 8: mod_base = OTHER; note = 2'-deoxy-2'-fluoroguanosine-3'-phosphate
  modified_base 9: mod_base = OTHER; note = 2'-deoxy-2'-fluorouridine-3'-phosphate
  modified_base 10: mod_base = OTHER; note = 2'-O-methyladenosine-3'-phosphate
  modified_base 11: mod_base = OTHER; note = 2'-O-methylcytidine-3'-phosphate
  modified_base 12: mod_base = OTHER; note = 2'-O-methyluridine-3'-phosphate
  modified_base 13: mod_base = OTHER; note = 2'-O-methylguanosine-3'-phosphate
  modified_base 14: mod_base = OTHER; note = 2'-deoxy-2'-fluoroadenosine-3'-phosphate
  modified_base 15: mod_base = OTHER; note = 2'-O-methyluridine-3'-phosphate
  modified_base 16: mod_base = OTHER; note = 2'-deoxy-2'-fluorouridine-3'-phosphate
  modified_base 17: mod_base = OTHER; note = 2'-O-methyluridine-3'-phosphate
  modified_base 18: mod_base = OTHER; note = 2'-O-methyladenosine-3'-phosphate
  modified_base 19: mod_base = OTHER; note = 2'-O-methylguanosine-3'-phosphate
  modified_base 20: mod_base = OTHER; note = 2'-O-methylcytidine-3'-phosphate
  modified_base 21: mod_base = OTHER; note = 2'-O-methyladenosine-3'-phosphorothioate
  modified_base 22: mod_base = OTHER; note = 2'-O-methyluridine-3'-phosphorothioate
  modified_base 23: mod_base = OTHER; note = 2'-O-methylguanosine
tttggaagtactgatttagcatg

SEQ ID NO: 2716 - RNA, 21 nt, synthetic construct
  source 1..21: mol_type = other RNA
  modified_base 1: mod_base = OTHER; note = 2'-O-methylguanosine-3'-phosphorothioate
  modified_base 2: mod_base = OTHER; note = 2'-O-methylcytidine-3'-phosphorothioate
  modified_base 3: mod_base = OTHER; note = 2'-O-methyluridine-3'-phosphate
  modified_base 4: mod_base = OTHER; note = 2'-O-methyladenosine-3'-phosphate
  modified_base 5: mod_base = OTHER; note = 2'-O-methyladenosine-3'-phosphate
  modified_base 6: mod_base = OTHER; note = 2'-O-methyladenosine-3'-phosphate
  modified_base 7: mod_base = OTHER; note = 2'-deoxy-2'-fluorouridine-3'-phosphate
  modified_base 8: mod_base = OTHER; note = 2'-O-methylcytidine-3'-phosphate
  modified_base 9: mod_base = OTHER; note = 2'-deoxy-2'-fluoroadenosine-3'-phosphate
  modified_base 10: mod_base = OTHER; note = 2'-deoxy-2'-fluoroguanosine-3'-phosphate
  modified_base 11: mod_base = OTHER; note = 2'-deoxy-2'-fluorouridine-3'-phosphate
  modified_base 12: mod_base = OTHER; note = 2'-O-methyladenosine-3'-phosphate
  modified_base 13: mod_base = OTHER; note = 2'-O-methylcytidine-3'-phosphate
  modified_base 14: mod_base = OTHER; note = 2'-O-methyluridine-3'-phosphate
  modified_base 15: mod_base = OTHER; note = 2'-O-methyluridine-3'-phosphate
  modified_base 16: mod_base = OTHER; note = 2'-O-methylcytidine-3'-phosphate
  modified_base 17: mod_base = OTHER; note = 2'-O-methylcytidine-3'-phosphate
  modified_base 18: mod_base = OTHER; note = 2'-O-methyladenosine-3'-phosphate
  modified_base 19: mod_base = OTHER; note = 2'-O-methyladenosine-3'-phosphate
  modified_base 20: mod_base = OTHER; note = 2'-O-methyladenosine-3'-phosphate
  modified_base 21: mod_base = OTHER; note = 2'-O-methylguanosine-3'-phosphate ((2S,4R)-1-[29-[[2-(acetylamino)-2-deoxy-beta-D-galactopyra nosyl]oxy]-14,14-bis[[3-[[3-[[5-[[2-(acetylamino)-2-deoxy-b eta-D-galactopyranosyl]oxy]-1-oxopentyl]amino]propyl]amino] -3-oxopropoxy]methyl]-1,12,19,25-tetraoxo-16-oxa-13,20,24-t riazanonacos-1-yl]-4-hydroxy-2-pyrrolidinyl)methyl ester
gctaaatcagtacttccaaag

SEQ ID NO: 2717 - RNA, 23 nt, synthetic construct
  source 1..23: mol_type = other RNA
  modified_base 1: mod_base = OTHER; note = 2'-O-methylcytidine-3'-phosphorothioate
  modified_base 2: mod_base = OTHER; note = 2'-deoxy-2'-fluorouridine-3'-phosphorothioate
  modified_base 3: mod_base = OTHER; note = 2'-O-methyluridine-3'-phosphate
  modified_base 4: mod_base = OTHER; note = 2'-O-methyluridine-3'-phosphate
  modified_base 5: mod_base = OTHER; note = 2'-O-methylguanosine-3'-phosphate
  modified_base 6: mod_base = OTHER; note = 2'-deoxy-2'-fluoroguanosine-3'-phosphate
  modified_base 7: mod_base = OTHER; note = 2'-O-methyladenosine-3'-phosphate
  modified_base 8: mod_base = OTHER; note = 2'-deoxy-2'-fluoroadenosine-3'-phosphate
  modified_base 9: mod_base = OTHER; note = 2'-deoxy-2'-fluoroguanosine-3'-phosphate
  modified_base 10: mod_base = OTHER; note = 2'-O-methyluridine-3'-phosphate
  modified_base 11: mod_base = OTHER; note = 2'-O-methyladenosine-3'-phosphate
  modified_base 12: mod_base = OTHER; note = 2'-O-methylcytidine-3'-phosphate
  modified_base 13: mod_base = OTHER; note = 2'-O-methyluridine-3'-phosphate
  modified_base 14: mod_base = OTHER; note = 2'-deoxy-2'-fluoroguanosine-3'-phosphate
  modified_base 15: mod_base = OTHER; note = 2'-O-methyladenosine-3'-phosphate
  modified_base 16: mod_base = OTHER; note = 2'-deoxy-2'-fluorouridine-3'-phosphate
  modified_base 17: mod_base = OTHER; note = 2'-O-methyluridine-3'-phosphate
  modified_base 18: mod_base = OTHER; note = 2'-O-methyluridine-3'-phosphate
  modified_base 19: mod_base = OTHER; note = 2'-O-methyladenosine-3'-phosphate
  modified_base 20: mod_base = OTHER; note = 2'-O-methylguanosine-3'-phosphate
  modified_base 21: mod_base = OTHER; note = 2'-O-methylcytidine-3'-phosphorothioate
  modified_base 22: mod_base = OTHER; note = 2'-O-methyladenosine-3'-phosphorothioate
  modified_base 23: mod_base = OTHER; note = 2'-O-methyluridine
ctttggaagtactgatttagcat

SEQ ID NO: 2718 - RNA, 21 nt, synthetic construct
  source 1..21: mol_type = other RNA
  modified_base 1: mod_base = OTHER; note = 2'-O-methyladenosine-3'-phosphorothioate
  modified_base 2: mod_base = OTHER; note = 2'-O-methyladenosine-3'-phosphorothioate
  modified_base 3: mod_base = OTHER; note = 2'-O-methylcytidine-3'-phosphate
  modified_base 4: mod_base = OTHER; note = 2'-O-methyladenosine-3'-phosphate
  modified_base 5: mod_base = OTHER; note = 2'-O-methyluridine-3'-phosphate
  modified_base 6: mod_base = OTHER; note = 2'-O-methylguanosine-3'-phosphate
  modified_base 7: mod_base = OTHER; note = 2'-deoxy-2'-fluorocytidine-3'-phosphate
  modified_base 8: mod_base = OTHER; note = 2'-O-methyluridine-3'-phosphate
  modified_base 9: mod_base = OTHER; note = 2'-deoxy-2'-fluoroadenosine-3'-phosphate
  modified_base 10: mod_base = OTHER; note = 2'-deoxy-2'-fluoroadenosine-3'-phosphate
  modified_base 11: mod_base = OTHER; note = 2'-deoxy-2'-fluoroadenosine-3'-phosphate
  modified_base 12: mod_base = OTHER; note = 2'-O-methyluridine-3'-phosphate
  modified_base 13: mod_base = OTHER; note = 2'-O-methylcytidine-3'-phosphate
  modified_base 14: mod_base = OTHER; note = 2'-O-methyladenosine-3'-phosphate
  modified_base 15: mod_base = OTHER; note = 2'-O-methylguanosine-3'-phosphate
  modified_base 16: mod_base = OTHER; note = 2'-O-methyluridine-3'-phosphate
  modified_base 17: mod_base = OTHER; note = 2'-O-methyladenosine-3'-phosphate
  modified_base 18: mod_base = OTHER; note = 2'-O-methylcytidine-3'-phosphate
  modified_base 19: mod_base = OTHER; note = 2'-O-methyluridine-3'-phosphate
  modified_base 20: mod_base = OTHER; note = 2'-O-methyluridine-3'-phosphate
  modified_base 21: mod_base = OTHER; note = 2'-O-methylcytidine-3'-phosphate ((2S,4R)-1-[29-[[2-(acetylamino)-2-deoxy-beta-D-galactopyra nosyl]oxy]-14,14-bis[[3-[[3-[[5-[[2-(acetylamino)-2-deoxy-b eta-D-galactopyranosyl]oxy]-1-oxopentyl]amino]propyl]amino] -3-oxopropoxy]methyl]-1,12,19,25-tetraoxo-16-oxa-13,20,24-t riazanonacos-1-yl]-4-hydroxy-2-pyrrolidinyl)methyl ester
aacatgctaaatcagtacttc

SEQ ID NO: 2719 - RNA, 23 nt, synthetic construct
  source 1..23: mol_type = other RNA
  modified_base 1: mod_base = OTHER; note = 2'-O-methylguanosine-3'-phosphorothioate
  modified_base 2: mod_base = OTHER; note = 2'-deoxy-2'-fluoroadenosine-3'-phosphorothioate
  modified_base 3: mod_base = OTHER; note = 2'-O-methyladenosine-3'-phosphate
  modified_base 4: mod_base = OTHER; note = 2'-O-methylguanosine-3'-phosphate
  modified_base 5: mod_base = OTHER; note = 2'-O-methyluridine-3'-phosphate
  modified_base 6: mod_base = OTHER; note = 2'-deoxy-2'-fluoroadenosine-3'-phosphate
  modified_base 7: mod_base = OTHER; note = 2'-O-methylcytidine-3'-phosphate
  modified_base 8: mod_base = OTHER; note = 2'-deoxy-2'-fluorouridine-3'-phosphate
  modified_base 9: mod_base = OTHER; note = 2'-deoxy-2'-fluoroguanosine-3'-phosphate
  modified_base 10: mod_base = OTHER; note = 2'-O-methyladenosine-3'-phosphate
  modified_base 11: mod_base = OTHER; note = 2'-O-methyluridine-3'-phosphate
  modified_base 12: mod_base = OTHER; note = 2'-O-methyluridine-3'-phosphate
  modified_base 13: mod_base = OTHER; note = 2'-O-methyluridine-3'-phosphate
  modified_base 14: mod_base = OTHER; note = 2'-deoxy-2'-fluoroadenosine-3'-phosphate
  modified_base 15: mod_base = OTHER; note = 2'-O-methylguanosine-3'-phosphate
  modified_base 16: mod_base = OTHER; note = 2'-deoxy-2'-fluorocytidine-3'-phosphate
  modified_base 17: mod_base = OTHER; note = 2'-O-methyladenosine-3'-phosphate
  modified_base 18: mod_base = OTHER; note = 2'-O-methyluridine-3'-phosphate
  modified_base 19: mod_base = OTHER; note = 2'-O-methylguanosine-3'-phosphate
  modified_base 20: mod_base = OTHER; note = 2'-O-methyluridine-3'-phosphate
  modified_base 21: mod_base = OTHER; note = 2'-O-methyluridine-3'-phosphorothioate
  modified_base 22: mod_base = OTHER; note = 2'-O-methylguanosine-3'-phosphorothioate
  modified_base 23: mod_base = OTHER; note = 2'-O-methyluridine
gaagtactgatttagcatgttgt

SEQ ID NO: 2720 - RNA, 21 nt, synthetic construct
  source 1..21: mol_type = other RNA
  modified_base 1: mod_base = OTHER; note = 2'-O-methylcytidine-3'-phosphorothioate
  modified_base 2: mod_base = OTHER; note = 2'-O-methyladenosine-3'-phosphorothioate
  modified_base 3: mod_base = OTHER; note = 2'-O-methyladenosine-3'-phosphate
  modified_base 4: mod_base = OTHER; note = 2'-O-methylcytidine-3'-phosphate
  modified_base 5: mod_base = OTHER; note = 2'-O-methyladenosine-3'-phosphate
  modified_base 6: mod_base = OTHER; note = 2'-O-methyluridine-3'-phosphate
  modified_base 7: mod_base = OTHER; note = 2'-deoxy-2'-fluoroguanosine-3'-phosphate
  modified_base 8: mod_base = OTHER; note = 2'-O-methylcytidine-3'-phosphate
  modified_base 9: mod_base = OTHER; note = 2'-deoxy-2'-fluorouridine-3'-phosphate
  modified_base 10: mod_base = OTHER; note = 2'-deoxy-2'-fluoroadenosine-3'-phosphate
  modified_base 11: mod_base = OTHER; note = 2'-deoxy-2'-fluoroadenosine-3'-phosphate
  modified_base 12: mod_base = OTHER; note = 2'-O-methyladenosine-3'-phosphate
  modified_base 13: mod_base = OTHER; note = 2'-O-methyluridine-3'-phosphate
  modified_base 14: mod_base = OTHER; note = 2'-O-methylcytidine-3'-phosphate
  modified_base 15: mod_base = OTHER; note = 2'-O-methyladenosine-3'-phosphate
  modified_base 16: mod_base = OTHER; note = 2'-O-methylguanosine-3'-phosphate
  modified_base 17: mod_base = OTHER; note = 2'-O-methyluridine-3'-phosphate
  modified_base 18: mod_base = OTHER; note = 2'-O-methyladenosine-3'-phosphate
  modified_base 19: mod_base = OTHER; note = 2'-O-methylcytidine-3'-phosphate
  modified_base 20: mod_base = OTHER; note = 2'-O-methyluridine-3'-phosphate
  modified_base 21: mod_base = OTHER; note = 2'-O-methyluridine-3'-phosphate ((2S,4R)-1-[29-[[2-(acetylamino)-2-deoxy-beta-D-galactopyra nosyl]oxy]-14,14-bis[[3-[[3-[[5-[[2-(acetylamino)-2-deoxy-b eta-D-galactopyranosyl]oxy]-1-oxopentyl]amino]propyl]amino] -3-oxopropoxy]methyl]-1,12,19,25-tetraoxo-16-oxa-13,20,24-t riazanonacos-1-yl]-4-hydroxy-2-pyrrolidinyl)methyl ester
caacatgctaaatcagtactt

SEQ ID NO: 2721 - RNA, 23 nt, synthetic construct
  source 1..23: mol_type = other RNA
  modified_base 1: mod_base = OTHER; note = 2'-O-methyladenosine-3'-phosphorothioate
  modified_base 2: mod_base = OTHER; note = 2'-deoxy-2'-fluoroadenosine-3'-phosphorothioate
  modified_base 3: mod_base = OTHER; note = 2'-O-methylguanosine-3'-phosphate
  modified_base 4: mod_base = OTHER; note = 2'-O-methyluridine-3'-phosphate
  modified_base 5: mod_base = OTHER; note = 2'-O-methyladenosine-3'-phosphate
  modified_base 6: mod_base = OTHER; note = 2'-deoxy-2'-fluorocytidine-3'-phosphate
  modified_base 7: mod_base = OTHER; note = 2'-O-methyluridine-3'-phosphate
  modified_base 8: mod_base = OTHER; note = 2'-deoxy-2'-fluoroguanosine-3'-phosphate
  modified_base 9: mod_base = OTHER; note = 2'-deoxy-2'-fluoroadenosine-3'-phosphate
  modified_base 10: mod_base = OTHER; note = 2'-O-methyluridine-3'-phosphate
  modified_base 11: mod_base = OTHER; note = 2'-O-methyluridine-3'-phosphate
  modified_base 12: mod_base = OTHER; note = 2'-O-methyluridine-3'-phosphate
  modified_base 13: mod_base = OTHER; note = 2'-O-methyladenosine-3'-phosphate
  modified_base 14: mod_base = OTHER; note = 2'-deoxy-2'-fluoroguanosine-3'-phosphate
  modified_base 15: mod_base = OTHER; note = 2'-O-methylcytidine-3'-phosphate
  modified_base 16: mod_base = OTHER; note = 2'-deoxy-2'-fluoroadenosine-3'-phosphate
  modified_base 17: mod_base = OTHER; note = 2'-O-methyluridine-3'-phosphate
  modified_base 18: mod_base = OTHER; note = 2'-O-methylguanosine-3'-phosphate
  modified_base 19: mod_base = OTHER; note = 2'-O-methyluridine-3'-phosphate
  modified_base 20: mod_base = OTHER; note = 2'-O-methyluridine-3'-phosphate
  modified_base 21: mod_base = OTHER; note = 2'-O-methylguanosine-3'-phosphorothioate
  modified_base 22: mod_base = OTHER; note = 2'-O-methyluridine-3'-phosphorothioate
  modified_base 23: mod_base = OTHER; note = 2'-O-methyluridine
aagtactgatttagcatgttgtt

SEQ ID NO: 2722 - RNA, 21 nt, synthetic construct
  source 1..21: mol_type = other RNA
  modified_base 1: mod_base = OTHER; note = 2'-O-methylcytidine-3'-phosphorothioate
  modified_base 2: mod_base = OTHER; note = 2'-O-methylcytidine-3'-phosphorothioate
  modified_base 3: mod_base = OTHER; note = 2'-O-methyladenosine-3'-phosphate
  modified_base 4: mod_base = OTHER; note = 2'-O-methylcytidine-3'-phosphate
  modified_base 5: mod_base = OTHER; note = 2'-O-methyladenosine-3'-phosphate
  modified_base 6: mod_base = OTHER; note = 2'-O-methyladenosine-3'-phosphate
  modified_base 7: mod_base = OTHER; note = 2'-deoxy-2'-fluorocytidine-3'-phosphate
  modified_base 8: mod_base = OTHER; note = 2'-O-methyluridine-3'-phosphate
  modified_base 9: mod_base = OTHER; note = 2'-deoxy-2'-fluorocytidine-3'-phosphate
  modified_base 10: mod_base = OTHER; note = 2'-deoxy-2'-fluoroadenosine-3'-phosphate
  modified_base 11: mod_base = OTHER; note = 2'-deoxy-2'-fluoroguanosine-3'-phosphate
  modified_base 12: mod_base = OTHER; note = 2'-O-methylguanosine-3'-phosphate
  modified_base 13: mod_base = OTHER; note = 2'-O-methyladenosine-3'-phosphate
  modified_base 14: mod_base = OTHER; note = 2'-O-methyluridine-3'-phosphate
  modified_base 15: mod_base = OTHER; note = 2'-O-methylguanosine-3'-phosphate
  modified_base 16: mod_base = OTHER; note = 2'-O-methyladenosine-3'-phosphate
  modified_base 17: mod_base = OTHER; note = 2'-O-methyladenosine-3'-phosphate
  modified_base 18: mod_base = OTHER; note = 2'-O-methyladenosine-3'-phosphate
  modified_base 19: mod_base = OTHER; note = 2'-O-methyladenosine-3'-phosphate
  modified_base 20: mod_base = OTHER; note = 2'-O-methyladenosine-3'-phosphate
  modified_base 21: mod_base = OTHER; note = 2'-O-methyluridine-3'-phosphate ((2S,4R)-1-[29-[[2-(acetylamino)-2-deoxy-beta-D-galactopyra nosyl]oxy]-14,14-bis[[3-[[3-[[5-[[2-(acetylamino)-2-deoxy-b eta-D-galactopyranosyl]oxy]-1-oxopentyl]amino]propyl]amino] -3-oxopropoxy]methyl]-1,12,19,25-tetraoxo-16-oxa-13,20,24-t riazanonacos-1-yl]-4-hydroxy-2-pyrrolidinyl)methyl ester
ccacaactcaggatgaaaaat

SEQ ID NO: 2723 - RNA, 23 nt, synthetic construct
  source 1..23: mol_type = other RNA
  modified_base 1: mod_base = OTHER; note = 2'-O-methyladenosine-3'-phosphorothioate
  modified_base 2: mod_base = OTHER; note = 2'-deoxy-2'-fluorouridine-3'-phosphorothioate
  modified_base 3: mod_base = OTHER; note = 2'-O-methyluridine-3'-phosphate
  modified_base 4: mod_base = OTHER; note = 2'-O-methyluridine-3'-phosphate
  modified_base 5: mod_base = OTHER; note = 2'-O-methyluridine-3'-phosphate
  modified_base 6: mod_base = OTHER; note = 2'-deoxy-2'-fluorouridine-3'-phosphate
  modified_base 7: mod_base = OTHER; note = 2'-O-methylcytidine-3'-phosphate
  modified_base 8: mod_base = OTHER; note = 2'-deoxy-2'-fluoroadenosine-3'-phosphate
  modified_base 9: mod_base = OTHER; note = 2'-deoxy-2'-fluorouridine-3'-phosphate
  modified_base 10: mod_base = OTHER; note = 2'-O-methylcytidine-3'-phosphate
  modified_base 11: mod_base = OTHER; note = 2'-O-methylcytidine-3'-phosphate
  modified_base 12: mod_base = OTHER; note = 2'-O-methyluridine-3'-phosphate
  modified_base 13: mod_base = OTHER; note = 2'-O-methylguanosine-3'-phosphate
  modified_base 14: mod_base = OTHER; note = 2'-deoxy-2'-fluoroadenosine-3'-phosphate
  modified_base 15: mod_base = OTHER; note = 2'-O-methylguanosine-3'-phosphate
  modified_base 16: mod_base = OTHER; note = 2'-deoxy-2'-fluorouridine-3'-phosphate
  modified_base 17: mod_base = OTHER; note = 2'-O-methyluridine-3'-phosphate
  modified_base 18: mod_base = OTHER; note = 2'-O-methylguanosine-3'-phosphate
  modified_base 19: mod_base = OTHER; note = 2'-O-methyluridine-3'-phosphate
  modified_base 20: mod_base = OTHER; note = 2'-O-methylguanosine-3'-phosphate
  modified_base 21: mod_base = OTHER; note = 2'-O-methylguanosine-3'-phosphorothioate
  modified_base 22: mod_base = OTHER; note = 2'-O-methylcytidine-3'-phosphorothioate
  modified_base 23: mod_base = OTHER; note = 2'-O-methylguanosine
atttttcatcctgagttgtggcg

SEQ ID NO: 2724 - RNA, 21 nt, synthetic construct
  source 1..21: mol_type = other RNA
  modified_base 1: mod_base = OTHER; note = 2'-O-methylcytidine-3'-phosphorothioate
  modified_base 2: mod_base = OTHER; note = 2'-O-methyladenosine-3'-phosphorothioate
  modified_base 3: mod_base = OTHER; note = 2'-O-methylcytidine-3'-phosphate
  modified_base 4: mod_base = OTHER; note = 2'-O-methyladenosine-3'-phosphate
  modified_base 5: mod_base = OTHER; note = 2'-O-methyladenosine-3'-phosphate
  modified_base 6: mod_base = OTHER; note = 2'-O-methylcytidine-3'-phosphate
  modified_base 7: mod_base = OTHER; note = 2'-deoxy-2'-fluorouridine-3'-phosphate
  modified_base 8: mod_base = OTHER; note = 2'-O-methylcytidine-3'-phosphate
  modified_base 9: mod_base = OTHER; note = 2'-deoxy-2'-fluoroadenosine-3'-phosphate
  modified_base 10: mod_base = OTHER; note = 2'-deoxy-2'-fluoroguanosine-3'-phosphate
  modified_base 11: mod_base = OTHER; note = 2'-deoxy-2'-fluoroguanosine-3'-phosphate
  modified_base 12: mod_base = OTHER; note = 2'-O-methyladenosine-3'-phosphate
  modified_base 13: mod_base = OTHER; note = 2'-O-methyluridine-3'-phosphate
  modified_base 14: mod_base = OTHER; note = 2'-O-methylguanosine-3'-phosphate
  modified_base 15: mod_base = OTHER; note = 2'-O-methyladenosine-3'-phosphate
  modified_base 16: mod_base = OTHER; note = 2'-O-methyladenosine-3'-phosphate
  modified_base 17: mod_base = OTHER; note = 2'-O-methyladenosine-3'-phosphate
  modified_base 18: mod_base = OTHER; note = 2'-O-methyladenosine-3'-phosphate
  modified_base 19: mod_base = OTHER; note = 2'-O-methyladenosine-3'-phosphate
  modified_base 20: mod_base = OTHER; note = 2'-O-methyluridine-3'-phosphate
  modified_base 21: mod_base = OTHER; note = 2'-O-methyluridine-3'-phosphate ((2S,4R)-1-[29-[[2-(acetylamino)-2-deoxy-beta-D-galactopyra nosyl]oxy]-14,14-bis[[3-[[3-[[5-[[2-(acetylamino)-2-deoxy-b eta-D-galactopyranosyl]oxy]-1-oxopentyl]amino]propyl]amino] -3-oxopropoxy]methyl]-1,12,19,25-tetraoxo-16-oxa-13,20,24-t riazanonacos-1-yl]-4-hydroxy-2-pyrrolidinyl)methyl ester
cacaactcaggatgaaaaatt

SEQ ID NO: 2725 - RNA, 23 nt, synthetic construct
  source 1..23: mol_type = other RNA
  modified_base 1: mod_base = OTHER; note = 2'-O-methyladenosine-3'-phosphorothioate
  modified_base 2: mod_base = OTHER; note = 2'-deoxy-2'-fluoroadenosine-3'-phosphorothioate
  modified_base 3: mod_base = OTHER; note = 2'-O-methyluridine-3'-phosphate
  modified_base 4: mod_base = OTHER; note = 2'-O-methyluridine-3'-phosphate
  modified_base 5: mod_base = OTHER; note = 2'-O-methyluridine-3'-phosphate
  modified_base 6: mod_base = OTHER; note = 2'-deoxy-2'-fluorouridine-3'-phosphate
  modified_base 7: mod_base = OTHER; note = 2'-O-methyluridine-3'-phosphate
  modified_base 8: mod_base = OTHER; note = 2'-deoxy-2'-fluorocytidine-3'-phosphate
  modified_base 9: mod_base = OTHER; note = 2'-deoxy-2'-fluoroadenosine-3'-phosphate
  modified_base 10: mod_base = OTHER; note = 2'-O-methyluridine-3'-phosphate
  modified_base 11: mod_base = OTHER; note = 2'-O-methylcytidine-3'-phosphate
  modified_base 12: mod_base = OTHER; note = 2'-O-methylcytidine-3'-phosphate
  modified_base 13: mod_base = OTHER; note = 2'-O-methyluridine-3'-phosphate
  modified_base 14: mod_base = OTHER; note = 2'-deoxy-2'-fluoroguanosine-3'-phosphate
  modified_base 15: mod_base = OTHER; note = 2'-O-methyladenosine-3'-phosphate
  modified_base 16: mod_base = OTHER; note = 2'-deoxy-2'-fluoroguanosine-3'-phosphate
  modified_base 17: mod_base = OTHER; note = 2'-O-methyluridine-3'-phosphate
  modified_base 18: mod_base = OTHER; note = 2'-O-methyluridine-3'-phosphate
  modified_base 19: mod_base = OTHER; note = 2'-O-methylguanosine-3'-phosphate
  modified_base 20: mod_base = OTHER; note = 2'-O-methyluridine-3'-phosphate
  modified_base 21: mod_base = OTHER; note = 2'-O-methylguanosine-3'-phosphorothioate
  modified_base 22: mod_base = OTHER; note = 2'-O-methylguanosine-3'-phosphorothioate
  modified_base 23: mod_base = OTHER; note = 2'-O-methylcytidine
aatttttcatcctgagttgtggc

SEQ ID NO: 2726 - RNA, 21 nt, synthetic construct
  source 1..21: mol_type = other RNA
  modified_base 1: mod_base = OTHER; note = 2'-O-methylguanosine-3'-phosphorothioate
  modified_base 2: mod_base = OTHER; note = 2'-O-methylcytidine-3'-phosphorothioate
  modified_base 3: mod_base = OTHER; note = 2'-O-methylcytidine-3'-phosphate
  modified_base 4: mod_base = OTHER; note = 2'-O-methylguanosine-3'-phosphate
  modified_base 5: mod_base = OTHER; note = 2'-O-methylcytidine-3'-phosphate
  modified_base 6: mod_base = OTHER; note = 2'-O-methylcytidine-3'-phosphate
  modified_base 7: mod_base = OTHER; note = 2'-deoxy-2'-fluoroadenosine-3'-phosphate
  modified_base 8: mod_base = OTHER; note = 2'-O-methylcytidine-3'-phosphate
  modified_base 9: mod_base = OTHER; note = 2'-deoxy-2'-fluoroadenosine-3'-phosphate
  modified_base 10: mod_base = OTHER; note = 2'-deoxy-2'-fluoroadenosine-3'-phosphate
  modified_base 11: mod_base = OTHER; note = 2'-deoxy-2'-fluorocytidine-3'-phosphate
  modified_base 12: mod_base = OTHER; note = 2'-O-methyluridine-3'-phosphate
  modified_base 13: mod_base = OTHER; note = 2'-O-methylcytidine-3'-phosphate
  modified_base 14: mod_base = OTHER; note = 2'-O-methyladenosine-3'-phosphate
  modified_base 15: mod_base = OTHER; note = 2'-O-methylguanosine-3'-phosphate
  modified_base 16: mod_base = OTHER; note = 2'-O-methylguanosine-3'-phosphate
  modified_base 17: mod_base = OTHER; note = 2'-O-methyladenosine-3'-phosphate
  modified_base 18: mod_base = OTHER; note = 2'-O-methyluridine-3'-phosphate
  modified_base 19: mod_base = OTHER; note = 2'-O-methylguanosine-3'-phosphate
  modified_base 20: mod_base = OTHER; note = 2'-O-methyladenosine-3'-phosphate
  modified_base 21: mod_base = OTHER; note = 2'-O-methyladenosine-3'-phosphate ((2S,4R)-1-[29-[[2-(acetylamino)-2-deoxy-beta-D-galactopyra nosyl]oxy]-14,14-bis[[3-[[3-[[5-[[2-(acetylamino)-2-deoxy-b eta-D-galactopyranosyl]oxy]-1-oxopentyl]amino]propyl]amino] -3-oxopropoxy]methyl]-1,12,19,25-tetraoxo-16-oxa-13,20,24-t riazanonacos-1-yl]-4-hydroxy-2-pyrrolidinyl)methyl ester
gccgccacaactcaggatgaa

SEQ ID NO: 2727 - RNA, 23 nt, synthetic construct
  source 1..23: mol_type = other RNA
  modified_base 1: mod_base = OTHER; note = 2'-O-methyluridine-3'-phosphorothioate
  modified_base 2: mod_base = OTHER; note = 2'-deoxy-2'-fluorouridine-3'-phosphorothioate
  modified_base 3: mod_base = OTHER; note = 2'-O-methylcytidine-3'-phosphate
  modified_base 4: mod_base = OTHER; note = 2'-O-methyladenosine-3'-phosphate
  modified_base 5: mod_base = OTHER; note = 2'-O-methyluridine-3'-phosphate
  modified_base 6: mod_base = OTHER; note = 2'-deoxy-2'-fluorocytidine-3'-phosphate
  modified_base 7: mod_base = OTHER; note = 2'-O-methylcytidine-3'-phosphate
  modified_base 8: mod_base = OTHER; note = 2'-deoxy-2'-fluorouridine-3'-phosphate
  modified_base 9: mod_base = OTHER; note = 2'-deoxy-2'-fluoroguanosine-3'-phosphate
  modified_base 10: mod_base = OTHER; note = 2'-O-methyladenosine-3'-phosphate
  modified_base 11: mod_base = OTHER; note = 2'-O-methylguanosine-3'-phosphate
  modified_base 12: mod_base = OTHER; note = 2'-O-methyluridine-3'-phosphate
  modified_base 13: mod_base = OTHER; note = 2'-O-methyluridine-3'-phosphate
  modified_base 14: mod_base = OTHER; note = 2'-deoxy-2'-fluoroguanosine-3'-phosphate
  modified_base 15: mod_base = OTHER; note = 2'-O-methyluridine-3'-phosphate
  modified_base 16: mod_base = OTHER; note = 2'-deoxy-2'-fluoroguanosine-3'-phosphate
  modified_base 17: mod_base = OTHER; note = 2'-O-methylguanosine-3'-phosphate
  modified_base 18: mod_base = OTHER; note = 2'-O-methylcytidine-3'-phosphate
  modified_base 19: mod_base = OTHER; note = 2'-O-methylguanosine-3'-phosphate
  modified_base 20: mod_base = OTHER; note = 2'-O-methylguanosine-3'-phosphate
  modified_base 21: mod_base = OTHER; note = 2'-O-methylcytidine-3'-phosphorothioate
  modified_base 22: mod_base = OTHER; note = 2'-O-methyladenosine-3'-phosphorothioate
  modified_base 23: mod_base = OTHER; note = 2'-O-methylguanosine
ttcatcctgagttgtggcggcag

SEQ ID NO: 2728 - RNA, 21 nt, synthetic construct
  source 1..21: mol_type = other RNA
  modified_base 1: mod_base = OTHER; note = 2'-O-methyluridine-3'-phosphorothioate
  modified_base 2: mod_base = OTHER; note = 2'-O-methylguanosine-3'-phosphorothioate
  modified_base 3: mod_base = OTHER; note = 2'-O-methylcytidine-3'-phosphate
  modified_base 4: mod_base = OTHER; note = 2'-O-methylcytidine-3'-phosphate
  modified_base 5: mod_base = OTHER; note = 2'-O-methylguanosine-3'-phosphate
  modified_base 6: mod_base = OTHER; note = 2'-O-methylcytidine-3'-phosphate
  modified_base 7: mod_base = OTHER; note = 2'-deoxy-2'-fluorocytidine-3'-phosphate
  modified_base 8: mod_base = OTHER; note = 2'-O-methyladenosine-3'-phosphate
  modified_base 9: mod_base = OTHER; note = 2'-deoxy-2'-fluorocytidine-3'-phosphate
  modified_base 10: mod_base = OTHER; note = 2'-deoxy-2'-fluoroadenosine-3'-phosphate
  modified_base 11: mod_base = OTHER; note = 2'-deoxy-2'-fluoroadenosine-3'-phosphate
  modified_base 12: mod_base = OTHER; note = 2'-O-methylcytidine-3'-phosphate
  modified_base 13: mod_base = OTHER; note = 2'-O-methyluridine-3'-phosphate
  modified_base 14: mod_base = OTHER; note = 2'-O-methylcytidine-3'-phosphate
  modified_base 15: mod_base = OTHER; note = 2'-O-methyladenosine-3'-phosphate
  modified_base 16: mod_base = OTHER; note = 2'-O-methylguanosine-3'-phosphate
  modified_base 17: mod_base = OTHER; note = 2'-O-methylguanosine-3'-phosphate
  modified_base 18: mod_base = OTHER; note = 2'-O-methyladenosine-3'-phosphate
  modified_base 19: mod_base = OTHER; note = 2'-O-methyluridine-3'-phosphate
  modified_base 20: mod_base = OTHER; note = 2'-O-methylguanosine-3'-phosphate
  modified_base 21: mod_base = OTHER; note = 2'-O-methyladenosine-3'-phosphate ((2S,4R)-1-[29-[[2-(acetylamino)-2-deoxy-beta-D-galactopyra nosyl]oxy]-14,14-bis[[3-[[3-[[5-[[2-(acetylamino)-2-deoxy-b eta-D-galactopyranosyl]oxy]-1-oxopentyl]amino]propyl]amino] -3-oxopropoxy]methyl]-1,12,19,25-tetraoxo-16-oxa-13,20,24-t riazanonacos-1-yl]-4-hydroxy-2-pyrrolidinyl)methyl ester
tgccgccacaactcaggatga

SEQ ID NO: 2729 - RNA, 23 nt, synthetic construct
  source 1..23: mol_type = other RNA
  modified_base 1: mod_base = OTHER; note = 2'-O-methyluridine-3'-phosphorothioate
  modified_base 2: mod_base = OTHER; note = 2'-deoxy-2'-fluorocytidine-3'-phosphorothioate
  modified_base 3: mod_base = OTHER; note = 2'-O-methyladenosine-3'-phosphate
  modified_base 4: mod_base = OTHER; note = 2'-O-methyluridine-3'-phosphate
  modified_base 5: mod_base = OTHER; note = 2'-O-methylcytidine-3'-phosphate
  modified_base 6: mod_base = OTHER; note = 2'-deoxy-2'-fluorocytidine-3'-phosphate
  modified_base 7: mod_base = OTHER; note = 2'-O-methyluridine-3'-phosphate
  modified_base 8: mod_base = OTHER; note = 2'-deoxy-2'-fluoroguanosine-3'-phosphate
  modified_base 9: mod_base = OTHER; note = 2'-deoxy-2'-fluoroadenosine-3'-phosphate
  modified_base 10: mod_base = OTHER; note = 2'-O-methylguanosine-3'-phosphate
  modified_base 11: mod_base = OTHER; note = 2'-O-methyluridine-3'-phosphate
  modified_base 12: mod_base = OTHER; note = 2'-O-methyluridine-3'-phosphate
  modified_base 13: mod_base = OTHER; note = 2'-O-methylguanosine-3'-phosphate
  modified_base 14: mod_base = OTHER; note = 2'-deoxy-2'-fluorouridine-3'-phosphate
  modified_base 15: mod_base = OTHER; note = 2'-O-methylguanosine-3'-phosphate
  modified_base 16: mod_base = OTHER; note = 2'-deoxy-2'-fluoroguanosine-3'-phosphate
  modified_base 17: mod_base = OTHER; note = 2'-O-methylcytidine-3'-phosphate
  modified_base 18: mod_base = OTHER; note = 2'-O-methylguanosine-3'-phosphate
  modified_base 19: mod_base = OTHER; note = 2'-O-methylguanosine-3'-phosphate
  modified_base 20: mod_base = OTHER; note = 2'-O-methylcytidine-3'-phosphate
  modified_base 21: mod_base = OTHER; note = 2'-O-methyladenosine-3'-phosphorothioate
  modified_base 22: mod_base = OTHER; note = 2'-O-methylguanosine-3'-phosphorothioate
  modified_base 23: mod_base = OTHER; note = 2'-O-methyluridine
tcatcctgagttgtggcggcagt

SEQ ID NO: 2730 - RNA, 21 nt, synthetic construct
  source 1..21: mol_type = other RNA
  modified_base 1: mod_base = OTHER; note = 2'-O-methylguanosine-3'-phosphorothioate
  modified_base 2: mod_base = OTHER; note = 2'-O-methylcytidine-3'-phosphorothioate
  modified_base 3: mod_base = OTHER; note = 2'-O-methyladenosine-3'-phosphate
  modified_base 4: mod_base = OTHER; note = 2'-O-methyladenosine-3'-phosphate
  modified_base 5: mod_base = OTHER; note = 2'-O-methylcytidine-3'-phosphate
  modified_base 6: mod_base = OTHER; note = 2'-O-methylcytidine-3'-phosphate
  modified_base 7: mod_base = OTHER; note = 2'-deoxy-2'-fluoroguanosine-3'-phosphate
  modified_base 8: mod_base = OTHER; note = 2'-O-methyluridine-3'-phosphate
  modified_base 9: mod_base = OTHER; note = 2'-deoxy-2'-fluorocytidine-3'-phosphate
  modified_base 10: mod_base = OTHER; note = 2'-deoxy-2'-fluorouridine-3'-phosphate
  modified_base 11: mod_base = OTHER; note = 2'-deoxy-2'-fluoroguanosine-3'-phosphate
  modified_base 12: mod_base = OTHER; note = 2'-O-methylguanosine-3'-phosphate
  modified_base 13: mod_base = OTHER; note = 2'-O-methyladenosine-3'-phosphate
  modified_base 14: mod_base = OTHER; note = 2'-O-methyluridine-3'-phosphate
  modified_base 15: mod_base = OTHER; note = 2'-O-methylguanosine-3'-phosphate
  modified_base 16: mod_base = OTHER; note = 2'-O-methyladenosine-3'-phosphate
  modified_base 17: mod_base = OTHER; note = 2'-O-methyluridine-3'-phosphate
  modified_base 18: mod_base = OTHER; note = 2'-O-methylguanosine-3'-phosphate
  modified_base 19: mod_base = OTHER; note = 2'-O-methyluridine-3'-phosphate
  modified_base 20: mod_base = OTHER; note = 2'-O-methylguanosine-3'-phosphate
  modified_base 21: mod_base = OTHER; note = 2'-O-methylcytidine-3'-phosphate ((2S,4R)-1-[29-[[2-(acetylamino)-2-deoxy-beta-D-galactopyra nosyl]oxy]-14,14-bis[[3-[[3-[[5-[[2-(acetylamino)-2-deoxy-b eta-D-galactopyranosyl]oxy]-1-oxopentyl]amino]propyl]amino] -3-oxopropoxy]methyl]-1,12,19,25-tetraoxo-16-oxa-13,20,24-t riazanonacos-1-yl]-4-hydroxy-2-pyrrolidinyl)methyl ester
gcaaccgtctggatgatgtgc

SEQ ID NO: 2731 - RNA, 23 nt, synthetic construct
  source 1..23: mol_type = other RNA
  modified_base 1: mod_base = OTHER; note = 2'-O-methylguanosine-3'-phosphorothioate
  modified_base 2: mod_base = OTHER; note = 2'-deoxy-2'-fluorocytidine-3'-phosphorothioate
  modified_base 3: mod_base = OTHER; note = 2'-O-methyladenosine-3'-phosphate
  modified_base 4: mod_base = OTHER; note = 2'-O-methylcytidine-3'-phosphate
  modified_base 5: mod_base = OTHER; note = 2'-O-methyladenosine-3'-phosphate
  modified_base 6: mod_base = OTHER; note = 2'-deoxy-2'-fluorouridine-3'-phosphate
  modified_base 7: mod_base = OTHER; note = 2'-O-methylcytidine-3'-phosphate
  modified_base 8: mod_base = OTHER; note = 2'-deoxy-2'-fluoroadenosine-3'-phosphate
  modified_base 9: mod_base = OTHER; note = 2'-deoxy-2'-fluorouridine-3'-phosphate
  modified_base 10: mod_base = OTHER; note = 2'-O-methylcytidine-3'-phosphate
  modified_base 11: mod_base = OTHER; note = 2'-O-methylcytidine-3'-phosphate
  modified_base 12: mod_base = OTHER; note = 2'-O-methyladenosine-3'-phosphate
  modified_base 13: mod_base = OTHER; note = 2'-O-methylguanosine-3'-phosphate
  modified_base 14: mod_base = OTHER; note = 2'-deoxy-2'-fluoroadenosine-3'-phosphate
  modified_base 15: mod_base = OTHER; note = 2'-O-methylcytidine-3'-phosphate
  modified_base 16: mod_base = OTHER; note = 2'-deoxy-2'-fluoroguanosine-3'-phosphate
  modified_base 17: mod_base = OTHER; note = 2'-O-methylguanosine-3'-phosphate
  modified_base 18: mod_base = OTHER; note = 2'-O-methyluridine-3'-phosphate
  modified_base 19: mod_base = OTHER; note = 2'-O-methyluridine-3'-phosphate
  modified_base 20: mod_base = OTHER; note = 2'-O-methylguanosine-3'-phosphate
  modified_base 21: mod_base = OTHER; note = 2'-O-methylcytidine-3'-phosphorothioate
  modified_base 22: mod_base = OTHER; note = 2'-O-methylcytidine-3'-phosphorothioate
  modified_base 23: mod_base = OTHER; note = 2'-O-methylcytidine
gcacatcatccagacggttgccc

SEQ ID NO: 2732 - RNA, 21 nt, synthetic construct
  source 1..21: mol_type = other RNA
  modified_base 1: mod_base = OTHER; note = 2'-O-methylcytidine-3'-phosphorothioate
  modified_base 2: mod_base = OTHER; note = 2'-O-methyladenosine-3'-phosphorothioate
  modified_base 3: mod_base = OTHER; note = 2'-O-methyladenosine-3'-phosphate
  modified_base 4: mod_base = OTHER; note = 2'-O-methylcytidine-3'-phosphate
  modified_base 5: mod_base = OTHER; note = 2'-O-methylcytidine-3'-phosphate
  modified_base 6: mod_base = OTHER; note = 2'-O-methylguanosine-3'-phosphate
  modified_base 7: mod_base = OTHER; note = 2'-deoxy-2'-fluorouridine-3'-phosphate
  modified_base 8: mod_base = OTHER; note = 2'-O-methylcytidine-3'-phosphate
  modified_base 9: mod_base = OTHER; note = 2'-deoxy-2'-fluorouridine-3'-phosphate
  modified_base 10: mod_base = OTHER; note = 2'-deoxy-2'-fluoroguanosine-3'-phosphate
  modified_base 11: mod_base = OTHER; note = 2'-deoxy-2'-fluoroguanosine-3'-phosphate
  modified_base 12: mod_base = OTHER; note = 2'-O-methyladenosine-3'-phosphate
  modified_base 13: mod_base = OTHER; note = 2'-O-methyluridine-3'-phosphate
  modified_base 14: mod_base = OTHER; note = 2'-O-methylguanosine-3'-phosphate
  modified_base 15: mod_base = OTHER; note = 2'-O-methyladenosine-3'-phosphate
  modified_base 16: mod_base = OTHER; note = 2'-O-methyluridine-3'-phosphate
  modified_base 17: mod_base = OTHER; note = 2'-O-methylguanosine-3'-phosphate
  modified_base 18: mod_base = OTHER; note = 2'-O-methyluridine-3'-phosphate
  modified_base 19: mod_base = OTHER; note = 2'-O-methylguanosine-3'-phosphate
  modified_base 20: mod_base = OTHER; note = 2'-O-methylcytidine-3'-phosphate
  modified_base 21: mod_base = OTHER; note = 2'-O-methylguanosine-3'-phosphate ((2S,4R)-1-[29-[[2-(acetylamino)-2-deoxy-beta-D-galactopyra nosyl]oxy]-14,14-bis[[3-[[3-[[5-[[2-(acetylamino)-2-deoxy-b eta-D-galactopyranosyl]oxy]-1-oxopentyl]amino]propyl]amino] -3-oxopropoxy]methyl]-1,12,19,25-tetraoxo-16-oxa-13,20,24-t riazanonacos-1-yl]-4-hydroxy-2-pyrrolidinyl)methyl ester
caaccgtctggatgatgtgcg

SEQ ID NO: 2733 - RNA, 23 nt, synthetic construct
  source 1..23: mol_type = other RNA
  modified_base 1: mod_base = OTHER; note = 2'-O-methylcytidine-3'-phosphorothioate
  modified_base 2: mod_base = OTHER; note = 2'-deoxy-2'-fluoroguanosine-3'-phosphorothioate
  modified_base 3: mod_base = OTHER; note = 2'-O-methylcytidine-3'-phosphate
  modified_base 4: mod_base = OTHER; note = 2'-O-methyladenosine-3'-phosphate
  modified_base 5: mod_base = OTHER; note = 2'-O-methylcytidine-3'-phosphate
  modified_base 6: mod_base = OTHER; note = 2'-deoxy-2'-fluoroadenosine-3'-phosphate
  modified_base 7: mod_base = OTHER; note = 2'-O-methyluridine-3'-phosphate
  modified_base 8: mod_base = OTHER; note = 2'-deoxy-2'-fluorocytidine-3'-phosphate
  modified_base 9: mod_base = OTHER; note = 2'-deoxy-2'-fluoroadenosine-3'-phosphate
  modified_base 10: mod_base = OTHER; note = 2'-O-methyluridine-3'-phosphate
  modified_base 11: mod_base = OTHER; note = 2'-O-methylcytidine-3'-phosphate
  modified_base 12: mod_base = OTHER; note = 2'-O-methylcytidine-3'-phosphate
  modified_base 13: mod_base = OTHER; note = 2'-O-methyladenosine-3'-phosphate
  modified_base 14: mod_base = OTHER; note = 2'-deoxy-2'-fluoroguanosine-3'-phosphate
  modified_base 15: mod_base = OTHER; note = 2'-O-methyladenosine-3'-phosphate
  modified_base 16: mod_base = OTHER; note = 2'-deoxy-2'-fluorocytidine-3'-phosphate
  modified_base 17: mod_base = OTHER; note = 2'-O-methylguanosine-3'-phosphate
  modified_base 18: mod_base = OTHER; note = 2'-O-methylguanosine-3'-phosphate
  modified_base 19: mod_base = OTHER; note = 2'-O-methyluridine-3'-phosphate
  modified_base 20: mod_base = OTHER; note = 2'-O-methyluridine-3'-phosphate
  modified_base 21: mod_base = OTHER; note = 2'-O-methylguanosine-3'-phosphorothioate
  modified_base 22: mod_base = OTHER; note = 2'-O-methylcytidine-3'-phosphorothioate
  modified_base 23: mod_base = OTHER; note = 2'-O-methylcytidine
cgcacatcatccagacggttgcc

SEQ ID NO: 2734 - RNA, 21 nt, synthetic construct
  source 1..21: mol_type = other RNA
  modified_base 1: mod_base = OTHER; note = 2'-O-methylcytidine-3'-phosphorothioate
  modified_base 2: mod_base = OTHER; note = 2'-O-methyluridine-3'-phosphorothioate
  modified_base 3: mod_base = OTHER; note = 2'-O-methylguanosine-3'-phosphate
  modified_base 4: mod_base = OTHER; note = 2'-O-methylguanosine-3'-phosphate
  modified_base 5: mod_base = OTHER; note = 2'-O-methylguanosine-3'-phosphate
  modified_base 6: mod_base = OTHER; note = 2'-O-methylcytidine-3'-phosphate
  modified_base 7: mod_base = OTHER; note = 2'-deoxy-2'-fluoroadenosine-3'-phosphate
  modified_base 8: mod_base = OTHER; note = 2'-O-methyladenosine-3'-phosphate
  modified_base 9: mod_base = OTHER; note = 2'-deoxy-2'-fluorocytidine-3'-phosphate
  modified_base 10: mod_base = OTHER; note = 2'-deoxy-2'-fluorocytidine-3'-phosphate
  modified_base 11: mod_base = OTHER; note = 2'-deoxy-2'-fluoroguanosine-3'-phosphate
  modified_base 12: mod_base = OTHER; note = 2'-O-methyluridine-3'-phosphate
  modified_base 13: mod_base = OTHER; note = 2'-O-methylcytidine-3'-phosphate
  modified_base 14: mod_base = OTHER; note = 2'-O-methyluridine-3'-phosphate
  modified_base 15: mod_base = OTHER; note = 2'-O-methylguanosine-3'-phosphate
  modified_base 16: mod_base = OTHER; note = 2'-O-methylguanosine-3'-phosphate
  modified_base 17: mod_base = OTHER; note = 2'-O-methyladenosine-3'-phosphate
  modified_base 18: mod_base = OTHER; note = 2'-O-methyluridine-3'-phosphate
  modified_base 19: mod_base = OTHER; note = 2'-O-methylguanosine-3'-phosphate
  modified_base 20: mod_base = OTHER; note = 2'-O-methyladenosine-3'-phosphate
  modified_base 21: mod_base = OTHER; note = 2'-O-methyluridine-3'-phosphate ((2S,4R)-1-[29-[[2-(acetylamino)-2-deoxy-beta-D-galactopyra nosyl]oxy]-14,14-bis[[3-[[3-[[5-[[2-(acetylamino)-2-deoxy-b eta-D-galactopyranosyl]oxy]-1-oxopentyl]amino]propyl]amino] -3-oxopropoxy]methyl]-1,12,19,25-tetraoxo-16-oxa-13,20,24-t riazanonacos-1-yl]-4-hydroxy-2-pyrrolidinyl)methyl ester
ctgggcaaccgtctggatgat

SEQ ID NO: 2735 - RNA, 23 nt, synthetic construct
  source 1..23: mol_type = other RNA
  modified_base 1: mod_base = OTHER; note = 2'-O-methyladenosine-3'-phosphorothioate
  modified_base 2: mod_base = OTHER; note = 2'-deoxy-2'-fluorouridine-3'-phosphorothioate
  modified_base 3: mod_base = OTHER; note = 2'-O-methylcytidine-3'-phosphate
  modified_base 4: mod_base = OTHER; note = 2'-O-methyladenosine-3'-phosphate
  modified_base 5: mod_base = OTHER; note = 2'-O-methyluridine-3'-phosphate
  modified_base 6: mod_base = OTHER; note = 2'-deoxy-2'-fluorocytidine-3'-phosphate
  modified_base 7: mod_base = OTHER; note = 2'-O-methylcytidine-3'-phosphate
  modified_base 8: mod_base = OTHER; note = 2'-deoxy-2'-fluoroadenosine-3'-phosphate
  modified_base 9: mod_base = OTHER; note = 2'-deoxy-2'-fluoroguanosine-3'-phosphate
  modified_base 10: mod_base = OTHER; note = 2'-O-methyladenosine-3'-phosphate
  modified_base 11: mod_base = OTHER; note = 2'-O-methylcytidine-3'-phosphate
  modified_base 12: mod_base = OTHER; note = 2'-O-methylguanosine-3'-phosphate
  modified_base 13: mod_base = OTHER; note = 2'-O-methylguanosine-3'-phosphate
  modified_base 14: mod_base = OTHER; note = 2'-deoxy-2'-fluorouridine-3'-phosphate
  modified_base 15: mod_base = OTHER; note = 2'-O-methyluridine-3'-phosphate
  modified_base 16: mod_base = OTHER; note = 2'-deoxy-2'-fluoroguanosine-3'-phosphate
  modified_base 17: mod_base = OTHER; note = 2'-O-methylcytidine-3'-phosphate
  modified_base 18: mod_base = OTHER; note = 2'-O-methylcytidine-3'-phosphate
  modified_base 19: mod_base = OTHER; note = 2'-O-methylcytidine-3'-phosphate
  modified_base 20: mod_base = OTHER; note = 2'-O-methyladenosine-3'-phosphate
  modified_base 21: mod_base = OTHER; note = 2'-O-methylguanosine-3'-phosphorothioate
  modified_base 22: mod_base = OTHER; note = 2'-O-methylguanosine-3'-phosphorothioate
  modified_base 23: mod_base = OTHER; note = 2'-O-methyluridine
atcatccagacggttgcccaggt

SEQ ID NO: 2736 - RNA, 21 nt, synthetic construct
  source 1..21: mol_type = other RNA
  modified_base 1: mod_base = OTHER; note = 2'-O-methylcytidine-3'-phosphorothioate
  modified_base 2: mod_base = OTHER; note = 2'-O-methylcytidine-3'-phosphorothioate
  modified_base 3: mod_base = OTHER; note = 2'-O-methyluridine-3'-phosphate
  modified_base 4: mod_base = OTHER; note = 2'-O-methylguanosine-3'-phosphate
  modified_base 5: mod_base = OTHER; note = 2'-O-methylguanosine-3'-phosphate
  modified_base 6: mod_base = OTHER; note = 2'-O-methylguanosine-3'-phosphate
  modified_base 7: mod_base = OTHER; note = 2'-deoxy-2'-fluorocytidine-3'-phosphate
  modified_base 8: mod_base = OTHER; note = 2'-O-methyladenosine-3'-phosphate
  modified_base 9: mod_base = OTHER; note = 2'-deoxy-2'-fluoroadenosine-3'-phosphate
  modified_base 10: mod_base = OTHER; note = 2'-deoxy-2'-fluorocytidine-3'-phosphate
  modified_base 11: mod_base = OTHER; note = 2'-deoxy-2'-fluorocytidine-3'-phosphate
  modified_base 12: mod_base = OTHER; note = 2'-O-methylguanosine-3'-phosphate
  modified_base 13: mod_base = OTHER; note = 2'-O-methyluridine-3'-phosphate
  modified_base 14: mod_base = OTHER; note = 2'-O-methylcytidine-3'-phosphate
  modified_base 15: mod_base = OTHER; note = 2'-O-methyluridine-3'-phosphate
  modified_base 16: mod_base = OTHER; note = 2'-O-methylguanosine-3'-phosphate
  modified_base 17: mod_base = OTHER; note = 2'-O-methylguanosine-3'-phosphate
  modified_base 18: mod_base = OTHER; note = 2'-O-methyladenosine-3'-phosphate
  modified_base 19: mod_base = OTHER; note = 2'-O-methyluridine-3'-phosphate
  modified_base 20: mod_base = OTHER; note = 2'-O-methylguanosine-3'-phosphate
  modified_base 21: mod_base = OTHER; note = 2'-O-methyladenosine-3'-phosphate ((2S,4R)-1-[29-[[2-(acetylamino)-2-deoxy-beta-D-galactopyra nosyl]oxy]-14,14-bis[[3-[[3-[[5-[[2-(acetylamino)-2-deoxy-b eta-D-galactopyranosyl]oxy]-1-oxopentyl]amino]propyl]amino] -3-oxopropoxy]methyl]-1,12,19,25-tetraoxo-16-oxa-13,20,24-t riazanonacos-1-yl]-4-hydroxy-2-pyrrolidinyl)methyl ester
cctgggcaaccgtctggatga

SEQ ID NO: 2737 - RNA, 23 nt, synthetic construct
  source 1..23: mol_type = other RNA
  modified_base 1: mod_base = OTHER; note = 2'-O-methyluridine-3'-phosphorothioate
  modified_base 2: mod_base = OTHER; note = 2'-deoxy-2'-fluorocytidine-3'-phosphorothioate
  modified_base 3: mod_base = OTHER; note = 2'-O-methyladenosine-3'-phosphate
  modified_base 4: mod_base = OTHER; note = 2'-O-methyluridine-3'-phosphate
  modified_base 5: mod_base = OTHER; note = 2'-O-methylcytidine-3'-phosphate
  modified_base 6: mod_base = OTHER; note = 2'-deoxy-2'-fluorocytidine-3'-phosphate
  modified_base 7: mod_base = OTHER; note = 2'-O-methyladenosine-3'-phosphate
  modified_base 8: mod_base = OTHER; note = 2'-deoxy-2'-fluoroguanosine-3'-phosphate
  modified_base 9: mod_base = OTHER; note = 2'-deoxy-2'-fluoroadenosine-3'-phosphate
  modified_base 10: mod_base = OTHER; note = 2'-O-methylcytidine-3'-phosphate
  modified_base 11: mod_base = OTHER; note = 2'-O-methylguanosine-3'-phosphate
  modified_base 12: mod_base = OTHER; note = 2'-O-methylguanosine-3'-phosphate
  modified_base 13: mod_base = OTHER; note = 2'-O-methyluridine-3'-phosphate
  modified_base 14: mod_base = OTHER; note = 2'-deoxy-2'-fluorouridine-3'-phosphate
  modified_base 15: mod_base = OTHER; note = 2'-O-methylguanosine-3'-phosphate
  modified_base 16: mod_base = OTHER; note = 2'-deoxy-2'-fluorocytidine-3'-phosphate
  modified_base 17: mod_base = OTHER; note = 2'-O-methylcytidine-3'-phosphate
  modified_base 18: mod_base = OTHER; note = 2'-O-methylcytidine-3'-phosphate
  modified_base 19: mod_base = OTHER; note = 2'-O-methyladenosine-3'-phosphate
  modified_base 20: mod_base = OTHER; note = 2'-O-methylguanosine-3'-phosphate
  modified_base 21: mod_base = OTHER; note = 2'-O-methylguanosine-3'-phosphorothioate
  modified_base 22: mod_base = OTHER; note = 2'-O-methyluridine-3'-phosphorothioate
  modified_base 23: mod_base = OTHER; note = 2'-O-methyladenosine
tcatccagacggttgcccaggta

SEQ ID NO: 2738 - RNA, 21 nt, synthetic construct
  source 1..21: mol_type = other RNA
  modified_base 1: mod_base = OTHER; note = 2'-O-methylguanosine-3'-phosphorothioate
  modified_base 2: mod_base = OTHER; note = 2'-O-methylcytidine-3'-phosphorothioate
  modified_base 3: mod_base = OTHER; note = 2'-O-methyladenosine-3'-phosphate
  modified_base 4: mod_base = OTHER; note = 2'-O-methyladenosine-3'-phosphate
  modified_base 5: mod_base = OTHER; note = 2'-O-methyladenosine-3'-phosphate
  modified_base 6: mod_base = OTHER; note = 2'-O-methyluridine-3'-phosphate
  modified_base 7: mod_base = OTHER; note = 2'-deoxy-2'-fluoroguanosine-3'-phosphate
  modified_base 8: mod_base = OTHER; note = 2'-O-methyladenosine-3'-phosphate
  modified_base 9: mod_base = OTHER; note = 2'-deoxy-2'-fluorouridine-3'-phosphate
  modified_base 10: mod_base = OTHER; note = 2'-deoxy-2'-fluoroguanosine-3'-phosphate
  modified_base 11: mod_base = OTHER; note = 2'-deoxy-2'-fluoroadenosine-3'-phosphate
  modified_base 12: mod_base = OTHER; note = 2'-O-methyladenosine-3'-phosphate
  modified_base 13: mod_base = OTHER; note = 2'-O-methylguanosine-3'-phosphate
  modified_base 14: mod_base = OTHER; note = 2'-O-methyladenosine-3'-phosphate
  modified_base 15: mod_base = OTHER; note = 2'-O-methyladenosine-3'-phosphate
  modified_base 16: mod_base = OTHER; note = 2'-O-methyladenosine-3'-phosphate
  modified_base 17: mod_base = OTHER; note = 2'-O-methylcytidine-3'-phosphate
  modified_base 18: mod_base = OTHER; note = 2'-O-methyluridine-3'-phosphate
  modified_base 19: mod_base = OTHER; note = 2'-O-methyluridine-3'-phosphate
  modified_base 20: mod_base = OTHER; note = 2'-O-methyluridine-3'-phosphate
  modified_base 21: mod_base = OTHER; note = 2'-O-methylguanosine-3'-phosphate ((2S,4R)-1-[29-[[2-(acetylamino)-2-deoxy-beta-D-galactopyra nosyl]oxy]-14,14-bis[[3-[[3-[[5-[[2-(acetylamino)-2-deoxy-b eta-D-galactopyranosyl]oxy]-1-oxopentyl]amino]propyl]amino] -3-oxopropoxy]methyl]-1,12,19,25-tetraoxo-16-oxa-13,20,24-t riazanonacos-1-yl]-4-hydroxy-2-pyrrolidinyl)methyl ester
gcaaatgatgaagaaactttg

SEQ ID NO: 2739 - RNA, 23 nt, synthetic construct
  source 1..23: mol_type = other RNA
  modified_base 1: mod_base = OTHER; note = 2'-O-methylcytidine-3'-phosphorothioate
  modified_base 2: mod_base = OTHER; note = 2'-deoxy-2'-fluoroadenosine-3'-phosphorothioate
  modified_base 3: mod_base = OTHER; note = 2'-O-methyladenosine-3'-phosphate
  modified_base 4: mod_base = OTHER; note = 2'-O-methyladenosine-3'-phosphate
  modified_base 5: mod_base = OTHER; note = 2'-O-methylguanosine-3'-phosphate
  modified_base 6: mod_base = OTHER; note = 2'-deoxy-2'-fluorouridine-3'-phosphate
  modified_base 7: mod_base = OTHER; note = 2'-O-methyluridine-3'-phosphate
  modified_base 8: mod_base = OTHER; note = 2'-deoxy-2'-fluorouridine-3'-phosphate
  modified_base 9: mod_base = OTHER; note = 2'-deoxy-2'-fluorocytidine-3'-phosphate
  modified_base 10: mod_base = OTHER; note = 2'-O-methyluridine-3'-phosphate
  modified_base 11: mod_base = OTHER; note = 2'-O-methyluridine-3'-phosphate
  modified_base 12: mod_base = OTHER; note = 2'-O-methylcytidine-3'-phosphate
  modified_base 13: mod_base = OTHER; note = 2'-O-methyladenosine-3'-phosphate
  modified_base 14: mod_base = OTHER; note = 2'-deoxy-2'-fluorouridine-3'-phosphate
  modified_base 15: mod_base = OTHER; note = 2'-O-methylcytidine-3'-phosphate
  modified_base 16: mod_base = OTHER; note = 2'-deoxy-2'-fluoroadenosine-3'-phosphate
  modified_base 17: mod_base = OTHER; note = 2'-O-methyluridine-3'-phosphate
  modified_base 18: mod_base = OTHER; note = 2'-O-methyluridine-3'-phosphate
  modified_base 19: mod_base = OTHER; note = 2'-O-methyluridine-3'-phosphate
  modified_base 20: mod_base = OTHER; note = 2'-O-methylguanosine-3'-phosphate
  modified_base 21: mod_base = OTHER; note = 2'-O-methylcytidine-3'-phosphorothioate
  modified_base 22: mod_base = OTHER; note = 2'-O-methylcytidine-3'-phosphorothioate
  modified_base 23: mod_base = OTHER; note = 2'-O-methylcytidine
caaagtttcttcatcatttgccc

SEQ ID NO: 2740 - RNA, 21 nt, synthetic construct
  source 1..21: mol_type = other RNA
  modified_base 1: mod_base = OTHER; note = 2'-O-methylcytidine-3'-phosphorothioate
  modified_base 2: mod_base = OTHER; note = 2'-O-methyladenosine-3'-phosphorothioate
  modified_base 3: mod_base = OTHER; note = 2'-O-methyladenosine-3'-phosphate
  modified_base 4: mod_base = OTHER; note = 2'-O-methyladenosine-3'-phosphate
  modified_base 5: mod_base = OTHER; note = 2'-O-methyluridine-3'-phosphate
  modified_base 6: mod_base = OTHER; note = 2'-O-methylguanosine-3'-phosphate
  modified_base 7: mod_base = OTHER; note = 2'-deoxy-2'-fluoroadenosine-3'-phosphate
  modified_base 8: mod_base = OTHER; note = 2'-O-methyluridine-3'-phosphate
  modified_base 9: mod_base = OTHER; note = 2'-deoxy-2'-fluoroguanosine-3'-phosphate
  modified_base 10: mod_base = OTHER; note = 2'-deoxy-2'-fluoroadenosine-3'-phosphate
  modified_base 11: mod_base = OTHER; note = 2'-deoxy-2'-fluoroadenosine-3'-phosphate
  modified_base 12: mod_base = OTHER; note = 2'-O-methylguanosine-3'-phosphate
  modified_base 13: mod_base = OTHER; note = 2'-O-methyladenosine-3'-phosphate
  modified_base 14: mod_base = OTHER; note = 2'-O-methyladenosine-3'-phosphate
  modified_base 15: mod_base = OTHER; note = 2'-O-methyladenosine-3'-phosphate
  modified_base 16: mod_base = OTHER; note = 2'-O-methylcytidine-3'-phosphate
  modified_base 17: mod_base = OTHER; note = 2'-O-methyluridine-3'-phosphate
  modified_base 18: mod_base = OTHER; note = 2'-O-methyluridine-3'-phosphate
  modified_base 19: mod_base = OTHER; note = 2'-O-methyluridine-3'-phosphate
  modified_base 20: mod_base = OTHER; note = 2'-O-methylguanosine-3'-phosphate
  modified_base 21: mod_base = OTHER; note = 2'-O-methylguanosine-3'-phosphate ((2S,4R)-1-[29-[[2-(acetylamino)-2-deoxy-beta-D-galactopyra nosyl]oxy]-14,14-bis[[3-[[3-[[5-[[2-(acetylamino)-2-deoxy-b eta-D-galactopyranosyl]oxy]-1-oxopentyl]amino]propyl]amino] -3-oxopropoxy]methyl]-1,12,19,25-tetraoxo-16-oxa-13,20,24-t riazanonacos-1-yl]-4-hydroxy-2-pyrrolidinyl)methyl ester
caaatgatgaagaaactttgg

SEQ ID NO: 2741 - RNA, 23 nt, synthetic construct
  source 1..23: mol_type = other RNA
  modified_base 1: mod_base = OTHER; note = 2'-O-methylcytidine-3'-phosphorothioate
  modified_base 2: mod_base = OTHER; note = 2'-deoxy-2'-fluorocytidine-3'-phosphorothioate
  modified_base 3: mod_base = OTHER; note = 2'-O-methyladenosine-3'-phosphate
  modified_base 4: mod_base = OTHER; note = 2'-O-methyladenosine-3'-phosphate
  modified_base 5: mod_base = OTHER; note = 2'-O-methyladenosine-3'-phosphate
  modified_base 6: mod_base = OTHER; note = 2'-deoxy-2'-fluoroguanosine-3'-phosphate
  modified_base 7: mod_base = OTHER; note = 2'-O-methyluridine-3'-phosphate
  modified_base 8: mod_base = OTHER; note = 2'-deoxy-2'-fluorouridine-3'-phosphate
  modified_base 9: mod_base = OTHER; note = 2'-deoxy-2'-fluorouridine-3'-phosphate
  modified_base 10: mod_base = OTHER; note = 2'-O-methylcytidine-3'-phosphate
  modified_base 11: mod_base = OTHER; note = 2'-O-methyluridine-3'-phosphate
  modified_base 12: mod_base = OTHER; note = 2'-O-methyluridine-3'-phosphate
  modified_base 13: mod_base = OTHER; note = 2'-O-methylcytidine-3'-phosphate
  modified_base 14: mod_base = OTHER; note = 2'-deoxy-2'-fluoroadenosine-3'-phosphate
  modified_base 15: mod_base = OTHER; note = 2'-O-methyluridine-3'-phosphate
  modified_base 16: mod_base = OTHER; note = 2'-deoxy-2'-fluorocytidine-3'-phosphate
  modified_base 17: mod_base = OTHER; note = 2'-O-methyladenosine-3'-phosphate
  modified_base 18: mod_base = OTHER; note = 2'-O-methyluridine-3'-phosphate
  modified_base 19: mod_base = OTHER; note = 2'-O-methyluridine-3'-phosphate
  modified_base 20: mod_base = OTHER; note = 2'-O-methyluridine-3'-phosphate
  modified_base 21: mod_base = OTHER; note = 2'-O-methylguanosine-3'-phosphorothioate
  modified_base 22: mod_base = OTHER; note = 2'-O-methylcytidine-3'-phosphorothioate
  modified_base 23: mod_base = OTHER; note = 2'-O-methylcytidine
ccaaagtttcttcatcatttgcc

SEQ ID NO: 2742 - RNA, 21 nt, synthetic construct
  source 1..21: mol_type = other RNA
  modified_base 1: mod_base = OTHER; note = 2'-O-methyluridine-3'-phosphorothioate
  modified_base 2: mod_base = OTHER; note = 2'-O-methylguanosine-3'-phosphorothioate
  modified_base 3: mod_base = OTHER; note = 2'-O-methylguanosine-3'-phosphate
  modified_base 4: mod_base = OTHER; note = 2'-O-methylguanosine-3'-phosphate
  modified_base 5: mod_base = OTHER; note = 2'-O-methylguanosine-3'-phosphate
  modified_base 6: mod_base = OTHER; note = 2'-O-methylcytidine-3'-phosphate
  modified_base 7: mod_base = OTHER; note = 2'-deoxy-2'-fluoroadenosine-3'-phosphate
  modified_base 8: mod_base = OTHER; note = 2'-O-methyladenosine-3'-phosphate
  modified_base 9: mod_base = OTHER; note = 2'-deoxy-2'-fluoroadenosine-3'-phosphate
  modified_base 10: mod_base = OTHER; note = 2'-deoxy-2'-fluorouridine-3'-phosphate
  modified_base 11: mod_base = OTHER; note = 2'-deoxy-2'-fluoroguanosine-3'-phosphate
  modified_base 12: mod_base = OTHER; note = 2'-O-methyladenosine-3'-phosphate
  modified_base 13: mod_base = OTHER; note = 2'-O-methyluridine-3'-phosphate
  modified_base 14: mod_base = OTHER; note = 2'-O-methylguanosine-3'-phosphate
  modified_base 15: mod_base = OTHER; note = 2'-O-methyladenosine-3'-phosphate
  modified_base 16: mod_base = OTHER; note = 2'-O-methyladenosine-3'-phosphate
  modified_base 17: mod_base = OTHER; note = 2'-O-methylguanosine-3'-phosphate
  modified_base 18: mod_base = OTHER; note = 2'-O-methyladenosine-3'-phosphate
  modified_base 19: mod_base = OTHER; note = 2'-O-methyladenosine-3'-phosphate
  modified_base 20: mod_base = OTHER; note = 2'-O-methyladenosine-3'-phosphate
  modified_base 21: mod_base = OTHER; note = 2'-O-methylcytidine-3'-phosphate ((2S,4R)-1-[29-[[2-(acetylamino)-2-deoxy-beta-D-galactopyra nosyl]oxy]-14,14-bis[[3-[[3-[[5-[[2-(acetylamino)-2-deoxy-b eta-D-galactopyranosyl]oxy]-1-oxopentyl]amino]propyl]amino] -3-oxopropoxy]methyl]-1,12,19,25-tetraoxo-16-oxa-13,20,24-t riazanonacos-1-yl]-4-hydroxy-2-pyrrolidinyl)methyl ester
tggggcaaatgatgaagaaac

SEQ ID NO: 2743 - RNA, 23 nt, synthetic construct
  source 1..23: mol_type = other RNA
  modified_base 1: mod_base = OTHER; note = 2'-O-methylguanosine-3'-phosphorothioate
  modified_base 2: mod_base = OTHER; note = 2'-deoxy-2'-fluorouridine-3'-phosphorothioate
  modified_base 3: mod_base = OTHER; note = 2'-O-methyluridine-3'-phosphate
  modified_base 4: mod_base = OTHER; note = 2'-O-methyluridine-3'-phosphate
  modified_base 5: mod_base = OTHER; note = 2'-O-methylcytidine-3'-phosphate
  modified_base 6: mod_base = OTHER; note = 2'-deoxy-2'-fluorouridine-3'-phosphate
  modified_base 7: mod_base = OTHER; note = 2'-O-methyluridine-3'-phosphate
  modified_base 8: mod_base = OTHER; note = 2'-deoxy-2'-fluorocytidine-3'-phosphate
  modified_base 9: mod_base = OTHER; note = 2'-deoxy-2'-fluoroadenosine-3'-phosphate
  modified_base 10: mod_base = OTHER; note = 2'-O-methyluridine-3'-phosphate
  modified_base 11: mod_base = OTHER; note = 2'-O-methylcytidine-3'-phosphate
  modified_base 12: mod_base = OTHER; note = 2'-O-methyladenosine-3'-phosphate
  modified_base 13: mod_base = OTHER; note = 2'-O-methyluridine-3'-phosphate
  modified_base 14: mod_base = OTHER; note = 2'-deoxy-2'-fluorouridine-3'-phosphate
  modified_base 15: mod_base = OTHER; note = 2'-O-methyluridine-3'-phosphate
  modified_base 16: mod_base = OTHER; note = 2'-deoxy-2'-fluoroguanosine-3'-phosphate
  modified_base 17: mod_base = OTHER; note = 2'-O-methylcytidine-3'-phosphate
  modified_base 18: mod_base = OTHER; note = 2'-O-methylcytidine-3'-phosphate
  modified_base 19: mod_base = OTHER; note = 2'-O-methylcytidine-3'-phosphate
  modified_base 20: mod_base = OTHER; note = 2'-O-methylcytidine-3'-phosphate
  modified_base 21: mod_base = OTHER; note = 2'-O-methyladenosine-3'-phosphorothioate
  modified_base 22: mod_base = OTHER; note = 2'-O-methylguanosine-3'-phosphorothioate
  modified_base 23: mod_base = OTHER; note = 2'-O-methyladenosine
gtttcttcatcatttgccccaga

SEQ ID NO: 2744 - RNA, 21 nt, synthetic construct
  source 1..21: mol_type = other RNA
  modified_base 1: mod_base = OTHER; note = 2'-O-methylcytidine-3'-phosphorothioate
  modified_base 2: mod_base = OTHER; note = 2'-O-methyluridine-3'-phosphorothioate
  modified_base 3: mod_base = OTHER; note = 2'-O-methylguanosine-3'-phosphate
  modified_base 4: mod_base = OTHER; note = 2'-O-methylguanosine-3'-phosphate
  modified_base 5: mod_base = OTHER; note = 2'-O-methylguanosine-3'-phosphate
  modified_base 6: mod_base = OTHER; note = 2'-O-methylguanosine-3'-phosphate
  modified_base 7: mod_base = OTHER; note = 2'-deoxy-2'-fluorocytidine-3'-phosphate
  modified_base 8: mod_base = OTHER; note = 2'-O-methyladenosine-3'-phosphate
  modified_base 9: mod_base = OTHER; note = 2'-deoxy-2'-fluoroadenosine-3'-phosphate
  modified_base 10: mod_base = OTHER; note = 2'-deoxy-2'-fluoroadenosine-3'-phosphate
  modified_base 11: mod_base = OTHER; note = 2'-deoxy-2'-fluorouridine-3'-phosphate
  modified_base 12: mod_base = OTHER; note = 2'-O-methylguanosine-3'-phosphate
  modified_base 13: mod_base = OTHER; note = 2'-O-methyladenosine-3'-phosphate
  modified_base 14: mod_base = OTHER; note = 2'-O-methyluridine-3'-phosphate
  modified_base 15: mod_base = OTHER; note = 2'-O-methylguanosine-3'-phosphate
  modified_base 16: mod_base = OTHER; note = 2'-O-methyladenosine-3'-phosphate
  modified_base 17: mod_base = OTHER; note = 2'-O-methyladenosine-3'-phosphate
  modified_base 18: mod_base = OTHER; note = 2'-O-methylguanosine-3'-phosphate
  modified_base 19: mod_base = OTHER; note = 2'-O-methyladenosine-3'-phosphate
  modified_base 20: mod_base = OTHER; note = 2'-O-methyladenosine-3'-phosphate
  modified_base 21: mod_base = OTHER; note = 2'-O-methyladenosine-3'-phosphate ((2S,4R)-1-[29-[[2-(acetylamino)-2-deoxy-beta-D-galactopyra nosyl]oxy]-14,14-bis[[3-[[3-[[5-[[2-(acetylamino)-2-deoxy-b eta-D-galactopyranosyl]oxy]-1-oxopentyl]amino]propyl]amino] -3-oxopropoxy]methyl]-1,12,19,25-tetraoxo-16-oxa-13,20,24-t riazanonacos-1-yl]-4-hydroxy-2-pyrrolidinyl)methyl ester
ctggggcaaatgatgaagaaa

SEQ ID NO: 2745 - RNA, 23 nt, synthetic construct
  source 1..23: mol_type = other RNA
  modified_base 1: mod_base = OTHER; note = 2'-O-methyluridine-3'-phosphorothioate
  modified_base 2: mod_base = OTHER; note = 2'-deoxy-2'-fluorouridine-3'-phosphorothioate
  modified_base 3: mod_base = OTHER; note = 2'-O-methyluridine-3'-phosphate
  modified_base 4: mod_base = OTHER; note = 2'-O-methylcytidine-3'-phosphate
  modified_base 5: mod_base = OTHER; note = 2'-O-methyluridine-3'-phosphate
  modified_base 6: mod_base = OTHER; note = 2'-deoxy-2'-fluorouridine-3'-phosphate
  modified_base 7: mod_base = OTHER; note = 2'-O-methylcytidine-3'-phosphate
  modified_base 8: mod_base = OTHER; note = 2'-deoxy-2'-fluoroadenosine-3'-phosphate
  modified_base 9: mod_base = OTHER; note = 2'-deoxy-2'-fluorouridine-3'-phosphate
  modified_base 10: mod_base = OTHER; note = 2'-O-methylcytidine-3'-phosphate
  modified_base 11: mod_base = OTHER; note = 2'-O-methyladenosine-3'-phosphate
  modified_base 12: mod_base = OTHER; note = 2'-O-methyluridine-3'-phosphate
  modified_base 13: mod_base = OTHER; note = 2'-O-methyluridine-3'-phosphate
  modified_base 14: mod_base = OTHER; note = 2'-deoxy-2'-fluorouridine-3'-phosphate
  modified_base 15: mod_base = OTHER; note = 2'-O-methylguanosine-3'-phosphate
  modified_base 16: mod_base = OTHER; note = 2'-deoxy-2'-fluorocytidine-3'-phosphate
  modified_base 17: mod_base = OTHER; note = 2'-O-methylcytidine-3'-phosphate
  modified_base 18: mod_base = OTHER; note = 2'-O-methylcytidine-3'-phosphate
  modified_base 19: mod_base = OTHER; note = 2'-O-methylcytidine-3'-phosphate
  modified_base 20: mod_base = OTHER; note = 2'-O-methyladenosine-3'-phosphate
  modified_base 21: mod_base = OTHER; note = 2'-O-methylguanosine-3'-phosphorothioate
  modified_base 22: mod_base = OTHER; note = 2'-O-methyladenosine-3'-phosphorothioate
  modified_base 23: mod_base = OTHER; note = 2'-O-methylcytidine
tttcttcatcatttgccccagac

SEQ ID NO: 2746 - RNA, 21 nt, synthetic construct
  source 1..21: mol_type = other RNA
  modified_base 1: mod_base = OTHER; note = 2'-O-methylcytidine-3'-phosphorothioate
  modified_base 2: mod_base = OTHER; note = 2'-O-methylcytidine-3'-phosphorothioate
  modified_base 3: mod_base = OTHER; note = 2'-O-methyladenosine-3'-phosphate
  modified_base 4: mod_base = OTHER; note = 2'-O-methyladenosine-3'-phosphate
  modified_base 5: mod_base = OTHER; note = 2'-O-methylguanosine-3'-phosphate
  modified_base 6: mod_base = OTHER; note = 2'-O-methylguanosine-3'-phosphate
  modified_base 7: mod_base = OTHER; note = 2'-deoxy-2'-fluorocytidine-3'-phosphate
  modified_base 8: mod_base = OTHER; note = 2'-O-methyluridine-3'-phosphate
  modified_base 9: mod_base = OTHER; note = 2'-deoxy-2'-fluoroguanosine-3'-phosphate
  modified_base 10: mod_base = OTHER; note = 2'-deoxy-2'-fluorouridine-3'-phosphate
  modified_base 11: mod_base = OTHER; note = 2'-deoxy-2'-fluoroguanosine-3'-phosphate
  modified_base 12: mod_base = OTHER; note = 2'-O-methyluridine-3'-phosphate
  modified_base 13: mod_base = OTHER; note = 2'-O-methyluridine-3'-phosphate
  modified_base 14: mod_base = OTHER; note = 2'-O-methyluridine-3'-phosphate
  modified_base 15: mod_base = OTHER; note = 2'-O-methylguanosine-3'-phosphate
  modified_base 16: mod_base = OTHER; note = 2'-O-methyluridine-3'-phosphate
  modified_base 17: mod_base = OTHER; note = 2'-O-methylguanosine-3'-phosphate
  modified_base 18: mod_base = OTHER; note = 2'-O-methylguanosine-3'-phosphate
  modified_base 19: mod_base = OTHER; note = 2'-O-methylguanosine-3'-phosphate
  modified_base 20: mod_base = OTHER; note = 2'-O-methylguanosine-3'-phosphate
  modified_base 21: mod_base = OTHER; note = 2'-O-methyladenosine-3'-phosphate ((2S,4R)-1-[29-[[2-(acetylamino)-2-deoxy-beta-D-galactopyra nosyl]oxy]-14,14-bis[[3-[[3-[[5-[[2-(acetylamino)-2-deoxy-b eta-D-galactopyranosyl]oxy]-1-oxopentyl]amino]propyl]amino] -3-oxopropoxy]methyl]-1,12,19,25-tetraoxo-16-oxa-13,20,24-t riazanonacos-1-yl]-4-hydroxy-2-pyrrolidinyl)methyl ester
ccaaggctgtgtttgtgggga

SEQ ID NO: 2747 - RNA, 23 nt, synthetic construct
  source 1..23: mol_type = other RNA
  modified_base 1: mod_base = OTHER; note = 2'-O-methyluridine-3'-phosphorothioate
  modified_base 2: mod_base = OTHER; note = 2'-deoxy-2'-fluorocytidine-3'-phosphorothioate
  modified_base 3: mod_base = OTHER; note = 2'-O-methylcytidine-3'-phosphate
  modified_base 4: mod_base = OTHER; note = 2'-O-methylcytidine-3'-phosphate
  modified_base 5: mod_base = OTHER; note = 2'-O-methylcytidine-3'-phosphate
  modified_base 6: mod_base = OTHER; note = 2'-deoxy-2'-fluoroadenosine-3'-phosphate
  modified_base 7: mod_base = OTHER; note = 2'-O-methylcytidine-3'-phosphate
  modified_base 8: mod_base = OTHER; note = 2'-deoxy-2'-fluoroadenosine-3'-phosphate
  modified_base 9: mod_base = OTHER; note = 2'-deoxy-2'-fluoroadenosine-3'-phosphate
  modified_base 10: mod_base = OTHER; note = 2'-O-methyladenosine-3'-phosphate
  modified_base 11: mod_base = OTHER; note = 2'-O-methylcytidine-3'-phosphate
  modified_base 12: mod_base = OTHER; note = 2'-O-methyladenosine-3'-phosphate
  modified_base 13: mod_base = OTHER; note = 2'-O-methylcytidine-3'-phosphate
  modified_base 14: mod_base = OTHER; note = 2'-deoxy-2'-fluoroadenosine-3'-phosphate
  modified_base 15: mod_base = OTHER; note = 2'-O-methylguanosine-3'-phosphate
  modified_base 16: mod_base = OTHER; note = 2'-deoxy-2'-fluorocytidine-3'-phosphate
  modified_base 17: mod_base = OTHER; note = 2'-O-methylcytidine-3'-phosphate
  modified_base 18: mod_base = OTHER; note = 2'-O-methyluridine-3'-phosphate
  modified_base 19: mod_base = OTHER; note = 2'-O-methyluridine-3'-phosphate
  modified_base 20: mod_base = OTHER; note = 2'-O-methylguanosine-3'-phosphate
  modified_base 21: mod_base = OTHER; note = 2'-O-methylguanosine-3'-phosphorothioate
  modified_base 22: mod_base = OTHER; note = 2'-O-methylcytidine-3'-phosphorothioate
  modified_base 23: mod_base = OTHER; note = 2'-O-methylguanosine
tccccacaaacacagccttggcg

SEQ ID NO: 2748 - RNA, 21 nt, synthetic construct
  source 1..21: mol_type = other RNA
  modified_base 1: mod_base = OTHER; note = 2'-O-methylcytidine-3'-phosphorothioate
  modified_base 2: mod_base = OTHER; note = 2'-O-methyladenosine-3'-phosphorothioate
  modified_base 3: mod_base = OTHER; note = 2'-O-methyladenosine-3'-phosphate
  modified_base 4: mod_base = OTHER; note = 2'-O-methylguanosine-3'-phosphate
  modified_base 5: mod_base = OTHER; note = 2'-O-methylguanosine-3'-phosphate
  modified_base 6: mod_base = OTHER; note = 2'-O-methylcytidine-3'-phosphate
  modified_base 7: mod_base = OTHER; note = 2'-deoxy-2'-fluorouridine-3'-phosphate
  modified_base 8: mod_base = OTHER; note = 2'-O-methylguanosine-3'-phosphate
  modified_base 9: mod_base = OTHER; note = 2'-deoxy-2'-fluorouridine-3'-phosphate
  modified_base 10: mod_base = OTHER; note = 2'-deoxy-2'-fluoroguanosine-3'-phosphate
  modified_base 11: mod_base = OTHER; note = 2'-deoxy-2'-fluorouridine-3'-phosphate
  modified_base 12: mod_base = OTHER; note = 2'-O-methyluridine-3'-phosphate
  modified_base 13: mod_base = OTHER; note = 2'-O-methyluridine-3'-phosphate
  modified_base 14: mod_base = OTHER; note = 2'-O-methylguanosine-3'-phosphate
  modified_base 15: mod_base = OTHER; note = 2'-O-methyluridine-3'-phosphate
  modified_base 16: mod_base = OTHER; note = 2'-O-methylguanosine-3'-phosphate
  modified_base 17: mod_base = OTHER; note = 2'-O-methylguanosine-3'-phosphate
  modified_base 18: mod_base = OTHER; note = 2'-O-methylguanosine-3'-phosphate
  modified_base 19: mod_base = OTHER; note = 2'-O-methylguanosine-3'-phosphate
  modified_base 20: mod_base = OTHER; note = 2'-O-methyladenosine-3'-phosphate
  modified_base 21: mod_base = OTHER; note = 2'-O-methylguanosine-3'-phosphate ((2S,4R)-1-[29-[[2-(acetylamino)-2-deoxy-beta-D-galactopyra nosyl]oxy]-14,14-bis[[3-[[3-[[5-[[2-(acetylamino)-2-deoxy-b eta-D-galactopyranosyl]oxy]-1-oxopentyl]amino]propyl]amino] -3-oxopropoxy]methyl]-1,12,19,25-tetraoxo-16-oxa-13,20,24-t riazanonacos-1-yl]-4-hydroxy-2-pyrrolidinyl)methyl ester
caaggctgtgtttgtggggag

SEQ ID NO: 2749 - RNA, 23 nt, synthetic construct
  source 1..23: mol_type = other RNA
  modified_base 1: mod_base = OTHER; note = 2'-O-methylcytidine-3'-phosphorothioate
  modified_base 2: mod_base = OTHER; note = 2'-deoxy-2'-fluorouridine-3'-phosphorothioate
  modified_base 3: mod_base = OTHER; note = 2'-O-methylcytidine-3'-phosphate
  modified_base 4: mod_base = OTHER; note = 2'-O-methylcytidine-3'-phosphate
  modified_base 5: mod_base = OTHER; note = 2'-O-methylcytidine-3'-phosphate
  modified_base 6: mod_base = OTHER; note = 2'-deoxy-2'-fluorocytidine-3'-phosphate
  modified_base 7: mod_base = OTHER; note = 2'-O-methyladenosine-3'-phosphate
  modified_base 8: mod_base = OTHER; note = 2'-deoxy-2'-fluorocytidine-3'-phosphate
  modified_base 9: mod_base = OTHER; note = 2'-deoxy-2'-fluoroadenosine-3'-phosphate
  modified_base 10: mod_base = OTHER; note = 2'-O-methyladenosine-3'-phosphate
  modified_base 11: mod_base = OTHER; note = 2'-O-methyladenosine-3'-phosphate
  modified_base 12: mod_base = OTHER; note = 2'-O-methylcytidine-3'-phosphate
  modified_base 13: mod_base = OTHER; note = 2'-O-methyladenosine-3'-phosphate
  modified_base 14: mod_base = OTHER; note = 2'-deoxy-2'-fluorocytidine-3'-phosphate
  modified_base 15: mod_base = OTHER; note = 2'-O-methyladenosine-3'-phosphate
  modified_base 16: mod_base = OTHER; note = 2'-deoxy-2'-fluoroguanosine-3'-phosphate
  modified_base 17: mod_base = OTHER; note = 2'-O-methylcytidine-3'-phosphate
  modified_base 18: mod_base = OTHER; note = 2'-O-methylcytidine-3'-phosphate
  modified_base 19: mod_base = OTHER; note = 2'-O-methyluridine-3'-phosphate
  modified_base 20: mod_base = OTHER; note = 2'-O-methyluridine-3'-phosphate
  modified_base 21: mod_base = OTHER; note = 2'-O-methylguanosine-3'-phosphorothioate
  modified_base 22: mod_base = OTHER; note = 2'-O-methylguanosine-3'-phosphorothioate
  modified_base 23: mod_base = OTHER; note = 2'-O-methylcytidine
ctccccacaaacacagccttggc

SEQ ID NO: 2750 - RNA, 21 nt, synthetic construct
  source 1..21: mol_type = other RNA
  modified_base 1: mod_base = OTHER; note = 2'-O-methylguanosine-3'-phosphorothioate
  modified_base 2: mod_base = OTHER; note = 2'-O-methylguanosine-3'-phosphorothioate
  modified_base 3: mod_base = OTHER; note = 2'-O-methylcytidine-3'-phosphate
  modified_base 4: mod_base = OTHER; note = 2'-O-methylguanosine-3'-phosphate
  modified_base 5: mod_base = OTHER; note = 2'-O-methylcytidine-3'-phosphate
  modified_base 6: mod_base = OTHER; note = 2'-O-methylcytidine-3'-phosphate
  modified_base 7: mod_base = OTHER; note = 2'-deoxy-2'-fluoroadenosine-3'-phosphate
  modified_base 8: mod_base = OTHER; note = 2'-O-methyladenosine-3'-phosphate
  modified_base 9: mod_base = OTHER; note = 2'-deoxy-2'-fluoroguanosine-3'-phosphate
  modified_base 10: mod_base = OTHER; note = 2'-deoxy-2'-fluoroguanosine-3'-phosphate
  modified_base 11: mod_base = OTHER; note = 2'-deoxy-2'-fluorocytidine-3'-phosphate
  modified_base 12: mod_base = OTHER; note = 2'-O-methyluridine-3'-phosphate
  modified_base 13: mod_base = OTHER; note = 2'-O-methylguanosine-3'-phosphate
  modified_base 14: mod_base = OTHER; note = 2'-O-methyluridine-3'-phosphate
  modified_base 15: mod_base = OTHER; note = 2'-O-methylguanosine-3'-phosphate
  modified_base 16: mod_base = OTHER; note = 2'-O-methyluridine-3'-phosphate
  modified_base 17: mod_base = OTHER; note = 2'-O-methyluridine-3'-phosphate
  modified_base 18: mod_base = OTHER; note = 2'-O-methyluridine-3'-phosphate
  modified_base 19: mod_base = OTHER; note = 2'-O-methylguanosine-3'-phosphate
  modified_base 20: mod_base = OTHER; note = 2'-O-methyluridine-3'-phosphate
  modified_base 21: mod_base = OTHER; note = 2'-O-methylguanosine-3'-phosphate ((2S,4R)-1-[29-[[2-(acetylamino)-2-deoxy-beta-D-galactopyra nosyl]oxy]-14,14-bis[[3-[[3-[[5-[[2-(acetylamino)-2-deoxy-b eta-D-galactopyranosyl]oxy]-1-oxopentyl]amino]propyl]amino] -3-oxopropoxy]methyl]-1,12,19,25-tetraoxo-16-oxa-13,20,24-t riazanonacos-1-yl]-4-hydroxy-2-pyrrolidinyl)methyl ester
ggcgccaaggctgtgtttgtg

SEQ ID NO: 2751 - RNA, 23 nt, synthetic construct
  source 1..23: mol_type = other RNA
  modified_base 1: mod_base = OTHER; note = 2'-O-methylcytidine-3'-phosphorothioate
  modified_base 2: mod_base = OTHER; note = 2'-deoxy-2'-fluoroadenosine-3'-phosphorothioate
  modified_base 3: mod_base = OTHER; note = 2'-O-methylcytidine-3'-phosphate
  modified_base 4: mod_base = OTHER; note = 2'-O-methyladenosine-3'-phosphate
  modified_base 5: mod_base = OTHER; note = 2'-O-methyladenosine-3'-phosphate
  modified_base 6: mod_base = OTHER; note = 2'-deoxy-2'-fluoroadenosine-3'-phosphate
  modified_base 7: mod_base = OTHER; note = 2'-O-methylcytidine-3'-phosphate
  modified_base 8: mod_base = OTHER; note = 2'-deoxy-2'-fluoroadenosine-3'-phosphate
  modified_base 9: mod_base = OTHER; note = 2'-deoxy-2'-fluorocytidine-3'-phosphate
  modified_base 10: mod_base = OTHER; note = 2'-O-methyladenosine-3'-phosphate
  modified_base 11: mod_base = OTHER; note = 2'-O-methylguanosine-3'-phosphate
  modified_base 12: mod_base = OTHER; note = 2'-O-methylcytidine-3'-phosphate
  modified_base 13: mod_base = OTHER; note = 2'-O-methylcytidine-3'-phosphate
  modified_base 14: mod_base = OTHER; note = 2'-deoxy-2'-fluorouridine-3'-phosphate
  modified_base 15: mod_base = OTHER; note = 2'-O-methyluridine-3'-phosphate
  modified_base 16: mod_base = OTHER; note = 2'-deoxy-2'-fluoroguanosine-3'-phosphate
  modified_base 17: mod_base = OTHER; note = 2'-O-methylguanosine-3'-phosphate
  modified_base 18: mod_base = OTHER; note = 2'-O-methylcytidine-3'-phosphate
  modified_base 19: mod_base = OTHER; note = 2'-O-methylguanosine-3'-phosphate
  modified_base 20: mod_base = OTHER; note = 2'-O-methylcytidine-3'-phosphate
  modified_base 21: mod_base = OTHER; note = 2'-O-methylcytidine-3'-phosphorothioate
  modified_base 22: mod_base = OTHER; note = 2'-O-methyladenosine-3'-phosphorothioate
  modified_base 23: mod_base = OTHER; note = 2'-O-methyladenosine
cacaaacacagccttggcgccaa

SEQ ID NO: 2752 - RNA, 21 nt, synthetic construct
  source 1..21: mol_type = other RNA
  modified_base 1: mod_base = OTHER; note = 2'-O-methyluridine-3'-phosphorothioate
  modified_base 2: mod_base = OTHER; note = 2'-O-methylguanosine-3'-phosphorothioate
  modified_base 3: mod_base = OTHER; note = 2'-O-methylguanosine-3'-phosphate
  modified_base 4: mod_base = OTHER; note = 2'-O-methylcytidine-3'-phosphate
  modified_base 5: mod_base = OTHER; note = 2'-O-methylguanosine-3'-phosphate
  modified_base 6: mod_base = OTHER; note = 2'-O-methylcytidine-3'-phosphate
  modified_base 7: mod_base = OTHER; note = 2'-deoxy-2'-fluorocytidine-3'-phosphate
  modified_base 8: mod_base = OTHER; note = 2'-O-methyladenosine-3'-phosphate
  modified_base 9: mod_base = OTHER; note = 2'-deoxy-2'-fluoroadenosine-3'-phosphate
  modified_base 10: mod_base = OTHER; note = 2'-deoxy-2'-fluoroguanosine-3'-phosphate
  modified_base 11: mod_base = OTHER; note = 2'-deoxy-2'-fluoroguanosine-3'-phosphate
  modified_base 12: mod_base = OTHER; note = 2'-O-methylcytidine-3'-phosphate
  modified_base 13: mod_base = OTHER; note = 2'-O-methyluridine-3'-phosphate
  modified_base 14: mod_base = OTHER; note = 2'-O-methylguanosine-3'-phosphate
  modified_base 15: mod_base = OTHER; note = 2'-O-methyluridine-3'-phosphate
  modified_base 16: mod_base = OTHER; note = 2'-O-methylguanosine-3'-phosphate
  modified_base 17: mod_base = OTHER; note = 2'-O-methyluridine-3'-phosphate
  modified_base 18: mod_base = OTHER; note = 2'-O-methyluridine-3'-phosphate
  modified_base 19: mod_base = OTHER; note = 2'-O-methyluridine-3'-phosphate
  modified_base 20: mod_base = OTHER; note = 2'-O-methylguanosine-3'-phosphate
  modified_base 21: mod_base = OTHER; note = 2'-O-methyluridine-3'-phosphate ((2S,4R)-1-[29-[[2-(acetylamino)-2-deoxy-beta-D-galactopyra nosyl]oxy]-14,14-bis[[3-[[3-[[5-[[2-(acetylamino)-2-deoxy-b eta-D-galactopyranosyl]oxy]-1-oxopentyl]amino]propyl]amino] -3-oxopropoxy]methyl]-1,12,19,25-tetraoxo-16-oxa-13,20,24-t riazanonacos-1-yl]-4-hydroxy-2-pyrrolidinyl)methyl ester
tggcgccaaggctgtgtttgt

SEQ ID NO: 2753 - RNA, 23 nt, synthetic construct
  source 1..23: mol_type = other RNA
  modified_base 1: mod_base = OTHER; note = 2'-O-methyladenosine-3'-phosphorothioate
  modified_base 2: mod_base = OTHER; note = 2'-deoxy-2'-fluorocytidine-3'-phosphorothioate
  modified_base 3: mod_base = OTHER; note = 2'-O-methyladenosine-3'-phosphate
  modified_base 4: mod_base = OTHER; note = 2'-O-methyladenosine-3'-phosphate
  modified_base 5: mod_base = OTHER; note = 2'-O-methyladenosine-3'-phosphate
  modified_base 6: mod_base = OTHER; note = 2'-deoxy-2'-fluorocytidine-3'-phosphate
  modified_base 7: mod_base = OTHER; note = 2'-O-methyladenosine-3'-phosphate
  modified_base 8: mod_base = OTHER; note = 2'-deoxy-2'-fluorocytidine-3'-phosphate
  modified_base 9: mod_base = OTHER; note = 2'-deoxy-2'-fluoroadenosine-3'-phosphate
  modified_base 10: mod_base = OTHER; note = 2'-O-methylguanosine-3'-phosphate
  modified_base 11: mod_base = OTHER; note = 2'-O-methylcytidine-3'-phosphate
  modified_base 12: mod_base = OTHER; note = 2'-O-methylcytidine-3'-phosphate
  modified_base 13: mod_base = OTHER; note = 2'-O-methyluridine-3'-phosphate
  modified_base 14: mod_base = OTHER; note = 2'-deoxy-2'-fluorouridine-3'-phosphate
  modified_base 15: mod_base = OTHER; note = 2'-O-methylguanosine-3'-phosphate
  modified_base 16: mod_base = OTHER; note = 2'-deoxy-2'-fluoroguanosine-3'-phosphate
  modified_base 17: mod_base = OTHER; note = 2'-O-methylcytidine-3'-phosphate
  modified_base 18: mod_base = OTHER; note = 2'-O-methylguanosine-3'-phosphate
  modified_base 19: mod_base = OTHER; note = 2'-O-methylcytidine-3'-phosphate
  modified_base 20: mod_base = OTHER; note = 2'-O-methylcytidine-3'-phosphate
  modified_base 21: mod_base = OTHER; note = 2'-O-methyladenosine-3'-phosphorothioate
  modified_base 22: mod_base = OTHER; note = 2'-O-methyladenosine-3'-phosphorothioate
  modified_base 23: mod_base = OTHER; note = 2'-O-methylguanosine
acaaacacagccttggcgccaag

SEQ ID NO: 2754 - RNA, 21 nt, synthetic construct
  source 1..21: mol_type = other RNA
  modified_base 1: mod_base = OTHER; note = 2'-O-methyladenosine-3'-phosphorothioate
  modified_base 2: mod_base = OTHER; note = 2'-O-methylcytidine-3'-phosphorothioate
  modified_base 3: mod_base = OTHER; note = 2'-O-methyluridine-3'-phosphate
  modified_base 4: mod_base = OTHER; note = 2'-O-methylguanosine-3'-phosphate
  modified_base 5: mod_base = OTHER; note = 2'-O-methylcytidine-3'-phosphate
  modified_base 6: mod_base = OTHER; note = 2'-O-methylcytidine-3'-phosphate
  modified_base 7: mod_base = OTHER; note = 2'-deoxy-2'-fluoroguanosine-3'-phosphate
  modified_base 8: mod_base = OTHER; note = 2'-O-methylcytidine-3'-phosphate
  modified_base 9: mod_base = OTHER; note = 2'-deoxy-2'-fluorocytidine-3'-phosphate
  modified_base 10: mod_base = OTHER; note = 2'-deoxy-2'-fluoroadenosine-3'-phosphate
  modified_base 11: mod_base = OTHER; note = 2'-deoxy-2'-fluorocytidine-3'-phosphate
  modified_base 12: mod_base = OTHER; note = 2'-O-methyladenosine-3'-phosphate
  modified_base 13: mod_base = OTHER; note = 2'-O-methyladenosine-3'-phosphate
  modified_base 14: mod_base = OTHER; note = 2'-O-methylcytidine-3'-phosphate
  modified_base 15: mod_base = OTHER; note = 2'-O-methyluridine-3'-phosphate
  modified_base 16: mod_base = OTHER; note = 2'-O-methylcytidine-3'-phosphate
  modified_base 17: mod_base = OTHER; note = 2'-O-methyladenosine-3'-phosphate
  modified_base 18: mod_base = OTHER; note = 2'-O-methylguanosine-3'-phosphate
  modified_base 19: mod_base = OTHER; note = 2'-O-methylguanosine-3'-phosphate
  modified_base 20: mod_base = OTHER; note = 2'-O-methyladenosine-3'-phosphate
  modified_base 21: mod_base = OTHER; note = 2'-O-methyluridine-3'-phosphate ((2S,4R)-1-[29-[[2-(acetylamino)-2-deoxy-beta-D-galactopyra nosyl]oxy]-14,14-bis[[3-[[3-[[5-[[2-(acetylamino)-2-deoxy-b eta-D-galactopyranosyl]oxy]-1-oxopentyl]amino]propyl]amino] -3-oxopropoxy]methyl]-1,12,19,25-tetraoxo-16-oxa-13,20,24-t riazanonacos-1-yl]-4-hydroxy-2-pyrrolidinyl)methyl ester
actgccgccacaactcaggat

SEQ ID NO: 2755 - RNA, 23 nt, synthetic construct
  source 1..23: mol_type = other RNA
  modified_base 1: mod_base = OTHER; note = 2'-O-methyladenosine-3'-phosphorothioate
  modified_base 2: mod_base = OTHER; note = 2'-deoxy-2'-fluorouridine-3'-phosphorothioate
  modified_base 3: mod_base = OTHER; note = 2'-O-methylcytidine-3'-phosphate
  modified_base 4: mod_base = OTHER; note = 2'-O-methylcytidine-3'-phosphate
  modified_base 5: mod_base = OTHER; note = 2'-O-methyluridine-3'-phosphate
  modified_base 6: mod_base = OTHER; note = 2'-deoxy-2'-fluoroguanosine-3'-phosphate
  modified_base 7: mod_base = OTHER; note = 2'-O-methyladenosine-3'-phosphate
  modified_base 8: mod_base = OTHER; note = 2'-deoxy-2'-fluoroguanosine-3'-phosphate
  modified_base 9: mod_base = OTHER; note = 2'-deoxy-2'-fluorouridine-3'-phosphate
  modified_base 10: mod_base = OTHER; note = 2'-O-methyluridine-3'-phosphate
  modified_base 11: mod_base = OTHER; note = 2'-O-methylguanosine-3'-phosphate
  modified_base 12: mod_base = OTHER; note = 2'-O-methyluridine-3'-phosphate
  modified_base 13: mod_base = OTHER; note = 2'-O-methylguanosine-3'-phosphate
  modified_base 14: mod_base = OTHER; note = 2'-deoxy-2'-fluoroguanosine-3'-phosphate
  modified_base 15: mod_base = OTHER; note = 2'-O-methylcytidine-3'-phosphate
  modified_base 16: mod_base = OTHER; note = 2'-deoxy-2'-fluoroguanosine-3'-phosphate
  modified_base 17: mod_base = OTHER; note = 2'-O-methylguanosine-3'-phosphate
  modified_base 18: mod_base = OTHER; note = 2'-O-methylcytidine-3'-phosphate
  modified_base 19: mod_base = OTHER; note = 2'-O-methyladenosine-3'-phosphate
  modified_base 20: mod_base = OTHER; note = 2'-O-methylguanosine-3'-phosphate
  modified_base 21: mod_base = OTHER; note = 2'-O-methyluridine-3'-phosphorothioate
  modified_base 22: mod_base = OTHER; note = 2'-O-methyluridine-3'-phosphorothioate
  modified_base 23: mod_base = OTHER; note = 2'-O-methyluridine
atcctgagttgtggcggcagttt

SEQ ID NO: 2756 - RNA, 21 nt, synthetic construct
  source 1..21: mol_type = other RNA
  modified_base 1: mod_base = OTHER; note = 2'-O-methylcytidine-3'-phosphorothioate
  modified_base 2: mod_base = OTHER; note = 2'-O-methyluridine-3'-phosphorothioate
  modified_base 3: mod_base = OTHER; note = 2'-O-methylguanosine-3'-phosphate
  modified_base 4: mod_base = OTHER; note = 2'-O-methylcytidine-3'-phosphate
  modified_base 5: mod_base = OTHER; note = 2'-O-methylcytidine-3'-phosphate
  modified_base 6: mod_base = OTHER; note = 2'-O-methylguanosine-3'-phosphate
  modified_base 7: mod_base = OTHER; note = 2'-deoxy-2'-fluorocytidine-3'-phosphate
  modified_base 8: mod_base = OTHER; note = 2'-O-methylcytidine-3'-phosphate
  modified_base 9: mod_base = OTHER; note = 2'-deoxy-2'-fluoroadenosine-3'-phosphate
  modified_base 10: mod_base = OTHER; note = 2'-deoxy-2'-fluorocytidine-3'-phosphate
  modified_base 11: mod_base = OTHER; note = 2'-deoxy-2'-fluoroadenosine-3'-phosphate
  modified_base 12: mod_base = OTHER; note = 2'-O-methyladenosine-3'-phosphate
  modified_base 13: mod_base = OTHER; note = 2'-O-methylcytidine-3'-phosphate
  modified_base 14: mod_base = OTHER; note = 2'-O-methyluridine-3'-phosphate
  modified_base 15: mod_base = OTHER; note = 2'-O-methylcytidine-3'-phosphate
  modified_base 16: mod_base = OTHER; note = 2'-O-methyladenosine-3'-phosphate
  modified_base 17: mod_base = OTHER; note = 2'-O-methylguanosine-3'-phosphate
  modified_base 18: mod_base = OTHER; note = 2'-O-methylguanosine-3'-phosphate
  modified_base 19: mod_base = OTHER; note = 2'-O-methyladenosine-3'-phosphate
  modified_base 20: mod_base = OTHER; note = 2'-O-methyluridine-3'-phosphate
  modified_base 21: mod_base = OTHER; note = 2'-O-methylguanosine-3'-phosphate ((2S,4R)-1-[29-[[2-(acetylamino)-2-deoxy-beta-D-galactopyra nosyl]oxy]-14,14-bis[[3-[[3-[[5-[[2-(acetylamino)-2-deoxy-b eta-D-galactopyranosyl]oxy]-1-oxopentyl]amino]propyl]amino] -3-oxopropoxy]methyl]-1,12,19,25-tetraoxo-16-oxa-13,20,24-t riazanonacos-1-yl]-4-hydroxy-2-pyrrolidinyl)methyl ester
ctgccgccacaactcaggatg

SEQ ID NO: 2757 - RNA, 23 nt, synthetic construct
  source 1..23: mol_type = other RNA
  modified_base 1: mod_base = OTHER; note = 2'-O-methylcytidine-3'-phosphorothioate
  modified_base 2: mod_base = OTHER; note = 2'-deoxy-2'-fluoroadenosine-3'-phosphorothioate
  modified_base 3: mod_base = OTHER; note = 2'-O-methyluridine-3'-phosphate
  modified_base 4: mod_base = OTHER; note = 2'-O-methylcytidine-3'-phosphate
  modified_base 5: mod_base = OTHER; note = 2'-O-methylcytidine-3'-phosphate
  modified_base 6: mod_base = OTHER; note = 2'-deoxy-2'-fluorouridine-3'-phosphate
  modified_base 7: mod_base = OTHER; note = 2'-O-methylguanosine-3'-phosphate
  modified_base 8: mod_base = OTHER; note = 2'-deoxy-2'-fluoroadenosine-3'-phosphate
  modified_base 9: mod_base = OTHER; note = 2'-deoxy-2'-fluoroguanosine-3'-phosphate
  modified_base 10: mod_base = OTHER; note = 2'-O-methyluridine-3'-phosphate
  modified_base 11: mod_base = OTHER; note = 2'-O-methyluridine-3'-phosphate
  modified_base 12: mod_base = OTHER; note = 2'-O-methylguanosine-3'-phosphate
  modified_base 13: mod_base = OTHER; note = 2'-O-methyluridine-3'-phosphate
  modified_base 14: mod_base = OTHER; note = 2'-deoxy-2'-fluoroguanosine-3'-phosphate
  modified_base 15: mod_base = OTHER; note = 2'-O-methylguanosine-3'-phosphate
  modified_base 16: mod_base = OTHER; note = 2'-deoxy-2'-fluorocytidine-3'-phosphate
  modified_base 17: mod_base = OTHER; note = 2'-O-methylguanosine-3'-phosphate
  modified_base 18: mod_base = OTHER; note = 2'-O-methylguanosine-3'-phosphate
  modified_base 19: mod_base = OTHER; note = 2'-O-methylcytidine-3'-phosphate
  modified_base 20: mod_base = OTHER; note = 2'-O-methyladenosine-3'-phosphate
  modified_base 21: mod_base = OTHER; note = 2'-O-methylguanosine-3'-phosphorothioate
  modified_base 22: mod_base = OTHER; note = 2'-O-methyluridine-3'-phosphorothioate
  modified_base 23: mod_base = OTHER; note = 2'-O-methyluridine
catcctgagttgtggcggcagtt

SEQ ID NO: 2758 - RNA, 21 nt, synthetic construct
  source 1..21: mol_type = other RNA
  modified_base 1: mod_base = OTHER; note = 2'-O-methyluridine-3'-phosphorothioate
  modified_base 2: mod_base = OTHER; note = 2'-O-methylcytidine-3'-phosphorothioate
  modified_base 3: mod_base = OTHER; note = 2'-O-methyladenosine-3'-phosphate
  modified_base 4: mod_base = OTHER; note = 2'-O-methyladenosine-3'-phosphate
  modified_base 5: mod_base = OTHER; note = 2'-O-methyladenosine-3'-phosphate
  modified_base 6: mod_base = OTHER; note = 2'-O-methylcytidine-3'-phosphate
  modified_base 7: mod_base = OTHER; note = 2'-deoxy-2'-fluorouridine-3'-phosphate
  modified_base 8: mod_base = OTHER; note = 2'-O-methylguanosine-3'-phosphate
  modified_base 9: mod_base = OTHER; note = 2'-deoxy-2'-fluorocytidine-3'-phosphate
  modified_base 10: mod_base = OTHER; note = 2'-deoxy-2'-fluorocytidine-3'-phosphate
  modified_base 11: mod_base = OTHER; note = 2'-deoxy-2'-fluoroguanosine-3'-phosphate
  modified_base 12: mod_base = OTHER; note = 2'-O-methylcytidine-3'-phosphate
  modified_base 13: mod_base = OTHER; note = 2'-O-methylcytidine-3'-phosphate
  modified_base 14: mod_base = OTHER; note = 2'-O-methyladenosine-3'-phosphate
  modified_base 15: mod_base = OTHER; note = 2'-O-methylcytidine-3'-phosphate
  modified_base 16: mod_base = OTHER; note = 2'-O-methyladenosine-3'-phosphate
  modified_base 17: mod_base = OTHER; note = 2'-O-methyladenosine-3'-phosphate
  modified_base 18: mod_base = OTHER; note = 2'-O-methylcytidine-3'-phosphate
  modified_base 19: mod_base = OTHER; note = 2'-O-methyluridine-3'-phosphate
  modified_base 20: mod_base = OTHER; note = 2'-O-methylcytidine-3'-phosphate
  modified_base 21: mod_base = OTHER; note = 2'-O-methyladenosine-3'-phosphate ((2S,4R)-1-[29-[[2-(acetylamino)-2-deoxy-beta-D-galactopyra nosyl]oxy]-14,14-bis[[3-[[3-[[5-[[2-(acetylamino)-2-deoxy-b eta-D-galactopyranosyl]oxy]-1-oxopentyl]amino]propyl]amino] -3-oxopropoxy]methyl]-1,12,19,25-tetraoxo-16-oxa-13,20,24-t riazanonacos-1-yl]-4-hydroxy-2-pyrrolidinyl)methyl ester
tcaaactgccgccacaactca

SEQ ID NO: 2759 - RNA, 23 nt, synthetic construct
  source 1..23: mol_type = other RNA
  modified_base 1: mod_base = OTHER; note = 2'-O-methyluridine-3'-phosphorothioate
  modified_base 2: mod_base = OTHER; note = 2'-deoxy-2'-fluoroguanosine-3'-phosphorothioate
  modified_base 3: mod_base = OTHER; note = 2'-O-methyladenosine-3'-phosphate
  modified_base 4: mod_base = OTHER; note = 2'-O-methylguanosine-3'-phosphate
  modified_base 5: mod_base = OTHER; note = 2'-O-methyluridine-3'-phosphate
  modified_base 6: mod_base = OTHER; note = 2'-deoxy-2'-fluorouridine-3'-phosphate
  modified_base 7: mod_base = OTHER; note = 2'-O-methylguanosine-3'-phosphate
  modified_base 8: mod_base = OTHER; note = 2'-deoxy-2'-fluorouridine-3'-phosphate
  modified_base 9: mod_base = OTHER; note = 2'-deoxy-2'-fluoroguanosine-3'-phosphate
  modified_base 10: mod_base = OTHER; note = 2'-O-methylguanosine-3'-phosphate
  modified_base 11: mod_base = OTHER; note = 2'-O-methylcytidine-3'-phosphate
  modified_base 12: mod_base = OTHER; note = 2'-O-methylguanosine-3'-phosphate
  modified_base 13: mod_base = OTHER; note = 2'-O-methylguanosine-3'-phosphate
  modified_base 14: mod_base = OTHER; note = 2'-deoxy-2'-fluorocytidine-3'-phosphate
  modified_base 15: mod_base = OTHER; note = 2'-O-methyladenosine-3'-phosphate
  modified_base 16: mod_base = OTHER; note = 2'-deoxy-2'-fluoroguanosine-3'-phosphate
  modified_base 17: mod_base = OTHER; note = 2'-O-methyluridine-3'-phosphate
  modified_base 18: mod_base = OTHER; note = 2'-O-methyluridine-3'-phosphate
  modified_base 19: mod_base = OTHER; note = 2'-O-methyluridine-3'-phosphate
  modified_base 20: mod_base = OTHER; note = 2'-O-methylguanosine-3'-phosphate
  modified_base 21: mod_base = OTHER; note = 2'-O-methyladenosine-3'-phosphorothioate
  modified_base 22: mod_base = OTHER; note = 2'-O-methyladenosine-3'-phosphorothioate
  modified_base 23: mod_base = OTHER; note = 2'-O-methyluridine
tgagttgtggcggcagtttgaat

SEQ ID NO: 2760 - RNA, 21 nt, synthetic construct
  source 1..21: mol_type = other RNA
  modified_base 1: mod_base = OTHER; note = 2'-O-methyluridine-3'-phosphorothioate
  modified_base 2: mod_base = OTHER; note = 2'-O-methyluridine-3'-phosphorothioate
  modified_base 3: mod_base = OTHER; note = 2'-O-methylcytidine-3'-phosphate
  modified_base 4: mod_base = OTHER; note = 2'-O-methyladenosine-3'-phosphate
  modified_base 5: mod_base = OTHER; note = 2'-O-methyladenosine-3'-phosphate
  modified_base 6: mod_base = OTHER; note = 2'-O-methyladenosine-3'-phosphate
  modified_base 7: mod_base = OTHER; note = 2'-deoxy-2'-fluorocytidine-3'-phosphate
  modified_base 8: mod_base = OTHER; note = 2'-O-methyluridine-3'-phosphate
  modified_base 9: mod_base = OTHER; note = 2'-deoxy-2'-fluoroguanosine-3'-phosphate
  modified_base 10: mod_base = OTHER; note = 2'-deoxy-2'-fluorocytidine-3'-phosphate
  modified_base 11: mod_base = OTHER; note = 2'-deoxy-2'-fluorocytidine-3'-phosphate
  modified_base 12: mod_base = OTHER; note = 2'-O-methylguanosine-3'-phosphate
  modified_base 13: mod_base = OTHER; note = 2'-O-methylcytidine-3'-phosphate
  modified_base 14: mod_base = OTHER; note = 2'-O-methylcytidine-3'-phosphate
  modified_base 15: mod_base = OTHER; note = 2'-O-methyladenosine-3'-phosphate
  modified_base 16: mod_base = OTHER; note = 2'-O-methylcytidine-3'-phosphate
  modified_base 17: mod_base = OTHER; note = 2'-O-methyladenosine-3'-phosphate
  modified_base 18: mod_base = OTHER; note = 2'-O-methyladenosine-3'-phosphate
  modified_base 19: mod_base = OTHER; note = 2'-O-methylcytidine-3'-phosphate
  modified_base 20: mod_base = OTHER; note = 2'-O-methyluridine-3'-phosphate
  modified_base 21: mod_base = OTHER; note = 2'-O-methylcytidine-3'-phosphate ((2S,4R)-1-[29-[[2-(acetylamino)-2-deoxy-beta-D-galactopyra nosyl]oxy]-14,14-bis[[3-[[3-[[5-[[2-(acetylamino)-2-deoxy-b eta-D-galactopyranosyl]oxy]-1-oxopentyl]amino]propyl]amino] -3-oxopropoxy]methyl]-1,12,19,25-tetraoxo-16-oxa-13,20,24-t riazanonacos-1-yl]-4-hydroxy-2-pyrrolidinyl)methyl ester
ttcaaactgccgccacaactc

SEQ ID NO: 2761 - RNA, 23 nt, synthetic construct
  source 1..23: mol_type = other RNA
  modified_base 1: mod_base = OTHER; note = 2'-O-methylguanosine-3'-phosphorothioate
  modified_base 2: mod_base = OTHER; note = 2'-deoxy-2'-fluoroadenosine-3'-phosphorothioate
  modified_base 3: mod_base = OTHER; note = 2'-O-methylguanosine-3'-phosphate
  modified_base 4: mod_base = OTHER; note = 2'-O-methyluridine-3'-phosphate
  modified_base 5: mod_base = OTHER; note = 2'-O-methyluridine-3'-phosphate
  modified_base 6: mod_base = OTHER; note = 2'-deoxy-2'-fluoroguanosine-3'-phosphate
  modified_base 7: mod_base = OTHER; note = 2'-O-methyluridine-3'-phosphate
  modified_base 8: mod_base = OTHER; note = 2'-deoxy-2'-fluoroguanosine-3'-phosphate
  modified_base 9: mod_base = OTHER; note = 2'-deoxy-2'-fluoroguanosine-3'-phosphate
  modified_base 10: mod_base = OTHER; note = 2'-O-methylcytidine-3'-phosphate
  modified_base 11: mod_base = OTHER; note = 2'-O-methylguanosine-3'-phosphate
  modified_base 12: mod_base = OTHER; note = 2'-O-methylguanosine-3'-phosphate
  modified_base 13: mod_base = OTHER; note = 2'-O-methylcytidine-3'-phosphate
  modified_base 14: mod_base = OTHER; note = 2'-deoxy-2'-fluoroadenosine-3'-phosphate
  modified_base 15: mod_base = OTHER; note = 2'-O-methylguanosine-3'-phosphate
  modified_base 16: mod_base = OTHER; note = 2'-deoxy-2'-fluorouridine-3'-phosphate
  modified_base 17: mod_base = OTHER; note = 2'-O-methyluridine-3'-phosphate
  modified_base 18: mod_base = OTHER; note = 2'-O-methyluridine-3'-phosphate
  modified_base 19: mod_base = OTHER; note = 2'-O-methylguanosine-3'-phosphate
  modified_base 20: mod_base = OTHER; note = 2'-O-methyladenosine-3'-phosphate
  modified_base 21: mod_base = OTHER; note = 2'-O-methyladenosine-3'-phosphorothioate
  modified_base 22: mod_base = OTHER; note = 2'-O-methyluridine-3'-phosphorothioate
  modified_base 23: mod_base = OTHER; note = 2'-O-methylcytidine
gagttgtggcggcagtttgaatc

SEQ ID NO: 2762 - RNA, 21 nt, synthetic construct
  source 1..21: mol_type = other RNA
  modified_base 1: mod_base = OTHER; note = 2'-O-methylguanosine-3'-phosphorothioate
  modified_base 2: mod_base = OTHER; note = 2'-O-methylguanosine-3'-phosphorothioate
  modified_base 3: mod_base = OTHER; note = 2'-O-methylguanosine-3'-phosphate
  modified_base 4: mod_base = OTHER; note = 2'-O-methyladenosine-3'-phosphate
  modified_base 5: mod_base = OTHER; note = 2'-O-methyladenosine-3'-phosphate
  modified_base 6: mod_base = OTHER; note = 2'-O-methylguanosine-3'-phosphate
  modified_base 7: mod_base = OTHER; note = 2'-deoxy-2'-fluoroadenosine-3'-phosphate
  modified_base 8: mod_base = OTHER; note = 2'-O-methyluridine-3'-phosphate
  modified_base 9: mod_base = OTHER; note = 2'-deoxy-2'-fluoroadenosine-3'-phosphate
  modified_base 10: mod_base = OTHER; note = 2'-deoxy-2'-fluorouridine-3'-phosphate
  modified_base 11: mod_base = OTHER; note = 2'-deoxy-2'-fluorocytidine-3'-phosphate
  modified_base 12: mod_base = OTHER; note = 2'-O-methyladenosine-3'-phosphate
  modified_base 13: mod_base = OTHER; note = 2'-O-methyladenosine-3'-phosphate
  modified_base 14: mod_base = OTHER; note = 2'-O-methyladenosine-3'-phosphate
  modified_base 15: mod_base = OTHER; note = 2'-O-methyluridine-3'-phosphate
  modified_base 16: mod_base = OTHER; note = 2'-O-methylguanosine-3'-phosphate
  modified_base 17: mod_base = OTHER; note = 2'-O-methylguanosine-3'-phosphate
  modified_base 18: mod_base = OTHER; note = 2'-O-methylcytidine-3'-phosphate
  modified_base 19: mod_base = OTHER; note = 2'-O-methyluridine-3'-phosphate
  modified_base 20: mod_base = OTHER; note = 2'-O-methylguanosine-3'-phosphate
  modified_base 21: mod_base = OTHER; note = 2'-O-methyladenosine-3'-phosphate ((2S,4R)-1-[29-[[2-(acetylamino)-2-deoxy-beta-D-galactopyra nosyl]oxy]-14,14-bis[[3-[[3-[[5-[[2-(acetylamino)-2-deoxy-b eta-D-galactopyranosyl]oxy]-1-oxopentyl]amino]propyl]amino] -3-oxopropoxy]methyl]-1,12,19,25-tetraoxo-16-oxa-13,20,24-t riazanonacos-1-yl]-4-hydroxy-2-pyrrolidinyl)methyl ester
gggaagatatcaaatggctga

SEQ ID NO: 2763 - RNA, 23 nt, synthetic construct
  source 1..23: mol_type = other RNA
  modified_base 1: mod_base = OTHER; note = 2'-O-methyluridine-3'-phosphorothioate
  modified_base 2: mod_base = OTHER; note = 2'-deoxy-2'-fluorocytidine-3'-phosphorothioate
  modified_base 3: mod_base = OTHER; note = 2'-O-methyladenosine-3'-phosphate
  modified_base 4: mod_base = OTHER; note = 2'-O-methylguanosine-3'-phosphate
  modified_base 5: mod_base = OTHER; note = 2'-O-methylcytidine-3'-phosphate
  modified_base 6: mod_base = OTHER; note = 2'-deoxy-2'-fluorocytidine-3'-phosphate
  modified_base 7: mod_base = OTHER; note = 2'-O-methyladenosine-3'-phosphate
  modified_base 8: mod_base = OTHER; note = 2'-deoxy-2'-fluorouridine-3'-phosphate
  modified_base 9: mod_base = OTHER; note = 2'-deoxy-2'-fluorouridine-3'-phosphate
  modified_base 10: mod_base = OTHER; note = 2'-O-methyluridine-3'-phosphate
  modified_base 11: mod_base = OTHER; note = 2'-O-methylguanosine-3'-phosphate
  modified_base 12: mod_base = OTHER; note = 2'-O-methyladenosine-3'-phosphate
  modified_base 13: mod_base = OTHER; note = 2'-O-methyluridine-3'-phosphate
  modified_base 14: mod_base = OTHER; note = 2'-deoxy-2'-fluoroadenosine-3'-phosphate
  modified_base 15: mod_base = OTHER; note = 2'-O-methyluridine-3'-phosphate
  modified_base 16: mod_base = OTHER; note = 2'-deoxy-2'-fluorocytidine-3'-phosphate
  modified_base 17: mod_base = OTHER; note = 2'-O-methyluridine-3'-phosphate
  modified_base 18: mod_base = OTHER; note = 2'-O-methyluridine-3'-phosphate
  modified_base 19: mod_base = OTHER; note = 2'-O-methylcytidine-3'-phosphate
  modified_base 20: mod_base = OTHER; note = 2'-O-methylcytidine-3'-phosphate
  modified_base 21: mod_base = OTHER; note = 2'-O-methylcytidine-3'-phosphorothioate
  modified_base 22: mod_base = OTHER; note = 2'-O-methyladenosine-3'-phosphorothioate
  modified_base 23: mod_base = OTHER; note = 2'-O-methylguanosine
tcagccatttgatatcttcccag

SEQ ID NO: 2764 - RNA, 21 nt, synthetic construct
  source 1..21: mol_type = other RNA
  modified_base 1: mod_base = OTHER; note = 2'-O-methylguanosine-3'-phosphorothioate
  modified_base 2: mod_base = OTHER; note = 2'-O-methylguanosine-3'-phosphorothioate
  modified_base 3: mod_base = OTHER; note = 2'-O-methyladenosine-3'-phosphate
  modified_base 4: mod_base = OTHER; note = 2'-O-methyladenosine-3'-phosphate
  modified_base 5: mod_base = OTHER; note = 2'-O-methylguanosine-3'-phosphate
  modified_base 6: mod_base = OTHER; note = 2'-O-methyladenosine-3'-phosphate
  modified_base 7: mod_base = OTHER; note = 2'-deoxy-2'-fluorouridine-3'-phosphate
  modified_base 8: mod_base = OTHER; note = 2'-O-methyladenosine-3'-phosphate
  modified_base 9: mod_base = OTHER; note = 2'-deoxy-2'-fluorouridine-3'-phosphate
  modified_base 10: mod_base = OTHER; note = 2'-deoxy-2'-fluorocytidine-3'-phosphate
  modified_base 11: mod_base = OTHER; note = 2'-deoxy-2'-fluoroadenosine-3'-phosphate
  modified_base 12: mod_base = OTHER; note = 2'-O-methyladenosine-3'-phosphate
  modified_base 13: mod_base = OTHER; note = 2'-O-methyladenosine-3'-phosphate
  modified_base 14: mod_base = OTHER; note = 2'-O-methyluridine-3'-phosphate
  modified_base 15: mod_base = OTHER; note = 2'-O-methylguanosine-3'-phosphate
  modified_base 16: mod_base = OTHER; note = 2'-O-methylguanosine-3'-phosphate
  modified_base 17: mod_base = OTHER; note = 2'-O-methylcytidine-3'-phosphate
  modified_base 18: mod_base = OTHER; note = 2'-O-methyluridine-3'-phosphate
  modified_base 19: mod_base = OTHER; note = 2'-O-methylguanosine-3'-phosphate
  modified_base 20: mod_base = OTHER; note = 2'-O-methyladenosine-3'-phosphate
  modified_base 21: mod_base = OTHER; note = 2'-O-methylguanosine-3'-phosphate ((2S,4R)-1-[29-[[2-(acetylamino)-2-deoxy-beta-D-galactopyra nosyl]oxy]-14,14-bis[[3-[[3-[[5-[[2-(acetylamino)-2-deoxy-b eta-D-galactopyranosyl]oxy]-1-oxopentyl]amino]propyl]amino] -3-oxopropoxy]methyl]-1,12,19,25-tetraoxo-16-oxa-13,20,24-t riazanonacos-1-yl]-4-hydroxy-2-pyrrolidinyl)methyl ester
ggaagatatcaaatggctgag

SEQ ID NO: 2765 - RNA, 23 nt, synthetic construct
  source 1..23: mol_type = other RNA
  modified_base 1: mod_base = OTHER; note = 2'-O-methylcytidine-3'-phosphorothioate
  modified_base 2: mod_base = OTHER; note = 2'-deoxy-2'-fluorouridine-3'-phosphorothioate
  modified_base 3: mod_base = OTHER; note = 2'-O-methylcytidine-3'-phosphate
  modified_base 4: mod_base = OTHER; note = 2'-O-methyladenosine-3'-phosphate
  modified_base 5: mod_base = OTHER; note = 2'-O-methylguanosine-3'-phosphate
  modified_base 6: mod_base = OTHER; note = 2'-deoxy-2'-fluorocytidine-3'-phosphate
  modified_base 7: mod_base = OTHER; note = 2'-O-methylcytidine-3'-phosphate
  modified_base 8: mod_base = OTHER; note = 2'-deoxy-2'-fluoroadenosine-3'-phosphate
  modified_base 9: mod_base = OTHER; note = 2'-deoxy-2'-fluorouridine-3'-phosphate
  modified_base 10: mod_base = OTHER; note = 2'-O-methyluridine-3'-phosphate
  modified_base 11: mod_base = OTHER; note = 2'-O-methyluridine-3'-phosphate
  modified_base 12: mod_base = OTHER; note = 2'-O-methylguanosine-3'-phosphate
  modified_base 13: mod_base = OTHER; note = 2'-O-methyladenosine-3'-phosphate
  modified_base 14: mod_base = OTHER; note = 2'-deoxy-2'-fluorouridine-3'-phosphate
  modified_base 15: mod_base = OTHER; note = 2'-O-methyladenosine-3'-phosphate
  modified_base 16: mod_base = OTHER; note = 2'-deoxy-2'-fluorouridine-3'-phosphate
  modified_base 17: mod_base = OTHER; note = 2'-O-methylcytidine-3'-phosphate
  modified_base 18: mod_base = OTHER; note = 2'-O-methyluridine-3'-phosphate
  modified_base 19: mod_base = OTHER; note = 2'-O-methyluridine-3'-phosphate
  modified_base 20: mod_base = OTHER; note = 2'-O-methylcytidine-3'-phosphate
  modified_base 21: mod_base = OTHER; note = 2'-O-methylcytidine-3'-phosphorothioate
  modified_base 22: mod_base = OTHER; note = 2'-O-methylcytidine-3'-phosphorothioate
  modified_base 23: mod_base = OTHER; note = 2'-O-methyladenosine
ctcagccatttgatatcttccca

SEQ ID NO: 2766 - RNA, 21 nt, synthetic construct
  source 1..21: mol_type = other RNA
  modified_base 1: mod_base = OTHER; note = 2'-O-methyladenosine-3'-phosphorothioate
  modified_base 2: mod_base = OTHER; note = 2'-O-methylguanosine-3'-phosphorothioate
  modified_base 3: mod_base = OTHER; note = 2'-O-methylcytidine-3'-phosphate
  modified_base 4: mod_base = OTHER; note = 2'-O-methyluridine-3'-phosphate
  modified_base 5: mod_base = OTHER; note = 2'-O-methylguanosine-3'-phosphate
  modified_base 6: mod_base = OTHER; note = 2'-O-methylguanosine-3'-phosphate
  modified_base 7: mod_base = OTHER; note = 2'-deoxy-2'-fluoroguanosine-3'-phosphate
  modified_base 8: mod_base = OTHER; note = 2'-O-methyladenosine-3'-phosphate
  modified_base 9: mod_base = OTHER; note = 2'-deoxy-2'-fluoroadenosine-3'-phosphate
  modified_base 10: mod_base = OTHER; note = 2'-deoxy-2'-fluoroguanosine-3'-phosphate
  modified_base 11: mod_base = OTHER; note = 2'-deoxy-2'-fluoroadenosine-3'-phosphate
  modified_base 12: mod_base = OTHER; note = 2'-O-methyluridine-3'-phosphate
  modified_base 13: mod_base = OTHER; note = 2'-O-methyladenosine-3'-phosphate
  modified_base 14: mod_base = OTHER; note = 2'-O-methyluridine-3'-phosphate
  modified_base 15: mod_base = OTHER; note = 2'-O-methylcytidine-3'-phosphate
  modified_base 16: mod_base = OTHER; note = 2'-O-methyladenosine-3'-phosphate
  modified_base 17: mod_base = OTHER; note = 2'-O-methyladenosine-3'-phosphate
  modified_base 18: mod_base = OTHER; note = 2'-O-methyladenosine-3'-phosphate
  modified_base 19: mod_base = OTHER; note = 2'-O-methyluridine-3'-phosphate
  modified_base 20: mod_base = OTHER; note = 2'-O-methylguanosine-3'-phosphate
  modified_base 21: mod_base = OTHER; note = 2'-O-methylguanosine-3'-phosphate ((2S,4R)-1-[29-[[2-(acetylamino)-2-deoxy-beta-D-galactopyra nosyl]oxy]-14,14-bis[[3-[[3-[[5-[[2-(acetylamino)-2-deoxy-b eta-D-galactopyranosyl]oxy]-1-oxopentyl]amino]propyl]amino] -3-oxopropoxy]methyl]-1,12,19,25-tetraoxo-16-oxa-13,20,24-t riazanonacos-1-yl]-4-hydroxy-2-pyrrolidinyl)methyl ester
agctgggaagatatcaaatgg

SEQ ID NO: 2767 - RNA, 23 nt, synthetic construct
  source 1..23: mol_type = other RNA
  modified_base 1: mod_base = OTHER; note = 2'-O-methylcytidine-3'-phosphorothioate
  modified_base 2: mod_base = OTHER; note = 2'-deoxy-2'-fluorocytidine-3'-phosphorothioate
  modified_base 3: mod_base = OTHER; note = 2'-O-methyladenosine-3'-phosphate
  modified_base 4: mod_base = OTHER; note = 2'-O-methyluridine-3'-phosphate
  modified_base 5: mod_base = OTHER; note = 2'-O-methyluridine-3'-phosphate
  modified_base 6: mod_base = OTHER; note = 2'-deoxy-2'-fluorouridine-3'-phosphate
  modified_base 7: mod_base = OTHER; note = 2'-O-methylguanosine-3'-phosphate
  modified_base 8: mod_base = OTHER; note = 2'-deoxy-2'-fluoroadenosine-3'-phosphate
  modified_base 9: mod_base = OTHER; note = 2'-deoxy-2'-fluorouridine-3'-phosphate
  modified_base 10: mod_base = OTHER; note = 2'-O-methyladenosine-3'-phosphate
  modified_base 11: mod_base = OTHER; note = 2'-O-methyluridine-3'-phosphate
  modified_base 12: mod_base = OTHER; note = 2'-O-methylcytidine-3'-phosphate
  modified_base 13: mod_base = OTHER; note = 2'-O-methyluridine-3'-phosphate
  modified_base 14: mod_base = OTHER; note = 2'-deoxy-2'-fluorouridine-3'-phosphate
  modified_base 15: mod_base = OTHER; note = 2'-O-methylcytidine-3'-phosphate
  modified_base 16: mod_base = OTHER; note = 2'-deoxy-2'-fluorocytidine-3'-phosphate
  modified_base 17: mod_base = OTHER; note = 2'-O-methylcytidine-3'-phosphate
  modified_base 18: mod_base = OTHER; note = 2'-O-methyladenosine-3'-phosphate
  modified_base 19: mod_base = OTHER; note = 2'-O-methylguanosine-3'-phosphate
  modified_base 20: mod_base = OTHER; note = 2'-O-methylcytidine-3'-phosphate
  modified_base 21: mod_base = OTHER; note = 2'-O-methyluridine-3'-phosphorothioate
  modified_base 22: mod_base = OTHER; note = 2'-O-methylguanosine-3'-phosphorothioate
  modified_base 23: mod_base = OTHER; note = 2'-O-methyladenosine
ccatttgatatcttcccagctga

SEQ ID NO: 2768 - RNA, 21 nt, synthetic construct
  source 1..21: mol_type = other RNA
  modified_base 1: mod_base = OTHER; note = 2'-O-methylcytidine-3'-phosphorothioate
  modified_base 2: mod_base = OTHER; note = 2'-O-methyladenosine-3'-phosphorothioate
  modified_base 3: mod_base = OTHER; note = 2'-O-methylguanosine-3'-phosphate
  modified_base 4: mod_base = OTHER; note = 2'-O-methylcytidine-3'-phosphate
  modified_base 5: mod_base = OTHER; note = 2'-O-methyluridine-3'-phosphate
  modified_base 6: mod_base = OTHER; note = 2'-O-methylguanosine-3'-phosphate
  modified_base 7: mod_base = OTHER; note = 2'-deoxy-2'-fluoroguanosine-3'-phosphate
  modified_base 8: mod_base = OTHER; note = 2'-O-methylguanosine-3'-phosphate
  modified_base 9: mod_base = OTHER; note = 2'-deoxy-2'-fluoroadenosine-3'-phosphate
  modified_base 10: mod_base = OTHER; note = 2'-deoxy-2'-fluoroadenosine-3'-phosphate
  modified_base 11: mod_base = OTHER; note = 2'-deoxy-2'-fluoroguanosine-3'-phosphate
  modified_base 12: mod_base = OTHER; note = 2'-O-methyladenosine-3'-phosphate
  modified_base 13: mod_base = OTHER; note = 2'-O-methyluridine-3'-phosphate
  modified_base 14: mod_base = OTHER; note = 2'-O-methyladenosine-3'-phosphate
  modified_base 15: mod_base = OTHER; note = 2'-O-methyluridine-3'-phosphate
  modified_base 16: mod_base = OTHER; note = 2'-O-methylcytidine-3'-phosphate
  modified_base 17: mod_base = OTHER; note = 2'-O-methyladenosine-3'-phosphate
  modified_base 18: mod_base = OTHER; note = 2'-O-methyladenosine-3'-phosphate
  modified_base 19: mod_base = OTHER; note = 2'-O-methyladenosine-3'-phosphate
  modified_base 20: mod_base = OTHER; note = 2'-O-methyluridine-3'-phosphate
  modified_base 21: mod_base = OTHER; note = 2'-O-methylguanosine-3'-phosphate ((2S,4R)-1-[29-[[2-(acetylamino)-2-deoxy-beta-D-galactopyra nosyl]oxy]-14,14-bis[[3-[[3-[[5-[[2-(acetylamino)-2-deoxy-b eta-D-galactopyranosyl]oxy]-1-oxopentyl]amino]propyl]amino] -3-oxopropoxy]methyl]-1,12,19,25-tetraoxo-16-oxa-13,20,24-t riazanonacos-1-yl]-4-hydroxy-2-pyrrolidinyl)methyl ester
cagctgggaagatatcaaatg

SEQ ID NO: 2769 - RNA, 23 nt, synthetic construct
  source 1..23: mol_type = other RNA
  modified_base 1: mod_base = OTHER; note = 2'-O-methylcytidine-3'-phosphorothioate
  modified_base 2: mod_base = OTHER; note = 2'-deoxy-2'-fluoroadenosine-3'-phosphorothioate
  modified_base 3: mod_base = OTHER; note = 2'-O-methyluridine-3'-phosphate
  modified_base 4: mod_base = OTHER; note = 2'-O-methyluridine-3'-phosphate
  modified_base 5: mod_base = OTHER; note = 2'-O-methyluridine-3'-phosphate
  modified_base 6: mod_base = OTHER; note = 2'-deoxy-2'-fluoroguanosine-3'-phosphate
  modified_base 7: mod_base = OTHER; note = 2'-O-methyladenosine-3'-phosphate
  modified_base 8: mod_base = OTHER; note = 2'-deoxy-2'-fluorouridine-3'-phosphate
  modified_base 9: mod_base = OTHER; note = 2'-deoxy-2'-fluoroadenosine-3'-phosphate
  modified_base 10: mod_base = OTHER; note = 2'-O-methyluridine-3'-phosphate
  modified_base 11: mod_base = OTHER; note = 2'-O-methylcytidine-3'-phosphate
  modified_base 12: mod_base = OTHER; note = 2'-O-methyluridine-3'-phosphate
  modified_base 13: mod_base = OTHER; note = 2'-O-methyluridine-3'-phosphate
  modified_base 14: mod_base = OTHER; note = 2'-deoxy-2'-fluorocytidine-3'-phosphate
  modified_base 15: mod_base = OTHER; note = 2'-O-methylcytidine-3'-phosphate
  modified_base 16: mod_base = OTHER; note = 2'-deoxy-2'-fluorocytidine-3'-phosphate
  modified_base 17: mod_base = OTHER; note = 2'-O-methyladenosine-3'-phosphate
  modified_base 18: mod_base = OTHER; note = 2'-O-methylguanosine-3'-phosphate
  modified_base 19: mod_base = OTHER; note = 2'-O-methylcytidine-3'-phosphate
  modified_base 20: mod_base = OTHER; note = 2'-O-methyluridine-3'-phosphate
  modified_base 21: mod_base = OTHER; note = 2'-O-methylguanosine-3'-phosphorothioate
  modified_base 22: mod_base = OTHER; note = 2'-O-methyladenosine-3'-phosphorothioate
  modified_base 23: mod_base = OTHER; note = 2'-O-methyluridine
catttgatatcttcccagctgat

SEQ ID NO: 2770 - RNA, 21 nt, synthetic construct
  source 1..21: mol_type = other RNA
  modified_base 1: mod_base = OTHER; note = 2'-O-methyladenosine-3'-phosphorothioate
  modified_base 2: mod_base = OTHER; note = 2'-O-methyladenosine-3'-phosphorothioate
  modified_base 3: mod_base = OTHER; note = 2'-O-methyluridine-3'-phosphate
  modified_base 4: mod_base = OTHER; note = 2'-O-methylcytidine-3'-phosphate
  modified_base 5: mod_base = OTHER; note = 2'-O-methyladenosine-3'-phosphate
  modified_base 6: mod_base = OTHER; note = 2'-O-methylguanosine-3'-phosphate
  modified_base 7: mod_base = OTHER; note = 2'-deoxy-2'-fluorouridine-3'-phosphate
  modified_base 8: mod_base = OTHER; note = 2'-O-methyladenosine-3'-phosphate
  modified_base 9: mod_base = OTHER; note = 2'-deoxy-2'-fluorocytidine-3'-phosphate
  modified_base 10: mod_base = OTHER; note = 2'-deoxy-2'-fluorouridine-3'-phosphate
  modified_base 11: mod_base = OTHER; note = 2'-deoxy-2'-fluorouridine-3'-phosphate
  modified_base 12: mod_base = OTHER; note = 2'-O-methylcytidine-3'-phosphate
  modified_base 13: mod_base = OTHER; note = 2'-O-methylcytidine-3'-phosphate
  modified_base 14: mod_base = OTHER; note = 2'-O-methyladenosine-3'-phosphate
  modified_base 15: mod_base = OTHER; note = 2'-O-methyladenosine-3'-phosphate
  modified_base 16: mod_base = OTHER; note = 2'-O-methyladenosine-3'-phosphate
  modified_base 17: mod_base = OTHER; note = 2'-O-methylguanosine-3'-phosphate
  modified_base 18: mod_base = OTHER; note = 2'-O-methyluridine-3'-phosphate
  modified_base 19: mod_base = OTHER; note = 2'-O-methylcytidine-3'-phosphate
  modified_base 20: mod_base = OTHER; note = 2'-O-methyluridine-3'-phosphate
  modified_base 21: mod_base = OTHER; note = 2'-O-methyladenosine-3'-phosphate ((2S,4R)-1-[29-[[2-(acetylamino)-2-deoxy-beta-D-galactopyra nosyl]oxy]-14,14-bis[[3-[[3-[[5-[[2-(acetylamino)-2-deoxy-b eta-D-galactopyranosyl]oxy]-1-oxopentyl]amino]propyl]amino] -3-oxopropoxy]methyl]-1,12,19,25-tetraoxo-16-oxa-13,20,24-t riazanonacos-1-yl]-4-hydroxy-2-pyrrolidinyl)methyl ester
aatcagtacttccaaagtcta

SEQ ID NO: 2771 - RNA, 23 nt, synthetic construct
  source 1..23: mol_type = other RNA
  modified_base 1: mod_base = OTHER; note = 2'-O-methyluridine-3'-phosphorothioate
  modified_base 2: mod_base = OTHER; note = 2'-deoxy-2'-fluoroadenosine-3'-phosphorothioate
  modified_base 3: mod_base = OTHER; note = 2'-O-methylguanosine-3'-phosphate
  modified_base 4: mod_base = OTHER; note = 2'-O-methyladenosine-3'-phosphate
  modified_base 5: mod_base = OTHER; note = 2'-O-methylcytidine-3'-phosphate
  modified_base 6: mod_base = OTHER; note = 2'-deoxy-2'-fluorouridine-3'-phosphate
  modified_base 7: mod_base = OTHER; note = 2'-O-methyluridine-3'-phosphate
  modified_base 8: mod_base = OTHER; note = 2'-deoxy-2'-fluorouridine-3'-phosphate
  modified_base 9: mod_base = OTHER; note = 2'-deoxy-2'-fluoroguanosine-3'-phosphate
  modified_base 10: mod_base = OTHER; note = 2'-O-methylguanosine-3'-phosphate
  modified_base 11: mod_base = OTHER; note = 2'-O-methyladenosine-3'-phosphate
  modified_base 12: mod_base = OTHER; note = 2'-O-methyladenosine-3'-phosphate
  modified_base 13: mod_base = OTHER; note = 2'-O-methylguanosine-3'-phosphate
  modified_base 14: mod_base = OTHER; note = 2'-deoxy-2'-fluorouridine-3'-phosphate
  modified_base 15: mod_base = OTHER; note = 2'-O-methyladenosine-3'-phosphate
  modified_base 16: mod_base = OTHER; note = 2'-deoxy-2'-fluorocytidine-3'-phosphate
  modified_base 17: mod_base = OTHER; note = 2'-O-methyluridine-3'-phosphate
  modified_base 18: mod_base = OTHER; note = 2'-O-methylguanosine-3'-phosphate
  modified_base 19: mod_base = OTHER; note = 2'-O-methyladenosine-3'-phosphate
  modified_base 20: mod_base = OTHER; note = 2'-O-methyluridine-3'-phosphate
  modified_base 21: mod_base = OTHER; note = 2'-O-methyluridine-3'-phosphorothioate
  modified_base 22: mod_base = OTHER; note = 2'-O-methyluridine-3'-phosphorothioate
  modified_base 23: mod_base = OTHER; note = 2'-O-methyladenosine
tagactttggaagtactgattta

SEQ ID NO: 2772 - RNA, 21 nt, synthetic construct
  source 1..21: mol_type = other RNA
  modified_base 1: mod_base = OTHER; note = 2'-O-methyladenosine-3'-phosphorothioate
  modified_base 2: mod_base = OTHER; note = 2'-O-methyluridine-3'-phosphorothioate
  modified_base 3: mod_base = OTHER; note = 2'-O-methylcytidine-3'-phosphate
  modified_base 4: mod_base = OTHER; note = 2'-O-methyladenosine-3'-phosphate
  modified_base 5: mod_base = OTHER; note = 2'-O-methylguanosine-3'-phosphate
  modified_base 6: mod_base = OTHER; note = 2'-O-methyluridine-3'-phosphate
  modified_base 7: mod_base = OTHER; note = 2'-deoxy-2'-fluoroadenosine-3'-phosphate
  modified_base 8: mod_base = OTHER; note = 2'-O-methylcytidine-3'-phosphate
  modified_base 9: mod_base = OTHER; note = 2'-deoxy-2'-fluorouridine-3'-phosphate
  modified_base 10: mod_base = OTHER; note = 2'-deoxy-2'-fluorouridine-3'-phosphate
  modified_base 11: mod_base = OTHER; note = 2'-deoxy-2'-fluorocytidine-3'-phosphate
  modified_base 12: mod_base = OTHER; note = 2'-O-methylcytidine-3'-phosphate
  modified_base 13: mod_base = OTHER; note = 2'-O-methyladenosine-3'-phosphate
  modified_base 14: mod_base = OTHER; note = 2'-O-methyladenosine-3'-phosphate
  modified_base 15: mod_base = OTHER; note = 2'-O-methyladenosine-3'-phosphate
  modified_base 16: mod_base = OTHER; note = 2'-O-methylguanosine-3'-phosphate
  modified_base 17: mod_base = OTHER; note = 2'-O-methyluridine-3'-phosphate
  modified_base 18: mod_base = OTHER; note = 2'-O-methylcytidine-3'-phosphate
  modified_base 19: mod_base = OTHER; note = 2'-O-methyluridine-3'-phosphate
  modified_base 20: mod_base = OTHER; note = 2'-O-methyladenosine-3'-phosphate
  modified_base 21: mod_base = OTHER; note = 2'-O-methyluridine-3'-phosphate ((2S,4R)-1-[29-[[2-(acetylamino)-2-deoxy-beta-D-galactopyra nosyl]oxy]-14,14-bis[[3-[[3-[[5-[[2-(acetylamino)-2-deoxy-b eta-D-galactopyranosyl]oxy]-1-oxopentyl]amino]propyl]amino] -3-oxopropoxy]methyl]-1,12,19,25-tetraoxo-16-oxa-13,20,24-t riazanonacos-1-yl]-4-hydroxy-2-pyrrolidinyl)methyl ester
atcagtacttccaaagtctat

SEQ ID NO: 2773 - RNA, 23 nt, synthetic construct
  source 1..23: mol_type = other RNA
  modified_base 1: mod_base = OTHER; note = 2'-O-methyladenosine-3'-phosphorothioate
  modified_base 2: mod_base = OTHER; note = 2'-deoxy-2'-fluorouridine-3'-phosphorothioate
  modified_base 3: mod_base = OTHER; note = 2'-O-methyladenosine-3'-phosphate
  modified_base 4: mod_base = OTHER; note = 2'-O-methylguanosine-3'-phosphate
  modified_base 5: mod_base = OTHER; note = 2'-O-methyladenosine-3'-phosphate
  modified_base 6: mod_base = OTHER; note = 2'-deoxy-2'-fluorocytidine-3'-phosphate
  modified_base 7: mod_base = OTHER; note = 2'-O-methyluridine-3'-phosphate
  modified_base 8: mod_base = OTHER; note = 2'-deoxy-2'-fluorouridine-3'-phosphate
  modified_base 9: mod_base = OTHER; note = 2'-deoxy-2'-fluorouridine-3'-phosphate
  modified_base 10: mod_base = OTHER; note = 2'-O-methylguanosine-3'-phosphate
  modified_base 11: mod_base = OTHER; note = 2'-O-methylguanosine-3'-phosphate
  modified_base 12: mod_base = OTHER; note = 2'-O-methyladenosine-3'-phosphate
  modified_base 13: mod_base = OTHER; note = 2'-O-methyladenosine-3'-phosphate
  modified_base 14: mod_base = OTHER; note = 2'-deoxy-2'-fluoroguanosine-3'-phosphate
  modified_base 15: mod_base = OTHER; note = 2'-O-methyluridine-3'-phosphate
  modified_base 16: mod_base = OTHER; note = 2'-deoxy-2'-fluoroadenosine-3'-phosphate
  modified_base 17: mod_base = OTHER; note = 2'-O-methylcytidine-3'-phosphate
  modified_base 18: mod_base = OTHER; note = 2'-O-methyluridine-3'-phosphate
  modified_base 19: mod_base = OTHER; note = 2'-O-methylguanosine-3'-phosphate
  modified_base 20: mod_base = OTHER; note = 2'-O-methyladenosine-3'-phosphate
  modified_base 21: mod_base = OTHER; note = 2'-O-methyluridine-3'-phosphorothioate
  modified_base 22: mod_base = OTHER; note = 2'-O-methyluridine-3'-phosphorothioate
  modified_base 23: mod_base = OTHER; note = 2'-O-methyluridine
atagactttggaagtactgattt

SEQ ID NO: 2774 - RNA, 21 nt, synthetic construct
  source 1..21: mol_type = other RNA
  modified_base 1: mod_base = OTHER; note = 2'-O-methylguanosine-3'-phosphorothioate
  modified_base 2: mod_base = OTHER; note = 2'-O-methylcytidine-3'-phosphorothioate
  modified_base 3: mod_base = OTHER; note = 2'-O-methyluridine-3'-phosphate
  modified_base 4: mod_base = OTHER; note = 2'-O-methyladenosine-3'-phosphate
  modified_base 5: mod_base = OTHER; note = 2'-O-methyladenosine-3'-phosphate
  modified_base 6: mod_base = OTHER; note = 2'-O-methyladenosine-3'-phosphate
  modified_base 7: mod_base = OTHER; note = 2'-deoxy-2'-fluorouridine-3'-phosphate
  modified_base 8: mod_base = OTHER; note = 2'-O-methylcytidine-3'-phosphate
  modified_base 9: mod_base = OTHER; note = 2'-deoxy-2'-fluoroadenosine-3'-phosphate
  modified_base 10: mod_base = OTHER; note = 2'-deoxy-2'-fluoroguanosine-3'-phosphate
  modified_base 11: mod_base = OTHER; note = 2'-deoxy-2'-fluorouridine-3'-phosphate
  modified_base 12: mod_base = OTHER; note = 2'-O-methyladenosine-3'-phosphate
  modified_base 13: mod_base = OTHER; note = 2'-O-methylcytidine-3'-phosphate
  modified_base 14: mod_base = OTHER; note = 2'-O-methyluridine-3'-phosphate
  modified_base 15: mod_base = OTHER; note = 2'-O-methyluridine-3'-phosphate
  modified_base 16: mod_base = OTHER; note = 2'-O-methylcytidine-3'-phosphate
  modified_base 17: mod_base = OTHER; note = 2'-O-methylcytidine-3'-phosphate
  modified_base 18: mod_base = OTHER; note = 2'-O-methyladenosine-3'-phosphate
  modified_base 19: mod_base = OTHER; note = 2'-O-methyladenosine-3'-phosphate
  modified_base 20: mod_base = OTHER; note = 2'-O-methyladenosine-3'-phosphate
  modified_base 21: mod_base = OTHER; note = 2'-O-methylguanosine-3'-phosphate ((2S,4R)-1-[29-[[2-(acetylamino)-2-deoxy-beta-D-galactopyra nosyl]oxy]-14,14-bis[[3-[[3-[[5-[[2-(acetylamino)-2-deoxy-b eta-D-galactopyranosyl]oxy]-1-oxopentyl]amino]propyl]amino] -3-oxopropoxy]methyl]-1,12,19,25-tetraoxo-16-oxa-13,20,24-t riazanonacos-1-yl]-4-hydroxy-2-pyrrolidinyl)methyl ester
gctaaatcagtacttccaaag

SEQ ID NO: 2775 - RNA, 23 nt, synthetic construct
  source 1..23: mol_type = other RNA
  modified_base 1: mod_base = OTHER; note = 2'-O-methylcytidine-3'-phosphorothioate
  modified_base 2: mod_base = OTHER; note = 2'-deoxy-2'-fluorouridine-3'-phosphorothioate
  modified_base 3: mod_base = OTHER; note = 2'-O-methyluridine-3'-phosphate
  modified_base 4: mod_base = OTHER; note = 2'-O-methyluridine-3'-phosphate
  modified_base 5: mod_base = OTHER; note = 2'-O-methylguanosine-3'-phosphate
  modified_base 6: mod_base = OTHER; note = 2'-deoxy-2'-fluoroguanosine-3'-phosphate
  modified_base 7: mod_base = OTHER; note = 2'-O-methyladenosine-3'-phosphate
  modified_base 8: mod_base = OTHER; note = 2'-deoxy-2'-fluoroadenosine-3'-phosphate
  modified_base 9: mod_base = OTHER; note = 2'-deoxy-2'-fluoroguanosine-3'-phosphate
  modified_base 10: mod_base = OTHER; note = 2'-O-methyluridine-3'-phosphate
  modified_base 11: mod_base = OTHER; note = 2'-O-methyladenosine-3'-phosphate
  modified_base 12: mod_base = OTHER; note = 2'-O-methylcytidine-3'-phosphate
  modified_base 13: mod_base = OTHER; note = 2'-O-methyluridine-3'-phosphate
  modified_base 14: mod_base = OTHER; note = 2'-deoxy-2'-fluoroguanosine-3'-phosphate
  modified_base 15: mod_base = OTHER; note = 2'-O-methyladenosine-3'-phosphate
  modified_base 16: mod_base = OTHER; note = 2'-deoxy-2'-fluorouridine-3'-phosphate
  modified_base 17: mod_base = OTHER; note = 2'-O-methyluridine-3'-phosphate
  modified_base 18: mod_base = OTHER; note = 2'-O-methyluridine-3'-phosphate
  modified_base 19: mod_base = OTHER; note = 2'-O-methyladenosine-3'-phosphate
  modified_base 20: mod_base = OTHER; note = 2'-O-methylguanosine-3'-phosphate
  modified_base 21: mod_base = OTHER; note = 2'-O-methylcytidine-3'-phosphorothioate
  modified_base 22: mod_base = OTHER; note = 2'-O-methyladenosine-3'-phosphorothioate
  modified_base 23: mod_base = OTHER; note = 2'-O-methyluridine
ctttggaagtactgatttagcat

SEQ ID NO: 2776 - RNA, 21 nt, synthetic construct
  source 1..21: mol_type = other RNA
  modified_base 1: mod_base = OTHER; note = 2'-O-methyluridine-3'-phosphorothioate
  modified_base 2: mod_base = OTHER; note = 2'-O-methylguanosine-3'-phosphorothioate
  modified_base 3: mod_base = OTHER; note = 2'-O-methylcytidine-3'-phosphate
  modified_base 4: mod_base = OTHER; note = 2'-O-methyluridine-3'-phosphate
  modified_base 5: mod_base = OTHER; note = 2'-O-methyladenosine-3'-phosphate
  modified_base 6: mod_base = OTHER; note = 2'-O-methyladenosine-3'-phosphate
  modified_base 7: mod_base = OTHER; note = 2'-deoxy-2'-fluoroadenosine-3'-phosphate
  modified_base 8: mod_base = OTHER; note = 2'-O-methyluridine-3'-phosphate
  modified_base 9: mod_base = OTHER; note = 2'-deoxy-2'-fluorocytidine-3'-phosphate
  modified_base 10: mod_base = OTHER; note = 2'-deoxy-2'-fluoroadenosine-3'-phosphate
  modified_base 11: mod_base = OTHER; note = 2'-deoxy-2'-fluoroguanosine-3'-phosphate
  modified_base 12: mod_base = OTHER; note = 2'-O-methyluridine-3'-phosphate
  modified_base 13: mod_base = OTHER; note = 2'-O-methyladenosine-3'-phosphate
  modified_base 14: mod_base = OTHER; note = 2'-O-methylcytidine-3'-phosphate
  modified_base 15: mod_base = OTHER; note = 2'-O-methyluridine-3'-phosphate
  modified_base 16: mod_base = OTHER; note = 2'-O-methyluridine-3'-phosphate
  modified_base 17: mod_base = OTHER; note = 2'-O-methylcytidine-3'-phosphate
  modified_base 18: mod_base = OTHER; note = 2'-O-methylcytidine-3'-phosphate
  modified_base 19: mod_base = OTHER; note = 2'-O-methyladenosine-3'-phosphate
  modified_base 20: mod_base = OTHER; note = 2'-O-methyladenosine-3'-phosphate
  modified_base 21: mod_base = OTHER; note = 2'-O-methyladenosine-3'-phosphate ((2S,4R)-1-[29-[[2-(acetylamino)-2-deoxy-beta-D-galactopyra nosyl]oxy]-14,14-bis[[3-[[3-[[5-[[2-(acetylamino)-2-deoxy-b eta-D-galactopyranosyl]oxy]-1-oxopentyl]amino]propyl]amino] -3-oxopropoxy]methyl]-1,12,19,25-tetraoxo-16-oxa-13,20,24-t riazanonacos-1-yl]-4-hydroxy-2-pyrrolidinyl)methyl ester
tgctaaatcagtacttccaaa

SEQ ID NO: 2777 - RNA, 23 nt, synthetic construct
  source 1..23: mol_type = other RNA
  modified_base 1: mod_base = OTHER; note = 2'-O-methyluridine-3'-phosphorothioate
  modified_base 2: mod_base = OTHER; note = 2'-deoxy-2'-fluorouridine-3'-phosphorothioate
  modified_base 3: mod_base = OTHER; note = 2'-O-methyluridine-3'-phosphate
  modified_base 4: mod_base = OTHER; note = 2'-O-methylguanosine-3'-phosphate
  modified_base 5: mod_base = OTHER; note = 2'-O-methylguanosine-3'-phosphate
  modified_base 6: mod_base = OTHER; note = 2'-deoxy-2'-fluoroadenosine-3'-phosphate
  modified_base 7: mod_base = OTHER; note = 2'-O-methyladenosine-3'-phosphate
  modified_base 8: mod_base = OTHER; note = 2'-deoxy-2'-fluoroguanosine-3'-phosphate
  modified_base 9: mod_base = OTHER; note = 2'-deoxy-2'-fluorouridine-3'-phosphate
  modified_base 10: mod_base = OTHER; note = 2'-O-methyladenosine-3'-phosphate
  modified_base 11: mod_base = OTHER; note = 2'-O-methylcytidine-3'-phosphate
  modified_base 12: mod_base = OTHER; note = 2'-O-methyluridine-3'-phosphate
  modified_base 13: mod_base = OTHER; note = 2'-O-methylguanosine-3'-phosphate
  modified_base 14: mod_base = OTHER; note = 2'-deoxy-2'-fluoroadenosine-3'-phosphate
  modified_base 15: mod_base = OTHER; note = 2'-O-methyluridine-3'-phosphate
  modified_base 16: mod_base = OTHER; note = 2'-deoxy-2'-fluorouridine-3'-phosphate
  modified_base 17: mod_base = OTHER; note = 2'-O-methyluridine-3'-phosphate
  modified_base 18: mod_base = OTHER; note = 2'-O-methyladenosine-3'-phosphate
  modified_base 19: mod_base = OTHER; note = 2'-O-methylguanosine-3'-phosphate
  modified_base 20: mod_base = OTHER; note = 2'-O-methylcytidine-3'-phosphate
  modified_base 21: mod_base = OTHER; note = 2'-O-methyladenosine-3'-phosphorothioate
  modified_base 22: mod_base = OTHER; note = 2'-O-methyluridine-3'-phosphorothioate
  modified_base 23: mod_base = OTHER; note = 2'-O-methylguanosine
tttggaagtactgatttagcatg

SEQ ID NO: 2778 - RNA, 21 nt, synthetic construct
  source 1..21: mol_type = other RNA
  modified_base 1: mod_base = OTHER; note = 2'-O-methyluridine-3'-phosphorothioate
  modified_base 2: mod_base = OTHER; note = 2'-O-methylcytidine-3'-phosphorothioate
  modified_base 3: mod_base = OTHER; note = 2'-O-methyladenosine-3'-phosphate
  modified_base 4: mod_base = OTHER; note = 2'-O-methylguanosine-3'-phosphate
  modified_base 5: mod_base = OTHER; note = 2'-O-methylcytidine-3'-phosphate
  modified_base 6: mod_base = OTHER; note = 2'-O-methyladenosine-3'-phosphate
  modified_base 7: mod_base = OTHER; note = 2'-deoxy-2'-fluorouridine-3'-phosphate
  modified_base 8: mod_base = OTHER; note = 2'-O-methylguanosine-3'-phosphate
  modified_base 9: mod_base = OTHER; note = 2'-deoxy-2'-fluorocytidine-3'-phosphate
  modified_base 10: mod_base = OTHER; note = 2'-deoxy-2'-fluorocytidine-3'-phosphate
  modified_base 11: mod_base = OTHER; note = 2'-deoxy-2'-fluoroadenosine-3'-phosphate
  modified_base 12: mod_base = OTHER; note = 2'-O-methyladenosine-3'-phosphate
  modified_base 13: mod_base = OTHER; note = 2'-O-methyluridine-3'-phosphate
  modified_base 14: mod_base = OTHER; note = 2'-O-methyladenosine-3'-phosphate
  modified_base 15: mod_base = OTHER; note = 2'-O-methyluridine-3'-phosphate
  modified_base 16: mod_base = OTHER; note = 2'-O-methylguanosine-3'-phosphate
  modified_base 17: mod_base = OTHER; note = 2'-O-methyluridine-3'-phosphate
  modified_base 18: mod_base = OTHER; note = 2'-O-methylguanosine-3'-phosphate
  modified_base 19: mod_base = OTHER; note = 2'-O-methyluridine-3'-phosphate
  modified_base 20: mod_base = OTHER; note = 2'-O-methylguanosine-3'-phosphate
  modified_base 21: mod_base = OTHER; note = 2'-O-methylguanosine-3'-phosphate ((2S,4R)-1-[29-[[2-(acetylamino)-2-deoxy-beta-D-galactopyra nosyl]oxy]-14,14-bis[[3-[[3-[[5-[[2-(acetylamino)-2-deoxy-b eta-D-galactopyranosyl]oxy]-1-oxopentyl]amino]propyl]amino] -3-oxopropoxy]methyl]-1,12,19,25-tetraoxo-16-oxa-13,20,24-t riazanonacos-1-yl]-4-hydroxy-2-pyrrolidinyl)methyl ester
tcagcatgccaatatgtgtgg

SEQ ID NO: 2779 - RNA, 23 nt, synthetic construct
  source 1..23: mol_type = other RNA
  modified_base 1: mod_base = OTHER; note = 2'-O-methylcytidine-3'-phosphorothioate
  modified_base 2: mod_base = OTHER; note = 2'-deoxy-2'-fluorocytidine-3'-phosphorothioate
  modified_base 3: mod_base = OTHER; note = 2'-O-methyladenosine-3'-phosphate
  modified_base 4: mod_base = OTHER; note = 2'-O-methylcytidine-3'-phosphate
  modified_base 5: mod_base = OTHER; note = 2'-O-methyladenosine-3'-phosphate
  modified_base 6: mod_base = OTHER; note = 2'-deoxy-2'-fluorocytidine-3'-phosphate
  modified_base 7: mod_base = OTHER; note = 2'-O-methyladenosine-3'-phosphate
  modified_base 8: mod_base = OTHER; note = 2'-deoxy-2'-fluorouridine-3'-phosphate
  modified_base 9: mod_base = OTHER; note = 2'-deoxy-2'-fluoroadenosine-3'-phosphate
  modified_base 10: mod_base = OTHER; note = 2'-O-methyluridine-3'-phosphate
  modified_base 11: mod_base = OTHER; note = 2'-O-methyluridine-3'-phosphate
  modified_base 12: mod_base = OTHER; note = 2'-O-methylguanosine-3'-phosphate
  modified_base 13: mod_base = OTHER; note = 2'-O-methylguanosine-3'-phosphate
  modified_base 14: mod_base = OTHER; note = 2'-deoxy-2'-fluorocytidine-3'-phosphate
  modified_base 15: mod_base = OTHER; note = 2'-O-methyladenosine-3'-phosphate
  modified_base 16: mod_base = OTHER; note = 2'-deoxy-2'-fluorouridine-3'-phosphate
  modified_base 17: mod_base = OTHER; note = 2'-O-methylguanosine-3'-phosphate
  modified_base 18: mod_base = OTHER; note = 2'-O-methylcytidine-3'-phosphate
  modified_base 19: mod_base = OTHER; note = 2'-O-methyluridine-3'-phosphate
  modified_base 20: mod_base = OTHER; note = 2'-O-methylguanosine-3'-phosphate
  modified_base 21: mod_base = OTHER; note = 2'-O-methyladenosine-3'-phosphorothioate
  modified_base 22: mod_base = OTHER; note = 2'-O-methylcytidine-3'-phosphorothioate
  modified_base 23: mod_base = OTHER; note = 2'-O-methylcytidine
ccacacatattggcatgctgacc

SEQ ID NO: 2780 - RNA, 21 nt, synthetic construct
  source 1..21: mol_type = other RNA
  modified_base 1: mod_base = OTHER; note = 2'-O-methylcytidine-3'-phosphorothioate
  modified_base 2: mod_base = OTHER; note = 2'-O-methyladenosine-3'-phosphorothioate
  modified_base 3: mod_base = OTHER; note = 2'-O-methylguanosine-3'-phosphate
  modified_base 4: mod_base = OTHER; note = 2'-O-methylcytidine-3'-phosphate
  modified_base 5: mod_base = OTHER; note = 2'-O-methyladenosine-3'-phosphate
  modified_base 6: mod_base = OTHER; note = 2'-O-methyluridine-3'-phosphate
  modified_base 7: mod_base = OTHER; note = 2'-deoxy-2'-fluoroguanosine-3'-phosphate
  modified_base 8: mod_base = OTHER; note = 2'-O-methylcytidine-3'-phosphate
  modified_base 9: mod_base = OTHER; note = 2'-deoxy-2'-fluorocytidine-3'-phosphate
  modified_base 10: mod_base = OTHER; note = 2'-deoxy-2'-fluoroadenosine-3'-phosphate
  modified_base 11: mod_base = OTHER; note = 2'-deoxy-2'-fluoroadenosine-3'-phosphate
  modified_base 12: mod_base = OTHER; note = 2'-O-methyluridine-3'-phosphate
  modified_base 13: mod_base = OTHER; note = 2'-O-methyladenosine-3'-phosphate
  modified_base 14: mod_base = OTHER; note = 2'-O-methyluridine-3'-phosphate
  modified_base 15: mod_base = OTHER; note = 2'-O-methylguanosine-3'-phosphate
  modified_base 16: mod_base = OTHER; note = 2'-O-methyluridine-3'-phosphate
  modified_base 17: mod_base = OTHER; note = 2'-O-methylguanosine-3'-phosphate
  modified_base 18: mod_base = OTHER; note = 2'-O-methyluridine-3'-phosphate
  modified_base 19: mod_base = OTHER; note = 2'-O-methylguanosine-3'-phosphate
  modified_base 20: mod_base = OTHER; note = 2'-O-methylguanosine-3'-phosphate
  modified_base 21: mod_base = OTHER; note = 2'-O-methylguanosine-3'-phosphate ((2S,4R)-1-[29-[[2-(acetylamino)-2-deoxy-beta-D-galactopyra nosyl]oxy]-14,14-bis[[3-[[3-[[5-[[2-(acetylamino)-2-deoxy-b eta-D-galactopyranosyl]oxy]-1-oxopentyl]amino]propyl]amino] -3-oxopropoxy]methyl]-1,12,19,25-tetraoxo-16-oxa-13,20,24-t riazanonacos-1-yl]-4-hydroxy-2-pyrrolidinyl)methyl ester
cagcatgccaatatgtgtggg

SEQ ID NO: 2781 - RNA, 23 nt, synthetic construct
  source 1..23: mol_type = other RNA
  modified_base 1: mod_base = OTHER; note = 2'-O-methylcytidine-3'-phosphorothioate
  modified_base 2: mod_base = OTHER; note = 2'-deoxy-2'-fluorocytidine-3'-phosphorothioate
  modified_base 3: mod_base = OTHER; note = 2'-O-methylcytidine-3'-phosphate
  modified_base 4: mod_base = OTHER; note = 2'-O-methyladenosine-3'-phosphate
  modified_base 5: mod_base = OTHER; note = 2'-O-methylcytidine-3'-phosphate
  modified_base 6: mod_base = OTHER; note = 2'-deoxy-2'-fluoroadenosine-3'-phosphate
  modified_base 7: mod_base = OTHER; note = 2'-O-methylcytidine-3'-phosphate
  modified_base 8: mod_base = OTHER; note = 2'-deoxy-2'-fluoroadenosine-3'-phosphate
  modified_base 9: mod_base = OTHER; note = 2'-deoxy-2'-fluorouridine-3'-phosphate
  modified_base 10: mod_base = OTHER; note = 2'-O-methyladenosine-3'-phosphate
  modified_base 11: mod_base = OTHER; note = 2'-O-methyluridine-3'-phosphate
  modified_base 12: mod_base = OTHER; note = 2'-O-methyluridine-3'-phosphate
  modified_base 13: mod_base = OTHER; note = 2'-O-methylguanosine-3'-phosphate
  modified_base 14: mod_base = OTHER; note = 2'-deoxy-2'-fluoroguanosine-3'-phosphate
  modified_base 15: mod_base = OTHER; note = 2'-O-methylcytidine-3'-phosphate
  modified_base 16: mod_base = OTHER; note = 2'-deoxy-2'-fluoroadenosine-3'-phosphate
  modified_base 17: mod_base = OTHER; note = 2'-O-methyluridine-3'-phosphate
  modified_base 18: mod_base = OTHER; note = 2'-O-methylguanosine-3'-phosphate
  modified_base 19: mod_base = OTHER; note = 2'-O-methylcytidine-3'-phosphate
  modified_base 20: mod_base = OTHER; note = 2'-O-methyluridine-3'-phosphate
  modified_base 21: mod_base = OTHER; note = 2'-O-methylguanosine-3'-phosphorothioate
  modified_base 22: mod_base = OTHER; note = 2'-O-methyladenosine-3'-phosphorothioate
  modified_base 23: mod_base = OTHER; note = 2'-O-methylcytidine
cccacacatattggcatgctgac

SEQ ID NO: 2782 - RNA, 21 nt, synthetic construct
  source 1..21: mol_type = other RNA
  modified_base 1: mod_base = OTHER; note = 2'-O-methyladenosine-3'-phosphorothioate
  modified_base 2: mod_base = OTHER; note = 2'-O-methylguanosine-3'-phosphorothioate
  modified_base 3: mod_base = OTHER; note = 2'-O-methylguanosine-3'-phosphate
  modified_base 4: mod_base = OTHER; note = 2'-O-methylguanosine-3'-phosphate
  modified_base 5: mod_base = OTHER; note = 2'-O-methyluridine-3'-phosphate
  modified_base 6: mod_base = OTHER; note = 2'-O-methylcytidine-3'-phosphate
  modified_base 7: mod_base = OTHER; note = 2'-deoxy-2'-fluoroadenosine-3'-phosphate
  modified_base 8: mod_base = OTHER; note = 2'-O-methylguanosine-3'-phosphate
  modified_base 9: mod_base = OTHER; note = 2'-deoxy-2'-fluorocytidine-3'-phosphate
  modified_base 10: mod_base = OTHER; note = 2'-deoxy-2'-fluoroadenosine-3'-phosphate
  modified_base 11: mod_base = OTHER; note = 2'-deoxy-2'-fluorouridine-3'-phosphate
  modified_base 12: mod_base = OTHER; note = 2'-O-methylguanosine-3'-phosphate
  modified_base 13: mod_base = OTHER; note = 2'-O-methylcytidine-3'-phosphate
  modified_base 14: mod_base = OTHER; note = 2'-O-methylcytidine-3'-phosphate
  modified_base 15: mod_base = OTHER; note = 2'-O-methyladenosine-3'-phosphate
  modified_base 16: mod_base = OTHER; note = 2'-O-methyladenosine-3'-phosphate
  modified_base 17: mod_base = OTHER; note = 2'-O-methyluridine-3'-phosphate
  modified_base 18: mod_base = OTHER; note = 2'-O-methyladenosine-3'-phosphate
  modified_base 19: mod_base = OTHER; note = 2'-O-methyluridine-3'-phosphate
  modified_base 20: mod_base = OTHER; note = 2'-O-methylguanosine-3'-phosphate
  modified_base 21: mod_base = OTHER; note = 2'-O-methyluridine-3'-phosphate ((2S,4R)-1-[29-[[2-(acetylamino)-2-deoxy-beta-D-galactopyra nosyl]oxy]-14,14-bis[[3-[[3-[[5-[[2-(acetylamino)-2-deoxy-b eta-D-galactopyranosyl]oxy]-1-oxopentyl]amino]propyl]amino] -3-oxopropoxy]methyl]-1,12,19,25-tetraoxo-16-oxa-13,20,24-t riazanonacos-1-yl]-4-hydroxy-2-pyrrolidinyl)methyl ester
agggtcagcatgccaatatgt

SEQ ID NO: 2783 - RNA, 23 nt, synthetic construct
  source 1..23: mol_type = other RNA
  modified_base 1: mod_base = OTHER; note = 2'-O-methyladenosine-3'-phosphorothioate
  modified_base 2: mod_base = OTHER; note = 2'-deoxy-2'-fluorocytidine-3'-phosphorothioate
  modified_base 3: mod_base = OTHER; note = 2'-O-methyladenosine-3'-phosphate
  modified_base 4: mod_base = OTHER; note = 2'-O-methyluridine-3'-phosphate
  modified_base 5: mod_base = OTHER; note = 2'-O-methyladenosine-3'-phosphate
  modified_base 6: mod_base = OTHER; note = 2'-deoxy-2'-fluorouridine-3'-phosphate
  modified_base 7: mod_base = OTHER; note = 2'-O-methyluridine-3'-phosphate
  modified_base 8: mod_base = OTHER; note = 2'-deoxy-2'-fluoroguanosine-3'-phosphate
  modified_base 9: mod_base = OTHER; note = 2'-deoxy-2'-fluoroguanosine-3'-phosphate
  modified_base 10: mod_base = OTHER; note = 2'-O-methylcytidine-3'-phosphate
  modified_base 11: mod_base = OTHER; note = 2'-O-methyladenosine-3'-phosphate
  modified_base 12: mod_base = OTHER; note = 2'-O-methyluridine-3'-phosphate
  modified_base 13: mod_base = OTHER; note = 2'-O-methylguanosine-3'-phosphate
  modified_base 14: mod_base = OTHER; note = 2'-deoxy-2'-fluorocytidine-3'-phosphate
  modified_base 15: mod_base = OTHER; note = 2'-O-methyluridine-3'-phosphate
  modified_base 16: mod_base = OTHER; note = 2'-deoxy-2'-fluoroguanosine-3'-phosphate
  modified_base 17: mod_base = OTHER; note = 2'-O-methyladenosine-3'-phosphate
  modified_base 18: mod_base = OTHER; note = 2'-O-methylcytidine-3'-phosphate
  modified_base 19: mod_base = OTHER; note = 2'-O-methylcytidine-3'-phosphate
  modified_base 20: mod_base = OTHER; note = 2'-O-methylcytidine-3'-phosphate
  modified_base 21: mod_base = OTHER; note = 2'-O-methyluridine-3'-phosphorothioate
  modified_base 22: mod_base = OTHER; note = 2'-O-methylcytidine-3'-phosphorothioate
  modified_base 23: mod_base = OTHER; note = 2'-O-methyluridine
acatattggcatgctgaccctct

SEQ ID NO: 2784 - RNA, 21 nt, synthetic construct
  source 1..21: mol_type = other RNA
  modified_base 1: mod_base = OTHER; note = 2'-O-methylguanosine-3'-phosphorothioate
  modified_base 2: mod_base = OTHER; note = 2'-O-methyladenosine-3'-phosphorothioate
  modified_base 3: mod_base = OTHER; note = 2'-O-methylguanosine-3'-phosphate
  modified_base 4: mod_base = OTHER; note = 2'-O-methylguanosine-3'-phosphate
  modified_base 5: mod_base = OTHER; note = 2'-O-methylguanosine-3'-phosphate
  modified_base 6: mod_base = OTHER; note = 2'-O-methyluridine-3'-phosphate
  modified_base 7: mod_base = OTHER; note = 2'-deoxy-2'-fluorocytidine-3'-phosphate
  modified_base 8: mod_base = OTHER; note = 2'-O-methyladenosine-3'-phosphate
  modified_base 9: mod_base = OTHER; note = 2'-deoxy-2'-fluoroguanosine-3'-phosphate
  modified_base 10: mod_base = OTHER; note = 2'-deoxy-2'-fluorocytidine-3'-phosphate
  modified_base 11: mod_base = OTHER; note = 2'-deoxy-2'-fluoroadenosine-3'-phosphate
  modified_base 12: mod_base = OTHER; note = 2'-O-methyluridine-3'-phosphate
  modified_base 13: mod_base = OTHER; note = 2'-O-methylguanosine-3'-phosphate
  modified_base 14: mod_base = OTHER; note = 2'-O-methylcytidine-3'-phosphate
  modified_base 15: mod_base = OTHER; note = 2'-O-methylcytidine-3'-phosphate
  modified_base 16: mod_base = OTHER; note = 2'-O-methyladenosine-3'-phosphate
  modified_base 17: mod_base = OTHER; note = 2'-O-methyladenosine-3'-phosphate
  modified_base 18: mod_base = OTHER; note = 2'-O-methyluridine-3'-phosphate
  modified_base 19: mod_base = OTHER; note = 2'-O-methyladenosine-3'-phosphate
  modified_base 20: mod_base = OTHER; note = 2'-O-methyluridine-3'-phosphate
  modified_base 21: mod_base = OTHER; note = 2'-O-methylguanosine-3'-phosphate ((2S,4R)-1-[29-[[2-(acetylamino)-2-deoxy-beta-D-galactopyra nosyl]oxy]-14,14-bis[[3-[[3-[[5-[[2-(acetylamino)-2-deoxy-b eta-D-galactopyranosyl]oxy]-1-oxopentyl]amino]propyl]amino] -3-oxopropoxy]methyl]-1,12,19,25-tetraoxo-16-oxa-13,20,24-t riazanonacos-1-yl]-4-hydroxy-2-pyrrolidinyl)methyl ester
gagggtcagcatgccaatatg

SEQ ID NO: 2785 - RNA, 23 nt, synthetic construct
  source 1..23: mol_type = other RNA
  modified_base 1: mod_base = OTHER; note = 2'-O-methylcytidine-3'-phosphorothioate
  modified_base 2: mod_base = OTHER; note = 2'-deoxy-2'-fluoroadenosine-3'-phosphorothioate
  modified_base 3: mod_base = OTHER; note = 2'-O-methyluridine-3'-phosphate
  modified_base 4: mod_base = OTHER; note = 2'-O-methyladenosine-3'-phosphate
  modified_base 5: mod_base = OTHER; note = 2'-O-methyluridine-3'-phosphate
  modified_base 6: mod_base = OTHER; note = 2'-deoxy-2'-fluorouridine-3'-phosphate
  modified_base 7: mod_base = OTHER; note = 2'-O-methylguanosine-3'-phosphate
  modified_base 8: mod_base = OTHER; note = 2'-deoxy-2'-fluoroguanosine-3'-phosphate
  modified_base 9: mod_base = OTHER; note = 2'-deoxy-2'-fluorocytidine-3'-phosphate
  modified_base 10: mod_base = OTHER; note = 2'-O-methyladenosine-3'-phosphate
  modified_base 11: mod_base = OTHER; note = 2'-O-methyluridine-3'-phosphate
  modified_base 12: mod_base = OTHER; note = 2'-O-methylguanosine-3'-phosphate
  modified_base 13: mod_base = OTHER; note = 2'-O-methylcytidine-3'-phosphate
  modified_base 14: mod_base = OTHER; note = 2'-deoxy-2'-fluorouridine-3'-phosphate
  modified_base 15: mod_base = OTHER; note = 2'-O-methylguanosine-3'-phosphate
  modified_base 16: mod_base = OTHER; note = 2'-deoxy-2'-fluoroadenosine-3'-phosphate
  modified_base 17: mod_base = OTHER; note = 2'-O-methylcytidine-3'-phosphate
  modified_base 18: mod_base = OTHER; note = 2'-O-methylcytidine-3'-phosphate
  modified_base 19: mod_base = OTHER; note = 2'-O-methylcytidine-3'-phosphate
  modified_base 20: mod_base = OTHER; note = 2'-O-methyluridine-3'-phosphate
  modified_base 21: mod_base = OTHER; note = 2'-O-methylcytidine-3'-phosphorothioate
  modified_base 22: mod_base = OTHER; note = 2'-O-methyluridine-3'-phosphorothioate
  modified_base 23: mod_base = OTHER; note = 2'-O-methylguanosine
catattggcatgctgaccctctg

SEQ ID NO: 2786 - RNA, 21 nt, synthetic construct
  source 1..21: mol_type = other RNA
  modified_base 1: mod_base = OTHER; note = 2'-O-methylguanosine-3'-phosphorothioate
  modified_base 2: mod_base = OTHER; note = 2'-O-methylcytidine-3'-phosphorothioate
  modified_base 3: mod_base = OTHER; note = 2'-O-methyladenosine-3'-phosphate
  modified_base 4: mod_base = OTHER; note = 2'-O-methyluridine-3'-phosphate
  modified_base 5: mod_base = OTHER; note = 2'-O-methyladenosine-3'-phosphate
  modified_base 6: mod_base = OTHER; note = 2'-O-methyluridine-3'-phosphate
  modified_base 7: mod_base = OTHER; note = 2'-deoxy-2'-fluoroguanosine-3'-phosphate
  modified_base 8: mod_base = OTHER; note = 2'-O-methyluridine-3'-phosphate
  modified_base 9: mod_base = OTHER; note = 2'-deoxy-2'-fluoroguanosine-3'-phosphate
  modified_base 10: mod_base = OTHER; note = 2'-deoxy-2'-fluoroguanosine-3'-phosphate
  modified_base 11: mod_base = OTHER; note = 2'-deoxy-2'-fluorocytidine-3'-phosphate
  modified_base 12: mod_base = OTHER; note = 2'-O-methyluridine-3'-phosphate
  modified_base 13: mod_base = OTHER; note = 2'-O-methyladenosine-3'-phosphate
  modified_base 14: mod_base = OTHER; note = 2'-O-methyladenosine-3'-phosphate
  modified_base 15: mod_base = OTHER; note = 2'-O-methyladenosine-3'-phosphate
  modified_base 16: mod_base = OTHER; note = 2'-O-methylguanosine-3'-phosphate
  modified_base 17: mod_base = OTHER; note = 2'-O-methylcytidine-3'-phosphate
  modified_base 18: mod_base = OTHER; note = 2'-O-methyladenosine-3'-phosphate
  modified_base 19: mod_base = OTHER; note = 2'-O-methyladenosine-3'-phosphate
  modified_base 20: mod_base = OTHER; note = 2'-O-methyluridine-3'-phosphate
  modified_base 21: mod_base = OTHER; note = 2'-O-methyladenosine-3'-phosphate ((2S,4R)-1-[29-[[2-(acetylamino)-2-deoxy-beta-D-galactopyra nosyl]oxy]-14,14-bis[[3-[[3-[[5-[[2-(acetylamino)-2-deoxy-b eta-D-galactopyranosyl]oxy]-1-oxopentyl]amino]propyl]amino] -3-oxopropoxy]methyl]-1,12,19,25-tetraoxo-16-oxa-13,20,24-t riazanonacos-1-yl]-4-hydroxy-2-pyrrolidinyl)methyl ester
gcatatgtggctaaagcaata

SEQ ID NO: 2787 - RNA, 23 nt, synthetic construct
  source 1..23: mol_type = other RNA
  modified_base 1: mod_base = OTHER; note = 2'-O-methyluridine-3'-phosphorothioate
  modified_base 2: mod_base = OTHER; note = 2'-deoxy-2'-fluoroadenosine-3'-phosphorothioate
  modified_base 3: mod_base = OTHER; note = 2'-O-methyluridine-3'-phosphate
  modified_base 4: mod_base = OTHER; note = 2'-O-methyluridine-3'-phosphate
  modified_base 5: mod_base = OTHER; note = 2'-O-methylguanosine-3'-phosphate
  modified_base 6: mod_base = OTHER; note = 2'-deoxy-2'-fluorocytidine-3'-phosphate
  modified_base 7: mod_base = OTHER; note = 2'-O-methyluridine-3'-phosphate
  modified_base 8: mod_base = OTHER; note = 2'-deoxy-2'-fluorouridine-3'-phosphate
  modified_base 9: mod_base = OTHER; note = 2'-deoxy-2'-fluorouridine-3'-phosphate
  modified_base 10: mod_base = OTHER; note = 2'-O-methyladenosine-3'-phosphate
  modified_base 11: mod_base = OTHER; note = 2'-O-methylguanosine-3'-phosphate
  modified_base 12: mod_base = OTHER; note = 2'-O-methylcytidine-3'-phosphate
  modified_base 13: mod_base = OTHER; note = 2'-O-methylcytidine-3'-phosphate
  modified_base 14: mod_base = OTHER; note = 2'-deoxy-2'-fluoroadenosine-3'-phosphate
  modified_base 15: mod_base = OTHER; note = 2'-O-methylcytidine-3'-phosphate
  modified_base 16: mod_base = OTHER; note = 2'-deoxy-2'-fluoroadenosine-3'-phosphate
  modified_base 17: mod_base = OTHER; note = 2'-O-methyluridine-3'-phosphate
  modified_base 18: mod_base = OTHER; note = 2'-O-methyladenosine-3'-phosphate
  modified_base 19: mod_base = OTHER; note = 2'-O-methyluridine-3'-phosphate
  modified_base 20: mod_base = OTHER; note = 2'-O-methylguanosine-3'-phosphate
  modified_base 21: mod_base = OTHER; note = 2'-O-methylcytidine-3'-phosphorothioate
  modified_base 22: mod_base = OTHER; note = 2'-O-methyladenosine-3'-phosphorothioate
  modified_base 23: mod_base = OTHER; note = 2'-O-methylguanosine
tattgctttagccacatatgcag

SEQ ID NO: 2788 - RNA, 21 nt, synthetic construct
  source 1..21: mol_type = other RNA
  modified_base 1: mod_base = OTHER; note = 2'-O-methylcytidine-3'-phosphorothioate
  modified_base 2: mod_base = OTHER; note = 2'-O-methyladenosine-3'-phosphorothioate
  modified_base 3: mod_base = OTHER; note = 2'-O-methyluridine-3'-phosphate
  modified_base 4: mod_base = OTHER; note = 2'-O-methyladenosine-3'-phosphate
  modified_base 5: mod_base = OTHER; note = 2'-O-methyluridine-3'-phosphate
  modified_base 6: mod_base = OTHER; note = 2'-O-methylguanosine-3'-phosphate
  modified_base 7: mod_base = OTHER; note = 2'-deoxy-2'-fluorouridine-3'-phosphate
  modified_base 8: mod_base = OTHER; note = 2'-O-methylguanosine-3'-phosphate
  modified_base 9: mod_base = OTHER; note = 2'-deoxy-2'-fluoroguanosine-3'-phosphate
  modified_base 10: mod_base = OTHER; note = 2'-deoxy-2'-fluorocytidine-3'-phosphate
  modified_base 11: mod_base = OTHER; note = 2'-deoxy-2'-fluorouridine-3'-phosphate
  modified_base 12: mod_base = OTHER; note = 2'-O-methyladenosine-3'-phosphate
  modified_base 13: mod_base = OTHER; note = 2'-O-methyladenosine-3'-phosphate
  modified_base 14: mod_base = OTHER; note = 2'-O-methyladenosine-3'-phosphate
  modified_base 15: mod_base = OTHER; note = 2'-O-methylguanosine-3'-phosphate
  modified_base 16: mod_base = OTHER; note = 2'-O-methylcytidine-3'-phosphate
  modified_base 17: mod_base = OTHER; note = 2'-O-methyladenosine-3'-phosphate
  modified_base 18: mod_base = OTHER; note = 2'-O-methyladenosine-3'-phosphate
  modified_base 19: mod_base = OTHER; note = 2'-O-methyluridine-3'-phosphate
  modified_base 20: mod_base = OTHER; note = 2'-O-methyladenosine-3'-phosphate
  modified_base 21: mod_base = OTHER; note = 2'-O-methylguanosine-3'-phosphate ((2S,4R)-1-[29-[[2-(acetylamino)-2-deoxy-beta-D-galactopyra nosyl]oxy]-14,14-bis[[3-[[3-[[5-[[2-(acetylamino)-2-deoxy-b eta-D-galactopyranosyl]oxy]-1-oxopentyl]amino]propyl]amino] -3-oxopropoxy]methyl]-1,12,19,25-tetraoxo-16-oxa-13,20,24-t riazanonacos-1-yl]-4-hydroxy-2-pyrrolidinyl)methyl ester
catatgtggctaaagcaatag

SEQ ID NO: 2789 - RNA, 23 nt, synthetic construct
  source 1..23: mol_type = other RNA
  modified_base 1: mod_base = OTHER; note = 2'-O-methylcytidine-3'-phosphorothioate
  modified_base 2: mod_base = OTHER; note = 2'-deoxy-2'-fluorouridine-3'-phosphorothioate
  modified_base 3: mod_base = OTHER; note = 2'-O-methyladenosine-3'-phosphate
  modified_base 4: mod_base = OTHER; note = 2'-O-methyluridine-3'-phosphate
  modified_base 5: mod_base = OTHER; note = 2'-O-methyluridine-3'-phosphate
  modified_base 6: mod_base = OTHER; note = 2'-deoxy-2'-fluoroguanosine-3'-phosphate
  modified_base 7: mod_base = OTHER; note = 2'-O-methylcytidine-3'-phosphate
  modified_base 8: mod_base = OTHER; note = 2'-deoxy-2'-fluorouridine-3'-phosphate
  modified_base 9: mod_base = OTHER; note = 2'-deoxy-2'-fluorouridine-3'-phosphate
  modified_base 10: mod_base = OTHER; note = 2'-O-methyluridine-3'-phosphate
  modified_base 11: mod_base = OTHER; note = 2'-O-methyladenosine-3'-phosphate
  modified_base 12: mod_base = OTHER; note = 2'-O-methylguanosine-3'-phosphate
  modified_base 13: mod_base = OTHER; note = 2'-O-methylcytidine-3'-phosphate
  modified_base 14: mod_base = OTHER; note = 2'-deoxy-2'-fluorocytidine-3'-phosphate
  modified_base 15: mod_base = OTHER; note = 2'-O-methyladenosine-3'-phosphate
  modified_base 16: mod_base = OTHER; note = 2'-deoxy-2'-fluorocytidine-3'-phosphate
  modified_base 17: mod_base = OTHER; note = 2'-O-methyladenosine-3'-phosphate
  modified_base 18: mod_base = OTHER; note = 2'-O-methyluridine-3'-phosphate
  modified_base 19: mod_base = OTHER; note = 2'-O-methyladenosine-3'-phosphate
  modified_base 20: mod_base = OTHER; note = 2'-O-methyluridine-3'-phosphate
  modified_base 21: mod_base = OTHER; note = 2'-O-methylguanosine-3'-phosphorothioate
  modified_base 22: mod_base = OTHER; note = 2'-O-methylcytidine-3'-phosphorothioate
  modified_base 23: mod_base = OTHER; note = 2'-O-methyladenosine
ctattgctttagccacatatgca

SEQ ID NO: 2790 - RNA, 21 nt, synthetic construct
  source 1..21: mol_type = other RNA
  modified_base 1: mod_base = OTHER; note = 2'-O-methyluridine-3'-phosphorothioate
  modified_base 2: mod_base = OTHER; note = 2'-O-methylguanosine-3'-phosphorothioate
  modified_base 3: mod_base = OTHER; note = 2'-O-methylcytidine-3'-phosphate
  modified_base 4: mod_base = OTHER; note = 2'-O-methyluridine-3'-phosphate
  modified_base 5: mod_base = OTHER; note = 2'-O-methylguanosine-3'-phosphate
  modified_base 6: mod_base = OTHER; note = 2'-O-methylcytidine-3'-phosphate
  modified_base 7: mod_base = OTHER; note = 2'-deoxy-2'-fluoroadenosine-3'-phosphate
  modified_base 8: mod_base = OTHER; note = 2'-O-methyluridine-3'-phosphate
  modified_base 9: mod_base = OTHER; note = 2'-deoxy-2'-fluoroadenosine-3'-phosphate
  modified_base 10: mod_base = OTHER; note = 2'-deoxy-2'-fluorouridine-3'-phosphate
  modified_base 11: mod_base = OTHER; note = 2'-deoxy-2'-fluoroguanosine-3'-phosphate
  modified_base 12: mod_base = OTHER; note = 2'-O-methyluridine-3'-phosphate
  modified_base 13: mod_base = OTHER; note = 2'-O-methylguanosine-3'-phosphate
  modified_base 14: mod_base = OTHER; note = 2'-O-methylguanosine-3'-phosphate
  modified_base 15: mod_base = OTHER; note = 2'-O-methylcytidine-3'-phosphate
  modified_base 16: mod_base = OTHER; note = 2'-O-methyluridine-3'-phosphate
  modified_base 17: mod_base = OTHER; note = 2'-O-methyladenosine-3'-phosphate
  modified_base 18: mod_base = OTHER; note = 2'-O-methyladenosine-3'-phosphate
  modified_base 19: mod_base = OTHER; note = 2'-O-methyladenosine-3'-phosphate
  modified_base 20: mod_base = OTHER; note = 2'-O-methylguanosine-3'-phosphate
  modified_base 21: mod_base = OTHER; note = 2'-O-methylcytidine-3'-phosphate ((2S,4R)-1-[29-[[2-(acetylamino)-2-deoxy-beta-D-galactopyra nosyl]oxy]-14,14-bis[[3-[[3-[[5-[[2-(acetylamino)-2-deoxy-b eta-D-galactopyranosyl]oxy]-1-oxopentyl]amino]propyl]amino] -3-oxopropoxy]methyl]-1,12,19,25-tetraoxo-16-oxa-13,20,24-t riazanonacos-1-yl]-4-hydroxy-2-pyrrolidinyl)methyl ester
tgctgcatatgtggctaaagc

SEQ ID NO: 2791 - RNA, 23 nt, synthetic construct
  source 1..23: mol_type = other RNA
  modified_base 1: mod_base = OTHER; note = 2'-O-methylguanosine-3'-phosphorothioate
  modified_base 2: mod_base = OTHER; note = 2'-deoxy-2'-fluorocytidine-3'-phosphorothioate
  modified_base 3: mod_base = OTHER; note = 2'-O-methyluridine-3'-phosphate
  modified_base 4: mod_base = OTHER; note = 2'-O-methyluridine-3'-phosphate
  modified_base 5: mod_base = OTHER; note = 2'-O-methyluridine-3'-phosphate
  modified_base 6: mod_base = OTHER; note = 2'-deoxy-2'-fluoroadenosine-3'-phosphate
  modified_base 7: mod_base = OTHER; note = 2'-O-methylguanosine-3'-phosphate
  modified_base 8: mod_base = OTHER; note = 2'-deoxy-2'-fluorocytidine-3'-phosphate
  modified_base 9: mod_base = OTHER; note = 2'-deoxy-2'-fluorocytidine-3'-phosphate
  modified_base 10: mod_base = OTHER; note = 2'-O-methyladenosine-3'-phosphate
  modified_base 11: mod_base = OTHER; note = 2'-O-methylcytidine-3'-phosphate
  modified_base 12: mod_base = OTHER; note = 2'-O-methyladenosine-3'-phosphate
  modified_base 13: mod_base = OTHER; note = 2'-O-methyluridine-3'-phosphate
  modified_base 14: mod_base = OTHER; note = 2'-deoxy-2'-fluoroadenosine-3'-phosphate
  modified_base 15: mod_base = OTHER; note = 2'-O-methyluridine-3'-phosphate
  modified_base 16: mod_base = OTHER; note = 2'-deoxy-2'-fluoroguanosine-3'-phosphate
  modified_base 17: mod_base = OTHER; note = 2'-O-methylcytidine-3'-phosphate
  modified_base 18: mod_base = OTHER; note = 2'-O-methyladenosine-3'-phosphate
  modified_base 19: mod_base = OTHER; note = 2'-O-methylguanosine-3'-phosphate
  modified_base 20: mod_base = OTHER; note = 2'-O-methylcytidine-3'-phosphate
  modified_base 21: mod_base = OTHER; note = 2'-O-methyladenosine-3'-phosphorothioate
  modified_base 22: mod_base = OTHER; note = 2'-O-methyladenosine-3'-phosphorothioate
  modified_base 23: mod_base = OTHER; note = 2'-O-methylguanosine
gctttagccacatatgcagcaag

SEQ ID NO: 2792 - RNA, 21 nt, synthetic construct
  source 1..21: mol_type = other RNA
  modified_base 1: mod_base = OTHER; note = 2'-O-methyluridine-3'-phosphorothioate
  modified_base 2: mod_base = OTHER; note = 2'-O-methyluridine-3'-phosphorothioate
  modified_base 3: mod_base = OTHER; note = 2'-O-methylguanosine-3'-phosphate
  modified_base 4: mod_base = OTHER; note = 2'-O-methylcytidine-3'-phosphate
  modified_base 5: mod_base = OTHER; note = 2'-O-methyluridine-3'-phosphate
  modified_base 6: mod_base = OTHER; note = 2'-O-methylguanosine-3'-phosphate
  modified_base 7: mod_base = OTHER; note = 2'-deoxy-2'-fluorocytidine-3'-phosphate
  modified_base 8: mod_base = OTHER; note = 2'-O-methyladenosine-3'-phosphate
  modified_base 9: mod_base = OTHER; note = 2'-deoxy-2'-fluorouridine-3'-phosphate
  modified_base 10: mod_base = OTHER; note = 2'-deoxy-2'-fluoroadenosine-3'-phosphate
  modified_base 11: mod_base = OTHER; note = 2'-deoxy-2'-fluorouridine-3'-phosphate
  modified_base 12: mod_base = OTHER; note = 2'-O-methylguanosine-3'-phosphate
  modified_base 13: mod_base = OTHER; note = 2'-O-methyluridine-3'-phosphate
  modified_base 14: mod_base = OTHER; note = 2'-O-methylguanosine-3'-phosphate
  modified_base 15: mod_base = OTHER; note = 2'-O-methylguanosine-3'-phosphate
  modified_base 16: mod_base = OTHER; note = 2'-O-methylcytidine-3'-phosphate
  modified_base 17: mod_base = OTHER; note = 2'-O-methyluridine-3'-phosphate
  modified_base 18: mod_base = OTHER; note = 2'-O-methyladenosine-3'-phosphate
  modified_base 19: mod_base = OTHER; note = 2'-O-methyladenosine-3'-phosphate
  modified_base 20: mod_base = OTHER; note = 2'-O-methyladenosine-3'-phosphate
  modified_base 21: mod_base = OTHER; note = 2'-O-methylguanosine-3'-phosphate ((2S,4R)-1-[29-[[2-(acetylamino)-2-deoxy-beta-D-galactopyra nosyl]oxy]-14,14-bis[[3-[[3-[[5-[[2-(acetylamino)-2-deoxy-b eta-D-galactopyranosyl]oxy]-1-oxopentyl]amino]propyl]amino] -3-oxopropoxy]methyl]-1,12,19,25-tetraoxo-16-oxa-13,20,24-t riazanonacos-1-yl]-4-hydroxy-2-pyrrolidinyl)methyl ester
ttgctgcatatgtggctaaag

SEQ ID NO: 2793 - RNA, 23 nt, synthetic construct
  source 1..23: mol_type = other RNA
  modified_base 1: mod_base = OTHER; note = 2'-O-methylcytidine-3'-phosphorothioate
  modified_base 2: mod_base = OTHER; note = 2'-deoxy-2'-fluorouridine-3'-phosphorothioate
  modified_base 3: mod_base = OTHER; note = 2'-O-methyluridine-3'-phosphate
  modified_base 4: mod_base = OTHER; note = 2'-O-methyluridine-3'-phosphate
  modified_base 5: mod_base = OTHER; note = 2'-O-methyladenosine-3'-phosphate
  modified_base 6: mod_base = OTHER; note = 2'-deoxy-2'-fluoroguanosine-3'-phosphate
  modified_base 7: mod_base = OTHER; note = 2'-O-methylcytidine-3'-phosphate
  modified_base 8: mod_base = OTHER; note = 2'-deoxy-2'-fluorocytidine-3'-phosphate
  modified_base 9: mod_base = OTHER; note = 2'-deoxy-2'-fluoroadenosine-3'-phosphate
  modified_base 10: mod_base = OTHER; note = 2'-O-methylcytidine-3'-phosphate
  modified_base 11: mod_base = OTHER; note = 2'-O-methyladenosine-3'-phosphate
  modified_base 12: mod_base = OTHER; note = 2'-O-methyluridine-3'-phosphate
  modified_base 13: mod_base = OTHER; note = 2'-O-methyladenosine-3'-phosphate
  modified_base 14: mod_base = OTHER; note = 2'-deoxy-2'-fluorouridine-3'-phosphate
  modified_base 15: mod_base = OTHER; note = 2'-O-methylguanosine-3'-phosphate
  modified_base 16: mod_base = OTHER; note = 2'-deoxy-2'-fluorocytidine-3'-phosphate
  modified_base 17: mod_base = OTHER; note = 2'-O-methyladenosine-3'-phosphate
  modified_base 18: mod_base = OTHER; note = 2'-O-methylguanosine-3'-phosphate
  modified_base 19: mod_base = OTHER; note = 2'-O-methylcytidine-3'-phosphate
  modified_base 20: mod_base = OTHER; note = 2'-O-methyladenosine-3'-phosphate
  modified_base 21: mod_base = OTHER; note = 2'-O-methyladenosine-3'-phosphorothioate
  modified_base 22: mod_base = OTHER; note = 2'-O-methylguanosine-3'-phosphorothioate
  modified_base 23: mod_base = OTHER; note = 2'-O-methyluridine
ctttagccacatatgcagcaagt

SEQ ID NO: 2794 - RNA, 21 nt, synthetic construct
  source 1..21: mol_type = other RNA
  modified_base 1: mod_base = OTHER; note = 2'-O-methyladenosine-3'-phosphorothioate
  modified_base 2: mod_base = OTHER; note = 2'-O-methyladenosine-3'-phosphorothioate
  modified_base 3: mod_base = OTHER; note = 2'-O-methyladenosine-3'-phosphate
  modified_base 4: mod_base = OTHER; note = 2'-O-methyluridine-3'-phosphate
  modified_base 5: mod_base = OTHER; note = 2'-O-methylguanosine-3'-phosphate
  modified_base 6: mod_base = OTHER; note = 2'-O-methyladenosine-3'-phosphate
  modified_base 7: mod_base = OTHER; note = 2'-deoxy-2'-fluorouridine-3'-phosphate
  modified_base 8: mod_base = OTHER; note = 2'-O-methylguanosine-3'-phosphate
  modified_base 9: mod_base = OTHER; note = 2'-deoxy-2'-fluoroadenosine-3'-phosphate
  modified_base 10: mod_base = OTHER; note = 2'-deoxy-2'-fluoroadenosine-3'-phosphate
  modified_base 11: mod_base = OTHER; note = 2'-deoxy-2'-fluoroguanosine-3'-phosphate
  modified_base 12: mod_base = OTHER; note = 2'-O-methyladenosine-3'-phosphate
  modified_base 13: mod_base = OTHER; note = 2'-O-methyladenosine-3'-phosphate
  modified_base 14: mod_base = OTHER; note = 2'-O-methyladenosine-3'-phosphate
  modified_base 15: mod_base = OTHER; note = 2'-O-methylcytidine-3'-phosphate
  modified_base 16: mod_base = OTHER; note = 2'-O-methyluridine-3'-phosphate
  modified_base 17: mod_base = OTHER; note = 2'-O-methyluridine-3'-phosphate
  modified_base 18: mod_base = OTHER; note = 2'-O-methyluridine-3'-phosphate
  modified_base 19: mod_base = OTHER; note = 2'-O-methylguanosine-3'-phosphate
  modified_base 20: mod_base = OTHER; note = 2'-O-methylguanosine-3'-phosphate
  modified_base 21: mod_base = OTHER; note = 2'-O-methylcytidine-3'-phosphate ((2S,4R)-1-[29-[[2-(acetylamino)-2-deoxy-beta-D-galactopyra nosyl]oxy]-14,14-bis[[3-[[3-[[5-[[2-(acetylamino)-2-deoxy-b eta-D-galactopyranosyl]oxy]-1-oxopentyl]amino]propyl]amino] -3-oxopropoxy]methyl]-1,12,19,25-tetraoxo-16-oxa-13,20,24-t riazanonacos-1-yl]-4-hydroxy-2-pyrrolidinyl)methyl ester
aaatgatgaagaaactttggc

SEQ ID NO: 2795 - RNA, 23 nt, synthetic construct
  source 1..23: mol_type = other RNA
  modified_base 1: mod_base = OTHER; note = 2'-O-methylguanosine-3'-phosphorothioate
  modified_base 2: mod_base = OTHER; note = 2'-deoxy-2'-fluorocytidine-3'-phosphorothioate
  modified_base 3: mod_base = OTHER; note = 2'-O-methylcytidine-3'-phosphate
  modified_base 4: mod_base = OTHER; note = 2'-O-methyladenosine-3'-phosphate
  modified_base 5: mod_base = OTHER; note = 2'-O-methyladenosine-3'-phosphate
  modified_base 6: mod_base = OTHER; note = 2'-deoxy-2'-fluoroadenosine-3'-phosphate
  modified_base 7: mod_base = OTHER; note = 2'-O-methylguanosine-3'-phosphate
  modified_base 8: mod_base = OTHER; note = 2'-deoxy-2'-fluorouridine-3'-phosphate
  modified_base 9: mod_base = OTHER; note = 2'-deoxy-2'-fluorouridine-3'-phosphate
  modified_base 10: mod_base = OTHER; note = 2'-O-methyluridine-3'-phosphate
  modified_base 11: mod_base = OTHER; note = 2'-O-methylcytidine-3'-phosphate
  modified_base 12: mod_base = OTHER; note = 2'-O-methyluridine-3'-phosphate
  modified_base 13: mod_base = OTHER; note = 2'-O-methyluridine-3'-phosphate
  modified_base 14: mod_base = OTHER; note = 2'-deoxy-2'-fluorocytidine-3'-phosphate
  modified_base 15: mod_base = OTHER; note = 2'-O-methyladenosine-3'-phosphate
  modified_base 16: mod_base = OTHER; note = 2'-deoxy-2'-fluorouridine-3'-phosphate
  modified_base 17: mod_base = OTHER; note = 2'-O-methylcytidine-3'-phosphate
  modified_base 18: mod_base = OTHER; note = 2'-O-methyladenosine-3'-phosphate
  modified_base 19: mod_base = OTHER; note = 2'-O-methyluridine-3'-phosphate
  modified_base 20: mod_base = OTHER; note = 2'-O-methyluridine-3'-phosphate
  modified_base 21: mod_base = OTHER; note = 2'-O-methyluridine-3'-phosphorothioate
  modified_base 22: mod_base = OTHER; note = 2'-O-methylguanosine-3'-phosphorothioate
  modified_base 23: mod_base = OTHER; note = 2'-O-methylcytidine
gccaaagtttcttcatcatttgc

SEQ ID NO: 2796 - RNA, 21 nt, synthetic construct
  source 1..21: mol_type = other RNA
  modified_base 1: mod_base = OTHER; note = 2'-O-methyladenosine-3'-phosphorothioate
  modified_base 2: mod_base = OTHER; note = 2'-O-methyladenosine-3'-phosphorothioate
  modified_base 3: mod_base = OTHER; note = 2'-O-methyluridine-3'-phosphate
  modified_base 4: mod_base = OTHER; note = 2'-O-methylguanosine-3'-phosphate
  modified_base 5: mod_base = OTHER; note = 2'-O-methyladenosine-3'-phosphate
  modified_base 6: mod_base = OTHER; note = 2'-O-methyluridine-3'-phosphate
  modified_base 7: mod_base = OTHER; note = 2'-deoxy-2'-fluoroguanosine-3'-phosphate
  modified_base 8: mod_base = OTHER; note = 2'-O-methyladenosine-3'-phosphate
  modified_base 9: mod_base = OTHER; note = 2'-deoxy-2'-fluoroadenosine-3'-phosphate
  modified_base 10: mod_base = OTHER; note = 2'-deoxy-2'-fluoroguanosine-3'-phosphate
  modified_base 11: mod_base = OTHER; note = 2'-deoxy-2'-fluoroadenosine-3'-phosphate
  modified_base 12: mod_base = OTHER; note = 2'-O-methyladenosine-3'-phosphate
  modified_base 13: mod_base = OTHER; note = 2'-O-methyladenosine-3'-phosphate
  modified_base 14: mod_base = OTHER; note = 2'-O-methylcytidine-3'-phosphate
  modified_base 15: mod_base = OTHER; note = 2'-O-methyluridine-3'-phosphate
  modified_base 16: mod_base = OTHER; note = 2'-O-methyluridine-3'-phosphate
  modified_base 17: mod_base = OTHER; note = 2'-O-methyluridine-3'-phosphate
  modified_base 18: mod_base = OTHER; note = 2'-O-methylguanosine-3'-phosphate
  modified_base 19: mod_base = OTHER; note = 2'-O-methylguanosine-3'-phosphate
  modified_base 20: mod_base = OTHER; note = 2'-O-methylcytidine-3'-phosphate
  modified_base 21: mod_base = OTHER; note = 2'-O-methyluridine-3'-phosphate ((2S,4R)-1-[29-[[2-(acetylamino)-2-deoxy-beta-D-galactopyra nosyl]oxy]-14,14-bis[[3-[[3-[[5-[[2-(acetylamino)-2-deoxy-b eta-D-galactopyranosyl]oxy]-1-oxopentyl]amino]propyl]amino] -3-oxopropoxy]methyl]-1,12,19,25-tetraoxo-16-oxa-13,20,24-t riazanonacos-1-yl]-4-hydroxy-2-pyrrolidinyl)methyl ester
aatgatgaagaaactttggct

SEQ ID NO: 2797 - RNA, 23 nt, synthetic construct
  source 1..23: mol_type = other RNA
  modified_base 1: mod_base = OTHER; note = 2'-O-methyladenosine-3'-phosphorothioate
  modified_base 2: mod_base = OTHER; note = 2'-deoxy-2'-fluoroguanosine-3'-phosphorothioate
  modified_base 3: mod_base = OTHER; note = 2'-O-methylcytidine-3'-phosphate
  modified_base 4: mod_base = OTHER; note = 2'-O-methylcytidine-3'-phosphate
  modified_base 5: mod_base = OTHER; note = 2'-O-methyladenosine-3'-phosphate
  modified_base 6: mod_base = OTHER; note = 2'-deoxy-2'-fluoroadenosine-3'-phosphate
  modified_base 7: mod_base = OTHER; note = 2'-O-methyladenosine-3'-phosphate
  modified_base 8: mod_base = OTHER; note = 2'-deoxy-2'-fluoroguanosine-3'-phosphate
  modified_base 9: mod_base = OTHER; note = 2'-deoxy-2'-fluorouridine-3'-phosphate
  modified_base 10: mod_base = OTHER; note = 2'-O-methyluridine-3'-phosphate
  modified_base 11: mod_base = OTHER; note = 2'-O-methyluridine-3'-phosphate
  modified_base 12: mod_base = OTHER; note = 2'-O-methylcytidine-3'-phosphate
  modified_base 13: mod_base = OTHER; note = 2'-O-methyluridine-3'-phosphate
  modified_base 14: mod_base = OTHER; note = 2'-deoxy-2'-fluorouridine-3'-phosphate
  modified_base 15: mod_base = OTHER; note = 2'-O-methylcytidine-3'-phosphate
  modified_base 16: mod_base = OTHER; note = 2'-deoxy-2'-fluoroadenosine-3'-phosphate
  modified_base 17: mod_base = OTHER; note = 2'-O-methyluridine-3'-phosphate
  modified_base 18: mod_base = OTHER; note = 2'-O-methylcytidine-3'-phosphate
  modified_base 19: mod_base = OTHER; note = 2'-O-methyladenosine-3'-phosphate
  modified_base 20: mod_base = OTHER; note = 2'-O-methyluridine-3'-phosphate
  modified_base 21: mod_base = OTHER; note = 2'-O-methyluridine-3'-phosphorothioate
  modified_base 22: mod_base = OTHER; note = 2'-O-methyluridine-3'-phosphorothioate
  modified_base 23: mod_base = OTHER; note = 2'-O-methylguanosine
agccaaagtttcttcatcatttg

SEQ ID NO: 2798 - RNA, 21 nt, synthetic construct
  source 1..21: mol_type = other RNA
  modified_base 1: mod_base = OTHER; note = 2'-O-methylguanosine-3'-phosphorothioate
  modified_base 2: mod_base = OTHER; note = 2'-O-methylguanosine-3'-phosphorothioate
  modified_base 3: mod_base = OTHER; note = 2'-O-methylguanosine-3'-phosphate
  modified_base 4: mod_base = OTHER; note = 2'-O-methylcytidine-3'-phosphate
  modified_base 5: mod_base = OTHER; note = 2'-O-methyladenosine-3'-phosphate
  modified_base 6: mod_base = OTHER; note = 2'-O-methyladenosine-3'-phosphate
  modified_base 7: mod_base = OTHER; note = 2'-deoxy-2'-fluoroadenosine-3'-phosphate
  modified_base 8: mod_base = OTHER; note = 2'-O-methyluridine-3'-phosphate
  modified_base 9: mod_base = OTHER; note = 2'-deoxy-2'-fluoroguanosine-3'-phosphate
  modified_base 10: mod_base = OTHER; note = 2'-deoxy-2'-fluoroadenosine-3'-phosphate
  modified_base 11: mod_base = OTHER; note = 2'-deoxy-2'-fluorouridine-3'-phosphate
  modified_base 12: mod_base = OTHER; note = 2'-O-methylguanosine-3'-phosphate
  modified_base 13: mod_base = OTHER; note = 2'-O-methyladenosine-3'-phosphate
  modified_base 14: mod_base = OTHER; note = 2'-O-methyladenosine-3'-phosphate
  modified_base 15: mod_base = OTHER; note = 2'-O-methylguanosine-3'-phosphate
  modified_base 16: mod_base = OTHER; note = 2'-O-methyladenosine-3'-phosphate
  modified_base 17: mod_base = OTHER; note = 2'-O-methyladenosine-3'-phosphate
  modified_base 18: mod_base = OTHER; note = 2'-O-methyladenosine-3'-phosphate
  modified_base 19: mod_base = OTHER; note = 2'-O-methylcytidine-3'-phosphate
  modified_base 20: mod_base = OTHER; note = 2'-O-methyluridine-3'-phosphate
  modified_base 21: mod_base = OTHER; note = 2'-O-methyluridine-3'-phosphate ((2S,4R)-1-[29-[[2-(acetylamino)-2-deoxy-beta-D-galactopyra nosyl]oxy]-14,14-bis[[3-[[3-[[5-[[2-(acetylamino)-2-deoxy-b eta-D-galactopyranosyl]oxy]-1-oxopentyl]amino]propyl]amino] -3-oxopropoxy]methyl]-1,12,19,25-tetraoxo-16-oxa-13,20,24-t riazanonacos-1-yl]-4-hydroxy-2-pyrrolidinyl)methyl ester
gggcaaatgatgaagaaactt

SEQ ID NO: 2799 - RNA, 23 nt, synthetic construct
  source 1..23: mol_type = other RNA
  modified_base 1: mod_base = OTHER; note = 2'-O-methyladenosine-3'-phosphorothioate
  modified_base 2: mod_base = OTHER; note = 2'-deoxy-2'-fluoroadenosine-3'-phosphorothioate
  modified_base 3: mod_base = OTHER; note = 2'-O-methylguanosine-3'-phosphate
  modified_base 4: mod_base = OTHER; note = 2'-O-methyluridine-3'-phosphate
  modified_base 5: mod_base = OTHER; note = 2'-O-methyluridine-3'-phosphate
  modified_base 6: mod_base = OTHER; note = 2'-deoxy-2'-fluorouridine-3'-phosphate
  modified_base 7: mod_base = OTHER; note = 2'-O-methylcytidine-3'-phosphate
  modified_base 8: mod_base = OTHER; note = 2'-deoxy-2'-fluorouridine-3'-phosphate
  modified_base 9: mod_base = OTHER; note = 2'-deoxy-2'-fluorouridine-3'-phosphate
  modified_base 10: mod_base = OTHER; note = 2'-O-methylcytidine-3'-phosphate
  modified_base 11: mod_base = OTHER; note = 2'-O-methyladenosine-3'-phosphate
  modified_base 12: mod_base = OTHER; note = 2'-O-methyluridine-3'-phosphate
  modified_base 13: mod_base = OTHER; note = 2'-O-methylcytidine-3'-phosphate
  modified_base 14: mod_base = OTHER; note = 2'-deoxy-2'-fluoroadenosine-3'-phosphate
  modified_base 15: mod_base = OTHER; note = 2'-O-methyluridine-3'-phosphate
  modified_base 16: mod_base = OTHER; note = 2'-deoxy-2'-fluorouridine-3'-phosphate
  modified_base 17: mod_base = OTHER; note = 2'-O-methyluridine-3'-phosphate
  modified_base 18: mod_base = OTHER; note = 2'-O-methylguanosine-3'-phosphate
  modified_base 19: mod_base = OTHER; note = 2'-O-methylcytidine-3'-phosphate
  modified_base 20: mod_base = OTHER; note = 2'-O-methylcytidine-3'-phosphate
  modified_base 21: mod_base = OTHER; note = 2'-O-methylcytidine-3'-phosphorothioate
  modified_base 22: mod_base = OTHER; note = 2'-O-methylcytidine-3'-phosphorothioate
  modified_base 23: mod_base = OTHER; note = 2'-O-methyladenosine
aagtttcttcatcatttgcccca

SEQ ID NO: 2800 - RNA, 21 nt, synthetic construct
  source 1..21: mol_type = other RNA
  modified_base 1: mod_base = OTHER; note = 2'-O-methylguanosine-3'-phosphorothioate
  modified_base 2: mod_base = OTHER; note = 2'-O-methylguanosine-3'-phosphorothioate
  modified_base 3: mod_base = OTHER; note = 2'-O-methylguanosine-3'-phosphate
  modified_base 4: mod_base = OTHER; note = 2'-O-methylguanosine-3'-phosphate
  modified_base 5: mod_base = OTHER; note = 2'-O-methylcytidine-3'-phosphate
  modified_base 6: mod_base = OTHER; note = 2'-O-methyladenosine-3'-phosphate
  modified_base 7: mod_base = OTHER; note = 2'-deoxy-2'-fluoroadenosine-3'-phosphate
  modified_base 8: mod_base = OTHER; note = 2'-O-methyladenosine-3'-phosphate
  modified_base 9: mod_base = OTHER; note = 2'-deoxy-2'-fluorouridine-3'-phosphate
  modified_base 10: mod_base = OTHER; note = 2'-deoxy-2'-fluoroguanosine-3'-phosphate
  modified_base 11: mod_base = OTHER; note = 2'-deoxy-2'-fluoroadenosine-3'-phosphate
  modified_base 12: mod_base = OTHER; note = 2'-O-methyluridine-3'-phosphate
  modified_base 13: mod_base = OTHER; note = 2'-O-methylguanosine-3'-phosphate
  modified_base 14: mod_base = OTHER; note = 2'-O-methyladenosine-3'-phosphate
  modified_base 15: mod_base = OTHER; note = 2'-O-methyladenosine-3'-phosphate
  modified_base 16: mod_base = OTHER; note = 2'-O-methylguanosine-3'-phosphate
  modified_base 17: mod_base = OTHER; note = 2'-O-methyladenosine-3'-phosphate
  modified_base 18: mod_base = OTHER; note = 2'-O-methyladenosine-3'-phosphate
  modified_base 19: mod_base = OTHER; note = 2'-O-methyladenosine-3'-phosphate
  modified_base 20: mod_base = OTHER; note = 2'-O-methylcytidine-3'-phosphate
  modified_base 21: mod_base = OTHER; note = 2'-O-methyluridine-3'-phosphate ((2S,4R)-1-[29-[[2-(acetylamino)-2-deoxy-beta-D-galactopyra nosyl]oxy]-14,14-bis[[3-[[3-[[5-[[2-(acetylamino)-2-deoxy-b eta-D-galactopyranosyl]oxy]-1-oxopentyl]amino]propyl]amino] -3-oxopropoxy]methyl]-1,12,19,25-tetraoxo-16-oxa-13,20,24-t riazanonacos-1-yl]-4-hydroxy-2-pyrrolidinyl)methyl ester
ggggcaaatgatgaagaaact

SEQ ID NO: 2801 - RNA, 23 nt, synthetic construct
  source 1..23: mol_type = other RNA
  modified_base 1: mod_base = OTHER; note = 2'-O-methyladenosine-3'-phosphorothioate
  modified_base 2: mod_base = OTHER; note = 2'-deoxy-2'-fluoroguanosine-3'-phosphorothioate
  modified_base 3: mod_base = OTHER; note = 2'-O-methyluridine-3'-phosphate
  modified_base 4: mod_base = OTHER; note = 2'-O-methyluridine-3'-phosphate
  modified_base 5: mod_base = OTHER; note = 2'-O-methyluridine-3'-phosphate
  modified_base 6: mod_base = OTHER; note = 2'-deoxy-2'-fluorocytidine-3'-phosphate
  modified_base 7: mod_base = OTHER; note = 2'-O-methyluridine-3'-phosphate
  modified_base 8: mod_base = OTHER; note = 2'-deoxy-2'-fluorouridine-3'-phosphate
  modified_base 9: mod_base = OTHER; note = 2'-deoxy-2'-fluorocytidine-3'-phosphate
  modified_base 10: mod_base = OTHER; note = 2'-O-methyladenosine-3'-phosphate
  modified_base 11: mod_base = OTHER; note = 2'-O-methyluridine-3'-phosphate
  modified_base 12: mod_base = OTHER; note = 2'-O-methylcytidine-3'-phosphate
  modified_base 13: mod_base = OTHER; note = 2'-O-methyladenosine-3'-phosphate
  modified_base 14: mod_base = OTHER; note = 2'-deoxy-2'-fluorouridine-3'-phosphate
  modified_base 15: mod_base = OTHER; note = 2'-O-methyluridine-3'-phosphate
  modified_base 16: mod_base = OTHER; note = 2'-deoxy-2'-fluorouridine-3'-phosphate
  modified_base 17: mod_base = OTHER; note = 2'-O-methylguanosine-3'-phosphate
  modified_base 18: mod_base = OTHER; note = 2'-O-methylcytidine-3'-phosphate
  modified_base 19: mod_base = OTHER; note = 2'-O-methylcytidine-3'-phosphate
  modified_base 20: mod_base = OTHER; note = 2'-O-methylcytidine-3'-phosphate
  modified_base 21: mod_base = OTHER; note = 2'-O-methylcytidine-3'-phosphorothioate
  modified_base 22: mod_base = OTHER; note = 2'-O-methyladenosine-3'-phosphorothioate
  modified_base 23: mod_base = OTHER; note = 2'-O-methylguanosine
agtttcttcatcatttgccccag

SEQ ID NO: 2802 - RNA, 21 nt, synthetic construct
  source 1..21: mol_type = other RNA
  modified_base 1: mod_base = OTHER; note = 2'-O-methylguanosine-3'-phosphorothioate
  modified_base 2: mod_base = OTHER; note = 2'-O-methyladenosine-3'-phosphorothioate
  modified_base 3: mod_base = OTHER; note = 2'-O-methylguanosine-3'-phosphate
  modified_base 4: mod_base = OTHER; note = 2'-O-methyladenosine-3'-phosphate
  modified_base 5: mod_base = OTHER; note = 2'-O-methyluridine-3'-phosphate
  modified_base 6: mod_base = OTHER; note = 2'-O-methyladenosine-3'-phosphate
  modified_base 7: mod_base = OTHER; note = 2'-deoxy-2'-fluorocytidine-3'-phosphate
  modified_base 8: mod_base = OTHER; note = 2'-O-methyluridine-3'-phosphate
  modified_base 9: mod_base = OTHER; note = 2'-deoxy-2'-fluoroadenosine-3'-phosphate
  modified_base 10: mod_base = OTHER; note = 2'-deoxy-2'-fluoroadenosine-3'-phosphate
  modified_base 11: mod_base = OTHER; note = 2'-deoxy-2'-fluoroadenosine-3'-phosphate
  modified_base 12: mod_base = OTHER; note = 2'-O-methylguanosine-3'-phosphate
  modified_base 13: mod_base = OTHER; note = 2'-O-methylguanosine-3'-phosphate
  modified_base 14: mod_base = OTHER; note = 2'-O-methyladenosine-3'-phosphate
  modified_base 15: mod_base = OTHER; note = 2'-O-methyladenosine-3'-phosphate
  modified_base 16: mod_base = OTHER; note = 2'-O-methylguanosine-3'-phosphate
  modified_base 17: mod_base = OTHER; note = 2'-O-methyladenosine-3'-phosphate
  modified_base 18: mod_base = OTHER; note = 2'-O-methyladenosine-3'-phosphate
  modified_base 19: mod_base = OTHER; note = 2'-O-methyluridine-3'-phosphate
  modified_base 20: mod_base = OTHER; note = 2'-O-methyluridine-3'-phosphate
  modified_base 21: mod_base = OTHER; note = 2'-O-methylcytidine-3'-phosphate ((2S,4R)-1-[29-[[2-(acetylamino)-2-deoxy-beta-D-galactopyra nosyl]oxy]-14,14-bis[[3-[[3-[[5-[[2-(acetylamino)-2-deoxy-b eta-D-galactopyranosyl]oxy]-1-oxopentyl]amino]propyl]amino] -3-oxopropoxy]methyl]-1,12,19,25-tetraoxo-16-oxa-13,20,24-t riazanonacos-1-yl]-4-hydroxy-2-pyrrolidinyl)methyl ester
gagatactaaaggaagaattc

SEQ ID NO: 2803 - RNA, 23 nt, synthetic construct
  source 1..23: mol_type = other RNA
  modified_base 1: mod_base = OTHER; note = 2'-O-methylguanosine-3'-phosphorothioate
  modified_base 2: mod_base = OTHER; note = 2'-deoxy-2'-fluoroadenosine-3'-phosphorothioate
  modified_base 3: mod_base = OTHER; note = 2'-O-methyladenosine-3'-phosphate
  modified_base 4: mod_base = OTHER; note = 2'-O-methyluridine-3'-phosphate
  modified_base 5: mod_base = OTHER; note = 2'-O-methyluridine-3'-phosphate
  modified_base 6: mod_base = OTHER; note = 2'-deoxy-2'-fluorocytidine-3'-phosphate
  modified_base 7: mod_base = OTHER; note = 2'-O-methyluridine-3'-phosphate
  modified_base 8: mod_base = OTHER; note = 2'-deoxy-2'-fluorouridine-3'-phosphate
  modified_base 9: mod_base = OTHER; note = 2'-deoxy-2'-fluorocytidine-3'-phosphate
  modified_base 10: mod_base = OTHER; note = 2'-O-methylcytidine-3'-phosphate
  modified_base 11: mod_base = OTHER; note = 2'-O-methyluridine-3'-phosphate
  modified_base 12: mod_base = OTHER; note = 2'-O-methyluridine-3'-phosphate
  modified_base 13: mod_base = OTHER; note = 2'-O-methyluridine-3'-phosphate
  modified_base 14: mod_base = OTHER; note = 2'-deoxy-2'-fluoroadenosine-3'-phosphate
  modified_base 15: mod_base = OTHER; note = 2'-O-methylguanosine-3'-phosphate
  modified_base 16: mod_base = OTHER; note = 2'-deoxy-2'-fluorouridine-3'-phosphate
  modified_base 17: mod_base = OTHER; note = 2'-O-methyladenosine-3'-phosphate
  modified_base 18: mod_base = OTHER; note = 2'-O-methyluridine-3'-phosphate
  modified_base 19: mod_base = OTHER; note = 2'-O-methylcytidine-3'-phosphate
  modified_base 20: mod_base = OTHER; note = 2'-O-methyluridine-3'-phosphate
  modified_base 21: mod_base = OTHER; note = 2'-O-methylcytidine-3'-phosphorothioate
  modified_base 22: mod_base = OTHER; note = 2'-O-methylguanosine-3'-phosphorothioate
  modified_base 23: mod_base = OTHER; note = 2'-O-methyladenosine
gaattcttcctttagtatctcga

SEQ ID NO: 2804 - RNA, 21 nt, synthetic construct
  source 1..21: mol_type = other RNA
  modified_base 1: mod_base = OTHER; note = 2'-O-methyladenosine-3'-phosphorothioate
  modified_base 2: mod_base = OTHER; note = 2'-O-methylguanosine-3'-phosphorothioate
  modified_base 3: mod_base = OTHER; note = 2'-O-methyladenosine-3'-phosphate
  modified_base 4: mod_base = OTHER; note = 2'-O-methyluridine-3'-phosphate
  modified_base 5: mod_base = OTHER; note = 2'-O-methyladenosine-3'-phosphate
  modified_base 6: mod_base = OTHER; note = 2'-O-methylcytidine-3'-phosphate
  modified_base 7: mod_base = OTHER; note = 2'-deoxy-2'-fluorouridine-3'-phosphate
  modified_base 8: mod_base = OTHER; note = 2'-O-methyladenosine-3'-phosphate
  modified_base 9: mod_base = OTHER; note = 2'-deoxy-2'-fluoroadenosine-3'-phosphate
  modified_base 10: mod_base = OTHER; note = 2'-deoxy-2'-fluoroadenosine-3'-phosphate
  modified_base 11: mod_base = OTHER; note = 2'-deoxy-2'-fluoroguanosine-3'-phosphate
  modified_base 12: mod_base = OTHER; note = 2'-O-methylguanosine-3'-phosphate
  modified_base 13: mod_base = OTHER; note = 2'-O-methyladenosine-3'-phosphate
  modified_base 14: mod_base = OTHER; note = 2'-O-methyladenosine-3'-phosphate
  modified_base 15: mod_base = OTHER; note = 2'-O-methylguanosine-3'-phosphate
  modified_base 16: mod_base = OTHER; note = 2'-O-methyladenosine-3'-phosphate
  modified_base 17: mod_base = OTHER; note = 2'-O-methyladenosine-3'-phosphate
  modified_base 18: mod_base = OTHER; note = 2'-O-methyluridine-3'-phosphate
  modified_base 19: mod_base = OTHER; note = 2'-O-methyluridine-3'-phosphate
  modified_base 20: mod_base = OTHER; note = 2'-O-methylcytidine-3'-phosphate
  modified_base 21: mod_base = OTHER; note = 2'-O-methylcytidine-3'-phosphate ((2S,4R)-1-[29-[[2-(acetylamino)-2-deoxy-beta-D-galactopyra nosyl]oxy]-14,14-bis[[3-[[3-[[5-[[2-(acetylamino)-2-deoxy-b eta-D-galactopyranosyl]oxy]-1-oxopentyl]amino]propyl]amino] -3-oxopropoxy]methyl]-1,12,19,25-tetraoxo-16-oxa-13,20,24-t riazanonacos-1-yl]-4-hydroxy-2-pyrrolidinyl)methyl ester
agatactaaaggaagaattcc

SEQ ID NO: 2805 - RNA, 23 nt, synthetic construct
  source 1..23: mol_type = other RNA
  modified_base 1: mod_base = OTHER; note = 2'-O-methylguanosine-3'-phosphorothioate
  modified_base 2: mod_base = OTHER; note = 2'-deoxy-2'-fluoroguanosine-3'-phosphorothioate
  modified_base 3: mod_base = OTHER; note = 2'-O-methyladenosine-3'-phosphate
  modified_base 4: mod_base = OTHER; note = 2'-O-methyladenosine-3'-phosphate
  modified_base 5: mod_base = OTHER; note = 2'-O-methyluridine-3'-phosphate
  modified_base 6: mod_base = OTHER; note = 2'-deoxy-2'-fluorouridine-3'-phosphate
  modified_base 7: mod_base = OTHER; note = 2'-O-methylcytidine-3'-phosphate
  modified_base 8: mod_base = OTHER; note = 2'-deoxy-2'-fluorouridine-3'-phosphate
  modified_base 9: mod_base = OTHER; note = 2'-deoxy-2'-fluorouridine-3'-phosphate
  modified_base 10: mod_base = OTHER; note = 2'-O-methylcytidine-3'-phosphate
  modified_base 11: mod_base = OTHER; note = 2'-O-methylcytidine-3'-phosphate
  modified_base 12: mod_base = OTHER; note = 2'-O-methyluridine-3'-phosphate
  modified_base 13: mod_base = OTHER; note = 2'-O-methyluridine-3'-phosphate
  modified_base 14: mod_base = OTHER; note = 2'-deoxy-2'-fluorouridine-3'-phosphate
  modified_base 15: mod_base = OTHER; note = 2'-O-methyladenosine-3'-phosphate
  modified_base 16: mod_base = OTHER; note = 2'-deoxy-2'-fluoroguanosine-3'-phosphate
  modified_base 17: mod_base = OTHER; note = 2'-O-methyluridine-3'-phosphate
  modified_base 18: mod_base = OTHER; note = 2'-O-methyladenosine-3'-phosphate
  modified_base 19: mod_base = OTHER; note = 2'-O-methyluridine-3'-phosphate
  modified_base 20: mod_base = OTHER; note = 2'-O-methylcytidine-3'-phosphate
  modified_base 21: mod_base = OTHER; note = 2'-O-methyluridine-3'-phosphorothioate
  modified_base 22: mod_base = OTHER; note = 2'-O-methylcytidine-3'-phosphorothioate
  modified_base 23: mod_base = OTHER; note = 2'-O-methylguanosine
ggaattcttcctttagtatctcg

SEQ ID NO: 2806 - RNA, 21 nt, synthetic construct
  source 1..21: mol_type = other RNA
  modified_base 1: mod_base = OTHER; note = 2'-O-methylcytidine-3'-phosphorothioate
  modified_base 2: mod_base = OTHER; note = 2'-O-methylcytidine-3'-phosphorothioate
  modified_base 3: mod_base = OTHER; note = 2'-O-methyluridine-3'-phosphate
  modified_base 4: mod_base = OTHER; note = 2'-O-methylcytidine-3'-phosphate
  modified_base 5: mod_base = OTHER; note = 2'-O-methylguanosine-3'-phosphate
  modified_base 6: mod_base = OTHER; note = 2'-O-methyladenosine-3'-phosphate
  modified_base 7: mod_base = OTHER; note = 2'-deoxy-2'-fluoroguanosine-3'-phosphate
  modified_base 8: mod_base = OTHER; note = 2'-O-methyladenosine-3'-phosphate
  modified_base 9: mod_base = OTHER; note = 2'-deoxy-2'-fluorouridine-3'-phosphate
  modified_base 10: mod_base = OTHER; note = 2'-deoxy-2'-fluoroadenosine-3'-phosphate
  modified_base 11: mod_base = OTHER; note = 2'-deoxy-2'-fluorocytidine-3'-phosphate
  modified_base 12: mod_base = OTHER; note = 2'-O-methyluridine-3'-phosphate
  modified_base 13: mod_base = OTHER; note = 2'-O-methyladenosine-3'-phosphate
  modified_base 14: mod_base = OTHER; note = 2'-O-methyladenosine-3'-phosphate
  modified_base 15: mod_base = OTHER; note = 2'-O-methyladenosine-3'-phosphate
  modified_base 16: mod_base = OTHER; note = 2'-O-methylguanosine-3'-phosphate
  modified_base 17: mod_base = OTHER; note = 2'-O-methylguanosine-3'-phosphate
  modified_base 18: mod_base = OTHER; note = 2'-O-methyladenosine-3'-phosphate
  modified_base 19: mod_base = OTHER; note = 2'-O-methyladenosine-3'-phosphate
  modified_base 20: mod_base = OTHER; note = 2'-O-methylguanosine-3'-phosphate
  modified_base 21: mod_base = OTHER; note = 2'-O-methyladenosine-3'-phosphate ((2S,4R)-1-[29-[[2-(acetylamino)-2-deoxy-beta-D-galactopyra nosyl]oxy]-14,14-bis[[3-[[3-[[5-[[2-(acetylamino)-2-deoxy-b eta-D-galactopyranosyl]oxy]-1-oxopentyl]amino]propyl]amino] -3-oxopropoxy]methyl]-1,12,19,25-tetraoxo-16-oxa-13,20,24-t riazanonacos-1-yl]-4-hydroxy-2-pyrrolidinyl)methyl ester
cctcgagatactaaaggaaga

SEQ ID NO: 2807 - RNA, 23 nt, synthetic construct
  source 1..23: mol_type = other RNA
  modified_base 1: mod_base = OTHER; note = 2'-O-methyluridine-3'-phosphorothioate
  modified_base 2: mod_base = OTHER; note = 2'-deoxy-2'-fluorocytidine-3'-phosphorothioate
  modified_base 3: mod_base = OTHER; note = 2'-O-methyluridine-3'-phosphate
  modified_base 4: mod_base = OTHER; note = 2'-O-methyluridine-3'-phosphate
  modified_base 5: mod_base = OTHER; note = 2'-O-methylcytidine-3'-phosphate
  modified_base 6: mod_base = OTHER; note = 2'-deoxy-2'-fluorocytidine-3'-phosphate
  modified_base 7: mod_base = OTHER; note = 2'-O-methyluridine-3'-phosphate
  modified_base 8: mod_base = OTHER; note = 2'-deoxy-2'-fluorouridine-3'-phosphate
  modified_base 9: mod_base = OTHER; note = 2'-deoxy-2'-fluorouridine-3'-phosphate
  modified_base 10: mod_base = OTHER; note = 2'-O-methyladenosine-3'-phosphate
  modified_base 11: mod_base = OTHER; note = 2'-O-methylguanosine-3'-phosphate
  modified_base 12: mod_base = OTHER; note = 2'-O-methyluridine-3'-phosphate
  modified_base 13: mod_base = OTHER; note = 2'-O-methyladenosine-3'-phosphate
  modified_base 14: mod_base = OTHER; note = 2'-deoxy-2'-fluorouridine-3'-phosphate
  modified_base 15: mod_base = OTHER; note = 2'-O-methylcytidine-3'-phosphate
  modified_base 16: mod_base = OTHER; note = 2'-deoxy-2'-fluorouridine-3'-phosphate
  modified_base 17: mod_base = OTHER; note = 2'-O-methylcytidine-3'-phosphate
  modified_base 18: mod_base = OTHER; note = 2'-O-methylguanosine-3'-phosphate
  modified_base 19: mod_base = OTHER; note = 2'-O-methyladenosine-3'-phosphate
  modified_base 20: mod_base = OTHER; note = 2'-O-methylguanosine-3'-phosphate
  modified_base 21: mod_base = OTHER; note = 2'-O-methylguanosine-3'-phosphorothioate
  modified_base 22: mod_base = OTHER; note = 2'-O-methyladenosine-3'-phosphorothioate
  modified_base 23: mod_base = OTHER; note = 2'-O-methylcytidine
tcttcctttagtatctcgaggac

SEQ ID NO: 2808 - RNA, 21 nt, synthetic construct
  source 1..21: mol_type = other RNA
  modified_base 1: mod_base = OTHER; note = 2'-O-methyluridine-3'-phosphorothioate
  modified_base 2: mod_base = OTHER; note = 2'-O-methylcytidine-3'-phosphorothioate
  modified_base 3: mod_base = OTHER; note = 2'-O-methylcytidine-3'-phosphate
  modified_base 4: mod_base = OTHER; note = 2'-O-methyluridine-3'-phosphate
  modified_base 5: mod_base = OTHER; note = 2'-O-methylcytidine-3'-phosphate
  modified_base 6: mod_base = OTHER; note = 2'-O-methylguanosine-3'-phosphate
  modified_base 7: mod_base = OTHER; note = 2'-deoxy-2'-fluoroadenosine-3'-phosphate
  modified_base 8: mod_base = OTHER; note = 2'-O-methylguanosine-3'-phosphate
  modified_base 9: mod_base = OTHER; note = 2'-deoxy-2'-fluoroadenosine-3'-phosphate
  modified_base 10: mod_base = OTHER; note = 2'-deoxy-2'-fluorouridine-3'-phosphate
  modified_base 11: mod_base = OTHER; note = 2'-deoxy-2'-fluoroadenosine-3'-phosphate
  modified_base 12: mod_base = OTHER; note = 2'-O-methylcytidine-3'-phosphate
  modified_base 13: mod_base = OTHER; note = 2'-O-methyluridine-3'-phosphate
  modified_base 14: mod_base = OTHER; note = 2'-O-methyladenosine-3'-phosphate
  modified_base 15: mod_base = OTHER; note = 2'-O-methyladenosine-3'-phosphate
  modified_base 16: mod_base = OTHER; note = 2'-O-methyladenosine-3'-phosphate
  modified_base 17: mod_base = OTHER; note = 2'-O-methylguanosine-3'-phosphate
  modified_base 18: mod_base = OTHER; note = 2'-O-methylguanosine-3'-phosphate
  modified_base 19: mod_base = OTHER; note = 2'-O-methyladenosine-3'-phosphate
  modified_base 20: mod_base = OTHER; note = 2'-O-methyladenosine-3'-phosphate
  modified_base 21: mod_base = OTHER; note = 2'-O-methylguanosine-3'-phosphate ((2S,4R)-1-[29-[[2-(acetylamino)-2-deoxy-beta-D-galactopyra nosyl]oxy]-14,14-bis[[3-[[3-[[5-[[2-(acetylamino)-2-deoxy-b eta-D-galactopyranosyl]oxy]-1-oxopentyl]amino]propyl]amino] -3-oxopropoxy]methyl]-1,12,19,25-tetraoxo-16-oxa-13,20,24-t riazanonacos-1-yl]-4-hydroxy-2-pyrrolidinyl)methyl ester
tcctcgagatactaaaggaag

SEQ ID NO: 2809 - RNA, 23 nt, synthetic construct
  source 1..23: mol_type = other RNA
  modified_base 1: mod_base = OTHER; note = 2'-O-methylcytidine-3'-phosphorothioate
  modified_base 2: mod_base = OTHER; note = 2'-deoxy-2'-fluorouridine-3'-phosphorothioate
  modified_base 3: mod_base = OTHER; note = 2'-O-methyluridine-3'-phosphate
  modified_base 4: mod_base = OTHER; note = 2'-O-methylcytidine-3'-phosphate
  modified_base 5: mod_base = OTHER; note = 2'-O-methylcytidine-3'-phosphate
  modified_base 6: mod_base = OTHER; note = 2'-deoxy-2'-fluorouridine-3'-phosphate
  modified_base 7: mod_base = OTHER; note = 2'-O-methyluridine-3'-phosphate
  modified_base 8: mod_base = OTHER; note = 2'-deoxy-2'-fluorouridine-3'-phosphate
  modified_base 9: mod_base = OTHER; note = 2'-deoxy-2'-fluoroadenosine-3'-phosphate
  modified_base 10: mod_base = OTHER; note = 2'-O-methylguanosine-3'-phosphate
  modified_base 11: mod_base = OTHER; note = 2'-O-methyluridine-3'-phosphate
  modified_base 12: mod_base = OTHER; note = 2'-O-methyladenosine-3'-phosphate
  modified_base 13: mod_base = OTHER; note = 2'-O-methyluridine-3'-phosphate
  modified_base 14: mod_base = OTHER; note = 2'-deoxy-2'-fluorocytidine-3'-phosphate
  modified_base 15: mod_base = OTHER; note = 2'-O-methyluridine-3'-phosphate
  modified_base 16: mod_base = OTHER; note = 2'-deoxy-2'-fluorocytidine-3'-phosphate
  modified_base 17: mod_base = OTHER; note = 2'-O-methylguanosine-3'-phosphate
  modified_base 18: mod_base = OTHER; note = 2'-O-methyladenosine-3'-phosphate
  modified_base 19: mod_base = OTHER; note = 2'-O-methylguanosine-3'-phosphate
  modified_base 20: mod_base = OTHER; note = 2'-O-methylguanosine-3'-phosphate
  modified_base 21: mod_base = OTHER; note = 2'-O-methyladenosine-3'-phosphorothioate
  modified_base 22: mod_base = OTHER; note = 2'-O-methylcytidine-3'-phosphorothioate
  modified_base 23: mod_base = OTHER; note = 2'-O-methyladenosine
cttcctttagtatctcgaggaca

SEQ ID NO: 2810 - RNA, 21 nt, synthetic construct
  source 1..21: mol_type = other RNA
  modified_base 1: mod_base = OTHER; note = 2'-O-methyladenosine-3'-phosphorothioate
  modified_base 2: mod_base = OTHER; note = 2'-O-methylcytidine-3'-phosphorothioate
  modified_base 3: mod_base = OTHER; note = 2'-O-methyladenosine-3'-phosphate
  modified_base 4: mod_base = OTHER; note = 2'-O-methyladenosine-3'-phosphate
  modified_base 5: mod_base = OTHER; note = 2'-O-methylcytidine-3'-phosphate
  modified_base 6: mod_base = OTHER; note = 2'-O-methyluridine-3'-phosphate
  modified_base 7: mod_base = OTHER; note = 2'-deoxy-2'-fluorocytidine-3'-phosphate
  modified_base 8: mod_base = OTHER; note = 2'-O-methyladenosine-3'-phosphate
  modified_base 9: mod_base = OTHER; note = 2'-deoxy-2'-fluoroguanosine-3'-phosphate
  modified_base 10: mod_base = OTHER; note = 2'-deoxy-2'-fluoroguanosine-3'-phosphate
  modified_base 11: mod_base = OTHER; note = 2'-deoxy-2'-fluoroadenosine-3'-phosphate
  modified_base 12: mod_base = OTHER; note = 2'-O-methyluridine-3'-phosphate
  modified_base 13: mod_base = OTHER; note = 2'-O-methylguanosine-3'-phosphate
  modified_base 14: mod_base = OTHER; note = 2'-O-methyladenosine-3'-phosphate
  modified_base 15: mod_base = OTHER; note = 2'-O-methyladenosine-3'-phosphate
  modified_base 16: mod_base = OTHER; note = 2'-O-methyladenosine-3'-phosphate
  modified_base 17: mod_base = OTHER; note = 2'-O-methyladenosine-3'-phosphate
  modified_base 18: mod_base = OTHER; note = 2'-O-methyladenosine-3'-phosphate
  modified_base 19: mod_base = OTHER; note = 2'-O-methyluridine-3'-phosphate
  modified_base 20: mod_base = OTHER; note = 2'-O-methyluridine-3'-phosphate
  modified_base 21: mod_base = OTHER; note = 2'-O-methyluridine-3'-phosphate ((2S,4R)-1-[29-[[2-(acetylamino)-2-deoxy-beta-D-galactopyra nosyl]oxy]-14,14-bis[[3-[[3-[[5-[[2-(acetylamino)-2-deoxy-b eta-D-galactopyranosyl]oxy]-1-oxopentyl]amino]propyl]amino] -3-oxopropoxy]methyl]-1,12,19,25-tetraoxo-16-oxa-13,20,24-t riazanonacos-1-yl]-4-hydroxy-2-pyrrolidinyl)methyl ester
acaactcaggatgaaaaattt

SEQ ID NO: 2811 - RNA, 23 nt, synthetic construct
  source 1..23: mol_type = other RNA
  modified_base 1: mod_base = OTHER; note = 2'-O-methyladenosine-3'-phosphorothioate
  modified_base 2: mod_base = OTHER; note = 2'-deoxy-2'-fluoroadenosine-3'-phosphorothioate
  modified_base 3: mod_base = OTHER; note = 2'-O-methyladenosine-3'-phosphate
  modified_base 4: mod_base = OTHER; note = 2'-O-methyluridine-3'-phosphate
  modified_base 5: mod_base = OTHER; note = 2'-O-methyluridine-3'-phosphate
  modified_base 6: mod_base = OTHER; note = 2'-deoxy-2'-fluorouridine-3'-phosphate
  modified_base 7: mod_base = OTHER; note = 2'-O-methyluridine-3'-phosphate
  modified_base 8: mod_base = OTHER; note = 2'-deoxy-2'-fluorouridine-3'-phosphate
  modified_base 9: mod_base = OTHER; note = 2'-deoxy-2'-fluorocytidine-3'-phosphate
  modified_base 10: mod_base = OTHER; note = 2'-O-methyladenosine-3'-phosphate
  modified_base 11: mod_base = OTHER; note = 2'-O-methyluridine-3'-phosphate
  modified_base 12: mod_base = OTHER; note = 2'-O-methylcytidine-3'-phosphate
  modified_base 13: mod_base = OTHER; note = 2'-O-methylcytidine-3'-phosphate
  modified_base 14: mod_base = OTHER; note = 2'-deoxy-2'-fluorouridine-3'-phosphate
  modified_base 15: mod_base = OTHER; note = 2'-O-methylguanosine-3'-phosphate
  modified_base 16: mod_base = OTHER; note = 2'-deoxy-2'-fluoroadenosine-3'-phosphate
  modified_base 17: mod_base = OTHER; note = 2'-O-methylguanosine-3'-phosphate
  modified_base 18: mod_base = OTHER; note = 2'-O-methyluridine-3'-phosphate
  modified_base 19: mod_base = OTHER; note = 2'-O-methyluridine-3'-phosphate
  modified_base 20: mod_base = OTHER; note = 2'-O-methylguanosine-3'-phosphate
  modified_base 21: mod_base = OTHER; note = 2'-O-methyluridine-3'-phosphorothioate
  modified_base 22: mod_base = OTHER; note = 2'-O-methylguanosine-3'-phosphorothioate
  modified_base 23: mod_base = OTHER; note = 2'-O-methylguanosine
aaatttttcatcctgagttgtgg

SEQ ID NO: 2812 - RNA, 21 nt, synthetic construct
  source 1..21: mol_type = other RNA
  modified_base 1: mod_base = OTHER; note = 2'-O-methylcytidine-3'-phosphorothioate
  modified_base 2: mod_base = OTHER; note = 2'-O-methyladenosine-3'-phosphorothioate
  modified_base 3: mod_base = OTHER; note = 2'-O-methyladenosine-3'-phosphate
  modified_base 4: mod_base = OTHER; note = 2'-O-methylcytidine-3'-phosphate
  modified_base 5: mod_base = OTHER; note = 2'-O-methyluridine-3'-phosphate
  modified_base 6: mod_base = OTHER; note = 2'-O-methylcytidine-3'-phosphate
  modified_base 7: mod_base = OTHER; note = 2'-deoxy-2'-fluoroadenosine-3'-phosphate
  modified_base 8: mod_base = OTHER; note = 2'-O-methylguanosine-3'-phosphate
  modified_base 9: mod_base = OTHER; note = 2'-deoxy-2'-fluoroguanosine-3'-phosphate
  modified_base 10: mod_base = OTHER; note = 2'-deoxy-2'-fluoroadenosine-3'-phosphate
  modified_base 11: mod_base = OTHER; note = 2'-deoxy-2'-fluorouridine-3'-phosphate
  modified_base 12: mod_base = OTHER; note = 2'-O-methylguanosine-3'-phosphate
  modified_base 13: mod_base = OTHER; note = 2'-O-methyladenosine-3'-phosphate
  modified_base 14: mod_base = OTHER; note = 2'-O-methyladenosine-3'-phosphate
  modified_base 15: mod_base = OTHER; note = 2'-O-methyladenosine-3'-phosphate
  modified_base 16: mod_base = OTHER; note = 2'-O-methyladenosine-3'-phosphate
  modified_base 17: mod_base = OTHER; note = 2'-O-methyladenosine-3'-phosphate
  modified_base 18: mod_base = OTHER; note = 2'-O-methyluridine-3'-phosphate
  modified_base 19: mod_base = OTHER; note = 2'-O-methyluridine-3'-phosphate
  modified_base 20: mod_base = OTHER; note = 2'-O-methyluridine-3'-phosphate
  modified_base 21: mod_base = OTHER; note = 2'-O-methyluridine-3'-phosphate ((2S,4R)-1-[29-[[2-(acetylamino)-2-deoxy-beta-D-galactopyra nosyl]oxy]-14,14-bis[[3-[[3-[[5-[[2-(acetylamino)-2-deoxy-b eta-D-galactopyranosyl]oxy]-1-oxopentyl]amino]propyl]amino] -3-oxopropoxy]methyl]-1,12,19,25-tetraoxo-16-oxa-13,20,24-t riazanonacos-1-yl]-4-hydroxy-2-pyrrolidinyl)methyl ester
caactcaggatgaaaaatttt

SEQ ID NO: 2813 - RNA, 23 nt, synthetic construct
  source 1..23: mol_type = other RNA
  modified_base 1: mod_base = OTHER; note = 2'-O-methyladenosine-3'-phosphorothioate
  modified_base 2: mod_base = OTHER; note = 2'-deoxy-2'-fluoroadenosine-3'-phosphorothioate
  modified_base 3: mod_base = OTHER; note = 2'-O-methyladenosine-3'-phosphate
  modified_base 4: mod_base = OTHER; note = 2'-O-methyladenosine-3'-phosphate
  modified_base 5: mod_base = OTHER; note = 2'-O-methyluridine-3'-phosphate
  modified_base 6: mod_base = OTHER; note = 2'-deoxy-2'-fluorouridine-3'-phosphate
  modified_base 7: mod_base = OTHER; note = 2'-O-methyluridine-3'-phosphate
  modified_base 8: mod_base = OTHER; note = 2'-deoxy-2'-fluorouridine-3'-phosphate
  modified_base 9: mod_base = OTHER; note = 2'-deoxy-2'-fluorouridine-3'-phosphate
  modified_base 10: mod_base = OTHER; note = 2'-O-methylcytidine-3'-phosphate
  modified_base 11: mod_base = OTHER; note = 2'-O-methyladenosine-3'-phosphate
  modified_base 12: mod_base = OTHER; note = 2'-O-methyluridine-3'-phosphate
  modified_base 13: mod_base = OTHER; note = 2'-O-methylcytidine-3'-phosphate
  modified_base 14: mod_base = OTHER; note = 2'-deoxy-2'-fluorocytidine-3'-phosphate
  modified_base 15: mod_base = OTHER; note = 2'-O-methyluridine-3'-phosphate
  modified_base 16: mod_base = OTHER; note = 2'-deoxy-2'-fluoroguanosine-3'-phosphate
  modified_base 17: mod_base = OTHER; note = 2'-O-methyladenosine-3'-phosphate
  modified_base 18: mod_base = OTHER; note = 2'-O-methylguanosine-3'-phosphate
  modified_base 19: mod_base = OTHER; note = 2'-O-methyluridine-3'-phosphate
  modified_base 20: mod_base = OTHER; note = 2'-O-methyluridine-3'-phosphate
  modified_base 21: mod_base = OTHER; note = 2'-O-methylguanosine-3'-phosphorothioate
  modified_base 22: mod_base = OTHER; note = 2'-O-methyluridine-3'-phosphorothioate
  modified_base 23: mod_base = OTHER; note = 2'-O-methylguanosine
aaaatttttcatcctgagttgtg

SEQ ID NO: 2814 - RNA, 21 nt, synthetic construct
  source 1..21: mol_type = other RNA
  modified_base 1: mod_base = OTHER; note = 2'-O-methylcytidine-3'-phosphorothioate
  modified_base 2: mod_base = OTHER; note = 2'-O-methylguanosine-3'-phosphorothioate
  modified_base 3: mod_base = OTHER; note = 2'-O-methylcytidine-3'-phosphate
  modified_base 4: mod_base = OTHER; note = 2'-O-methylcytidine-3'-phosphate
  modified_base 5: mod_base = OTHER; note = 2'-O-methyladenosine-3'-phosphate
  modified_base 6: mod_base = OTHER; note = 2'-O-methylcytidine-3'-phosphate
  modified_base 7: mod_base = OTHER; note = 2'-deoxy-2'-fluoroadenosine-3'-phosphate
  modified_base 8: mod_base = OTHER; note = 2'-O-methyladenosine-3'-phosphate
  modified_base 9: mod_base = OTHER; note = 2'-deoxy-2'-fluorocytidine-3'-phosphate
  modified_base 10: mod_base = OTHER; note = 2'-deoxy-2'-fluorouridine-3'-phosphate
  modified_base 11: mod_base = OTHER; note = 2'-deoxy-2'-fluorocytidine-3'-phosphate
  modified_base 12: mod_base = OTHER; note = 2'-O-methyladenosine-3'-phosphate
  modified_base 13: mod_base = OTHER; note = 2'-O-methylguanosine-3'-phosphate
  modified_base 14: mod_base = OTHER; note = 2'-O-methylguanosine-3'-phosphate
  modified_base 15: mod_base = OTHER; note = 2'-O-methyladenosine-3'-phosphate
  modified_base 16: mod_base = OTHER; note = 2'-O-methyluridine-3'-phosphate
  modified_base 17: mod_base = OTHER; note = 2'-O-methylguanosine-3'-phosphate
  modified_base 18: mod_base = OTHER; note = 2'-O-methyladenosine-3'-phosphate
  modified_base 19: mod_base = OTHER; note = 2'-O-methyladenosine-3'-phosphate
  modified_base 20: mod_base = OTHER; note = 2'-O-methyladenosine-3'-phosphate
  modified_base 21: mod_base = OTHER; note = 2'-O-methyladenosine-3'-phosphate ((2S,4R)-1-[29-[[2-(acetylamino)-2-deoxy-beta-D-galactopyra nosyl]oxy]-14,14-bis[[3-[[3-[[5-[[2-(acetylamino)-2-deoxy-b eta-D-galactopyranosyl]oxy]-1-oxopentyl]amino]propyl]amino] -3-oxopropoxy]methyl]-1,12,19,25-tetraoxo-16-oxa-13,20,24-t riazanonacos-1-yl]-4-hydroxy-2-pyrrolidinyl)methyl ester
cgccacaactcaggatgaaaa

SEQ ID NO: 2815 - RNA, 23 nt, synthetic construct
  source 1..23: mol_type = other RNA
  modified_base 1: mod_base = OTHER; note = 2'-O-methyluridine-3'-phosphorothioate
  modified_base 2: mod_base = OTHER; note = 2'-deoxy-2'-fluorouridine-3'-phosphorothioate
  modified_base 3: mod_base = OTHER; note = 2'-O-methyluridine-3'-phosphate
  modified_base 4: mod_base = OTHER; note = 2'-O-methyluridine-3'-phosphate
  modified_base 5: mod_base = OTHER; note = 2'-O-methylcytidine-3'-phosphate
  modified_base 6: mod_base = OTHER; note = 2'-deoxy-2'-fluoroadenosine-3'-phosphate
  modified_base 7: mod_base = OTHER; note = 2'-O-methyluridine-3'-phosphate
  modified_base 8: mod_base = OTHER; note = 2'-deoxy-2'-fluorocytidine-3'-phosphate
  modified_base 9: mod_base = OTHER; note = 2'-deoxy-2'-fluorocytidine-3'-phosphate
  modified_base 10: mod_base = OTHER; note = 2'-O-methyluridine-3'-phosphate
  modified_base 11: mod_base = OTHER; note = 2'-O-methylguanosine-3'-phosphate
  modified_base 12: mod_base = OTHER; note = 2'-O-methyladenosine-3'-phosphate
  modified_base 13: mod_base = OTHER; note = 2'-O-methylguanosine-3'-phosphate
  modified_base 14: mod_base = OTHER; note = 2'-deoxy-2'-fluorouridine-3'-phosphate
  modified_base 15: mod_base = OTHER; note = 2'-O-methyluridine-3'-phosphate
  modified_base 16: mod_base = OTHER; note = 2'-deoxy-2'-fluoroguanosine-3'-phosphate
  modified_base 17: mod_base = OTHER; note = 2'-O-methyluridine-3'-phosphate
  modified_base 18: mod_base = OTHER; note = 2'-O-methylguanosine-3'-phosphate
  modified_base 19: mod_base = OTHER; note = 2'-O-methylguanosine-3'-phosphate
  modified_base 20: mod_base = OTHER; note = 2'-O-methylcytidine-3'-phosphate
  modified_base 21: mod_base = OTHER; note = 2'-O-methylguanosine-3'-phosphorothioate
  modified_base 22: mod_base = OTHER; note = 2'-O-methylguanosine-3'-phosphorothioate
  modified_base 23: mod_base = OTHER; note = 2'-O-methylcytidine
ttttcatcctgagttgtggcggc

SEQ ID NO: 2816 - RNA, 21 nt, synthetic construct
  source 1..21: mol_type = other RNA
  modified_base 1: mod_base = OTHER; note = 2'-O-methylcytidine-3'-phosphorothioate
  modified_base 2: mod_base = OTHER; note = 2'-O-methylcytidine-3'-phosphorothioate
  modified_base 3: mod_base = OTHER; note = 2'-O-methylguanosine-3'-phosphate
  modified_base 4: mod_base = OTHER; note = 2'-O-methylcytidine-3'-phosphate
  modified_base 5: mod_base = OTHER; note = 2'-O-methylcytidine-3'-phosphate
  modified_base 6: mod_base = OTHER; note = 2'-O-methyladenosine-3'-phosphate
  modified_base 7: mod_base = OTHER; note = 2'-deoxy-2'-fluorocytidine-3'-phosphate
  modified_base 8: mod_base = OTHER; note = 2'-O-methyladenosine-3'-phosphate
  modified_base 9: mod_base = OTHER; note = 2'-deoxy-2'-fluoroadenosine-3'-phosphate
  modified_base 10: mod_base = OTHER; note = 2'-deoxy-2'-fluorocytidine-3'-phosphate
  modified_base 11: mod_base = OTHER; note = 2'-deoxy-2'-fluorouridine-3'-phosphate
  modified_base 12: mod_base = OTHER; note = 2'-O-methylcytidine-3'-phosphate
  modified_base 13: mod_base = OTHER; note = 2'-O-methyladenosine-3'-phosphate
  modified_base 14: mod_base = OTHER; note = 2'-O-methylguanosine-3'-phosphate
  modified_base 15: mod_base = OTHER; note = 2'-O-methylguanosine-3'-phosphate
  modified_base 16: mod_base = OTHER; note = 2'-O-methyladenosine-3'-phosphate
  modified_base 17: mod_base = OTHER; note = 2'-O-methyluridine-3'-phosphate
  modified_base 18: mod_base = OTHER; note = 2'-O-methylguanosine-3'-phosphate
  modified_base 19: mod_base = OTHER; note = 2'-O-methyladenosine-3'-phosphate
  modified_base 20: mod_base = OTHER; note = 2'-O-methyladenosine-3'-phosphate
  modified_base 21: mod_base = OTHER; note = 2'-O-methyladenosine-3'-phosphate ((2S,4R)-1-[29-[[2-(acetylamino)-2-deoxy-beta-D-galactopyra nosyl]oxy]-14,14-bis[[3-[[3-[[5-[[2-(acetylamino)-2-deoxy-b eta-D-galactopyranosyl]oxy]-1-oxopentyl]amino]propyl]amino] -3-oxopropoxy]methyl]-1,12,19,25-tetraoxo-16-oxa-13,20,24-t riazanonacos-1-yl]-4-hydroxy-2-pyrrolidinyl)methyl ester
ccgccacaactcaggatgaaa

SEQ ID NO: 2817 - RNA, 23 nt, synthetic construct
  source 1..23: mol_type = other RNA
  modified_base 1: mod_base = OTHER; note = 2'-O-methyluridine-3'-phosphorothioate
  modified_base 2: mod_base = OTHER; note = 2'-deoxy-2'-fluorouridine-3'-phosphorothioate
  modified_base 3: mod_base = OTHER; note = 2'-O-methyluridine-3'-phosphate
  modified_base 4: mod_base = OTHER; note = 2'-O-methylcytidine-3'-phosphate
  modified_base 5: mod_base = OTHER; note = 2'-O-methyladenosine-3'-phosphate
  modified_base 6: mod_base = OTHER; note = 2'-deoxy-2'-fluorouridine-3'-phosphate
  modified_base 7: mod_base = OTHER; note = 2'-O-methylcytidine-3'-phosphate
  modified_base 8: mod_base = OTHER; note = 2'-deoxy-2'-fluorocytidine-3'-phosphate
  modified_base 9: mod_base = OTHER; note = 2'-deoxy-2'-fluorouridine-3'-phosphate
  modified_base 10: mod_base = OTHER; note = 2'-O-methylguanosine-3'-phosphate
  modified_base 11: mod_base = OTHER; note = 2'-O-methyladenosine-3'-phosphate
  modified_base 12: mod_base = OTHER; note = 2'-O-methylguanosine-3'-phosphate
  modified_base 13: mod_base = OTHER; note = 2'-O-methyluridine-3'-phosphate
  modified_base 14: mod_base = OTHER; note = 2'-deoxy-2'-fluorouridine-3'-phosphate
  modified_base 15: mod_base = OTHER; note = 2'-O-methylguanosine-3'-phosphate
  modified_base 16: mod_base = OTHER; note = 2'-deoxy-2'-fluorouridine-3'-phosphate
  modified_base 17: mod_base = OTHER; note = 2'-O-methylguanosine-3'-phosphate
  modified_base 18: mod_base = OTHER; note = 2'-O-methylguanosine-3'-phosphate
  modified_base 19: mod_base = OTHER; note = 2'-O-methylcytidine-3'-phosphate
  modified_base 20: mod_base = OTHER; note = 2'-O-methylguanosine-3'-phosphate
  modified_base 21: mod_base = OTHER; note = 2'-O-methylguanosine-3'-phosphorothioate
  modified_base 22: mod_base = OTHER; note = 2'-O-methylcytidine-3'-phosphorothioate
  modified_base 23: mod_base = OTHER; note = 2'-O-methyladenosine
tttcatcctgagttgtggcggca

SEQ ID NO: 2818 - RNA, 21 nt, synthetic construct
  source 1..21: mol_type = other RNA
  modified_base 1: mod_base = OTHER; note = 2'-O-methyladenosine-3'-phosphorothioate
  modified_base 2: mod_base = OTHER; note = 2'-O-methylguanosine-3'-phosphorothioate
  modified_base 3: mod_base = OTHER; note = 2'-O-methylguanosine-3'-phosphate
  modified_base 4: mod_base = OTHER; note = 2'-O-methylguanosine-3'-phosphate
  modified_base 5: mod_base = OTHER; note = 2'-O-methyladenosine-3'-phosphate
  modified_base 6: mod_base = OTHER; note = 2'-O-methyladenosine-3'-phosphate
  modified_base 7: mod_base = OTHER; note = 2'-deoxy-2'-fluoroguanosine-3'-phosphate
  modified_base 8: mod_base = OTHER; note = 2'-O-methylguanosine-3'-phosphate
  modified_base 9: mod_base = OTHER; note = 2'-deoxy-2'-fluorouridine-3'-phosphate
  modified_base 10: mod_base = OTHER; note = 2'-deoxy-2'-fluoroguanosine-3'-phosphate
  modified_base 11: mod_base = OTHER; note = 2'-deoxy-2'-fluoroguanosine-3'-phosphate
  modified_base 12: mod_base = OTHER; note = 2'-O-methyladenosine-3'-phosphate
  modified_base 13: mod_base = OTHER; note = 2'-O-methyladenosine-3'-phosphate
  modified_base 14: mod_base = OTHER; note = 2'-O-methylguanosine-3'-phosphate
  modified_base 15: mod_base = OTHER; note = 2'-O-methyluridine-3'-phosphate
  modified_base 16: mod_base = OTHER; note = 2'-O-methylcytidine-3'-phosphate
  modified_base 17: mod_base = OTHER; note = 2'-O-methyluridine-3'-phosphate
  modified_base 18: mod_base = OTHER; note = 2'-O-methyluridine-3'-phosphate
  modified_base 19: mod_base = OTHER; note = 2'-O-methylcytidine-3'-phosphate
  modified_base 20: mod_base = OTHER; note = 2'-O-methylcytidine-3'-phosphate
  modified_base 21: mod_base = OTHER; note = 2'-O-methyluridine-3'-phosphate ((2S,4R)-1-[29-[[2-(acetylamino)-2-deoxy-beta-D-galactopyra nosyl]oxy]-14,14-bis[[3-[[3-[[5-[[2-(acetylamino)-2-deoxy-b eta-D-galactopyranosyl]oxy]-1-oxopentyl]amino]propyl]amino] -3-oxopropoxy]methyl]-1,12,19,25-tetraoxo-16-oxa-13,20,24-t riazanonacos-1-yl]-4-hydroxy-2-pyrrolidinyl)methyl ester
agggaaggtggaagtcttcct

SEQ ID NO: 2819 - RNA, 23 nt, synthetic construct
  source 1..23: mol_type = other RNA
  modified_base 1: mod_base = OTHER; note = 2'-O-methyladenosine-3'-phosphorothioate
  modified_base 2: mod_base = OTHER; note = 2'-deoxy-2'-fluoroguanosine-3'-phosphorothioate
  modified_base 3: mod_base = OTHER; note = 2'-O-methylguanosine-3'-phosphate
  modified_base 4: mod_base = OTHER; note = 2'-O-methyladenosine-3'-phosphate
  modified_base 5: mod_base = OTHER; note = 2'-O-methyladenosine-3'-phosphate
  modified_base 6: mod_base = OTHER; note = 2'-deoxy-2'-fluoroguanosine-3'-phosphate
  modified_base 7: mod_base = OTHER; note = 2'-O-methyladenosine-3'-phosphate
  modified_base 8: mod_base = OTHER; note = 2'-deoxy-2'-fluorocytidine-3'-phosphate
  modified_base 9: mod_base = OTHER; note = 2'-deoxy-2'-fluorouridine-3'-phosphate
  modified_base 10: mod_base = OTHER; note = 2'-O-methyluridine-3'-phosphate
  modified_base 11: mod_base = OTHER; note = 2'-O-methylcytidine-3'-phosphate
  modified_base 12: mod_base = OTHER; note = 2'-O-methylcytidine-3'-phosphate
  modified_base 13: mod_base = OTHER; note = 2'-O-methyladenosine-3'-phosphate
  modified_base 14: mod_base = OTHER; note = 2'-deoxy-2'-fluorocytidine-3'-phosphate
  modified_base 15: mod_base = OTHER; note = 2'-O-methylcytidine-3'-phosphate
  modified_base 16: mod_base = OTHER; note = 2'-deoxy-2'-fluorouridine-3'-phosphate
  modified_base 17: mod_base = OTHER; note = 2'-O-methyluridine-3'-phosphate
  modified_base 18: mod_base = OTHER; note = 2'-O-methylcytidine-3'-phosphate
  modified_base 19: mod_base = OTHER; note = 2'-O-methylcytidine-3'-phosphate
  modified_base 20: mod_base = OTHER; note = 2'-O-methylcytidine-3'-phosphate
  modified_base 21: mod_base = OTHER; note = 2'-O-methyluridine-3'-phosphorothioate
  modified_base 22: mod_base = OTHER; note = 2'-O-methyluridine-3'-phosphorothioate
  modified_base 23: mod_base = OTHER; note = 2'-O-methylcytidine
aggaagacttccaccttcccttc

SEQ ID NO: 2820 - RNA, 21 nt, synthetic construct
  source 1..21: mol_type = other RNA
  modified_base 1: mod_base = OTHER; note = 2'-O-methylguanosine-3'-phosphorothioate
  modified_base 2: mod_base = OTHER; note = 2'-O-methylguanosine-3'-phosphorothioate
  modified_base 3: mod_base = OTHER; note = 2'-O-methylguanosine-3'-phosphate
  modified_base 4: mod_base = OTHER; note = 2'-O-methyladenosine-3'-phosphate
  modified_base 5: mod_base = OTHER; note = 2'-O-methyladenosine-3'-phosphate
  modified_base 6: mod_base = OTHER; note = 2'-O-methylguanosine-3'-phosphate
  modified_base 7: mod_base = OTHER; note = 2'-deoxy-2'-fluoroguanosine-3'-phosphate
  modified_base 8: mod_base = OTHER; note = 2'-O-methyluridine-3'-phosphate
  modified_base 9: mod_base = OTHER; note = 2'-deoxy-2'-fluoroguanosine-3'-phosphate
  modified_base 10: mod_base = OTHER; note = 2'-deoxy-2'-fluoroguanosine-3'-phosphate
  modified_base 11: mod_base = OTHER; note = 2'-deoxy-2'-fluoroadenosine-3'-phosphate
  modified_base 12: mod_base = OTHER; note = 2'-O-methyladenosine-3'-phosphate
  modified_base 13: mod_base = OTHER; note = 2'-O-methylguanosine-3'-phosphate
  modified_base 14: mod_base = OTHER; note = 2'-O-methyluridine-3'-phosphate
  modified_base 15: mod_base = OTHER; note = 2'-O-methylcytidine-3'-phosphate
  modified_base 16: mod_base = OTHER; note = 2'-O-methyluridine-3'-phosphate
  modified_base 17: mod_base = OTHER; note = 2'-O-methyluridine-3'-phosphate
  modified_base 18: mod_base = OTHER; note = 2'-O-methylcytidine-3'-phosphate
  modified_base 19: mod_base = OTHER; note = 2'-O-methylcytidine-3'-phosphate
  modified_base 20: mod_base = OTHER; note = 2'-O-methyluridine-3'-phosphate
  modified_base 21: mod_base = OTHER; note = 2'-O-methylguanosine-3'-phosphate ((2S,4R)-1-[29-[[2-(acetylamino)-2-deoxy-beta-D-galactopyra nosyl]oxy]-14,14-bis[[3-[[3-[[5-[[2-(acetylamino)-2-deoxy-b eta-D-galactopyranosyl]oxy]-1-oxopentyl]amino]propyl]amino] -3-oxopropoxy]methyl]-1,12,19,25-tetraoxo-16-oxa-13,20,24-t riazanonacos-1-yl]-4-hydroxy-2-pyrrolidinyl)methyl ester
gggaaggtggaagtcttcctg

SEQ ID NO: 2821 - RNA, 23 nt, synthetic construct
  source 1..23: mol_type = other RNA
  modified_base 1: mod_base = OTHER; note = 2'-O-methylcytidine-3'-phosphorothioate
  modified_base 2: mod_base = OTHER; note = 2'-deoxy-2'-fluoroadenosine-3'-phosphorothioate
  modified_base 3: mod_base = OTHER; note = 2'-O-methylguanosine-3'-phosphate
  modified_base 4: mod_base = OTHER; note = 2'-O-methylguanosine-3'-phosphate
  modified_base 5: mod_base = OTHER; note = 2'-O-methyladenosine-3'-phosphate
  modified_base 6: mod_base = OTHER; note = 2'-deoxy-2'-fluoroadenosine-3'-phosphate
  modified_base 7: mod_base = OTHER; note = 2'-O-methylguanosine-3'-phosphate
  modified_base 8: mod_base = OTHER; note = 2'-deoxy-2'-fluoroadenosine-3'-phosphate
  modified_base 9: mod_base = OTHER; note = 2'-deoxy-2'-fluorocytidine-3'-phosphate
  modified_base 10: mod_base = OTHER; note = 2'-O-methyluridine-3'-phosphate
  modified_base 11: mod_base = OTHER; note = 2'-O-methyluridine-3'-phosphate
  modified_base 12: mod_base = OTHER; note = 2'-O-methylcytidine-3'-phosphate
  modified_base 13: mod_base = OTHER; note = 2'-O-methylcytidine-3'-phosphate
  modified_base 14: mod_base = OTHER; note = 2'-deoxy-2'-fluoroadenosine-3'-phosphate
  modified_base 15: mod_base = OTHER; note = 2'-O-methylcytidine-3'-phosphate
  modified_base 16: mod_base = OTHER; note = 2'-deoxy-2'-fluorocytidine-3'-phosphate
  modified_base 17: mod_base = OTHER; note = 2'-O-methyluridine-3'-phosphate
  modified_base 18: mod_base = OTHER; note = 2'-O-methyluridine-3'-phosphate
  modified_base 19: mod_base = OTHER; note = 2'-O-methylcytidine-3'-phosphate
  modified_base 20: mod_base = OTHER; note = 2'-O-methylcytidine-3'-phosphate
  modified_base 21: mod_base = OTHER; note = 2'-O-methylcytidine-3'-phosphorothioate
  modified_base 22: mod_base = OTHER; note = 2'-O-methyluridine-3'-phosphorothioate
  modified_base 23: mod_base = OTHER; note = 2'-O-methyluridine
caggaagacttccaccttccctt

SEQ ID NO: 2822 - RNA, 21 nt, synthetic construct
  source 1..21: mol_type = other RNA
  modified_base 1: mod_base = OTHER; note = 2'-O-methyluridine-3'-phosphorothioate
  modified_base 2: mod_base = OTHER; note = 2'-O-methylguanosine-3'-phosphorothioate
  modified_base 3: mod_base = OTHER; note = 2'-O-methylguanosine-3'-phosphate
  modified_base 4: mod_base = OTHER; note = 2'-O-methyladenosine-3'-phosphate
  modified_base 5: mod_base = OTHER; note = 2'-O-methyladenosine-3'-phosphate
  modified_base 6: mod_base = OTHER; note = 2'-O-methylguanosine-3'-phosphate
  modified_base 7: mod_base = OTHER; note = 2'-deoxy-2'-fluoroguanosine-3'-phosphate
  modified_base 8: mod_base = OTHER; note = 2'-O-methylguanosine-3'-phosphate
  modified_base 9: mod_base = OTHER; note = 2'-deoxy-2'-fluoroadenosine-3'-phosphate
  modified_base 10: mod_base = OTHER; note = 2'-deoxy-2'-fluoroadenosine-3'-phosphate
  modified_base 11: mod_base = OTHER; note = 2'-deoxy-2'-fluoroguanosine-3'-phosphate
  modified_base 12: mod_base = OTHER; note = 2'-O-methylguanosine-3'-phosphate
  modified_base 13: mod_base = OTHER; note = 2'-O-methyluridine-3'-phosphate
  modified_base 14: mod_base = OTHER; note = 2'-O-methylguanosine-3'-phosphate
  modified_base 15: mod_base = OTHER; note = 2'-O-methylguanosine-3'-phosphate
  modified_base 16: mod_base = OTHER; note = 2'-O-methyladenosine-3'-phosphate
  modified_base 17: mod_base = OTHER; note = 2'-O-methyladenosine-3'-phosphate
  modified_base 18: mod_base = OTHER; note = 2'-O-methylguanosine-3'-phosphate
  modified_base 19: mod_base = OTHER; note = 2'-O-methyluridine-3'-phosphate
  modified_base 20: mod_base = OTHER; note = 2'-O-methylcytidine-3'-phosphate
  modified_base 21: mod_base = OTHER; note = 2'-O-methyluridine-3'-phosphate ((2S,4R)-1-[29-[[2-(acetylamino)-2-deoxy-beta-D-galactopyra nosyl]oxy]-14,14-bis[[3-[[3-[[5-[[2-(acetylamino)-2-deoxy-b eta-D-galactopyranosyl]oxy]-1-oxopentyl]amino]propyl]amino] -3-oxopropoxy]methyl]-1,12,19,25-tetraoxo-16-oxa-13,20,24-t riazanonacos-1-yl]-4-hydroxy-2-pyrrolidinyl)methyl ester
tggaagggaaggtggaagtct

SEQ ID NO: 2823 - RNA, 23 nt, synthetic construct
  source 1..23: mol_type = other RNA
  modified_base 1: mod_base = OTHER; note = 2'-O-methyladenosine-3'-phosphorothioate
  modified_base 2: mod_base = OTHER; note = 2'-deoxy-2'-fluoroguanosine-3'-phosphorothioate
  modified_base 3: mod_base = OTHER; note = 2'-O-methyladenosine-3'-phosphate
  modified_base 4: mod_base = OTHER; note = 2'-O-methylcytidine-3'-phosphate
  modified_base 5: mod_base = OTHER; note = 2'-O-methyluridine-3'-phosphate
  modified_base 6: mod_base = OTHER; note = 2'-deoxy-2'-fluorouridine-3'-phosphate
  modified_base 7: mod_base = OTHER; note = 2'-O-methylcytidine-3'-phosphate
  modified_base 8: mod_base = OTHER; note = 2'-deoxy-2'-fluorocytidine-3'-phosphate
  modified_base 9: mod_base = OTHER; note = 2'-deoxy-2'-fluoroadenosine-3'-phosphate
  modified_base 10: mod_base = OTHER; note = 2'-O-methylcytidine-3'-phosphate
  modified_base 11: mod_base = OTHER; note = 2'-O-methylcytidine-3'-phosphate
  modified_base 12: mod_base = OTHER; note = 2'-O-methyluridine-3'-phosphate
  modified_base 13: mod_base = OTHER; note = 2'-O-methyluridine-3'-phosphate
  modified_base 14: mod_base = OTHER; note = 2'-deoxy-2'-fluorocytidine-3'-phosphate
  modified_base 15: mod_base = OTHER; note = 2'-O-methylcytidine-3'-phosphate
  modified_base 16: mod_base = OTHER; note = 2'-deoxy-2'-fluorocytidine-3'-phosphate
  modified_base 17: mod_base = OTHER; note = 2'-O-methyluridine-3'-phosphate
  modified_base 18: mod_base = OTHER; note = 2'-O-methyluridine-3'-phosphate
  modified_base 19: mod_base = OTHER; note = 2'-O-methylcytidine-3'-phosphate
  modified_base 20: mod_base = OTHER; note = 2'-O-methylcytidine-3'-phosphate
  modified_base 21: mod_base = OTHER; note = 2'-O-methyladenosine-3'-phosphorothioate
  modified_base 22: mod_base = OTHER; note = 2'-O-methylcytidine-3'-phosphorothioate
  modified_base 23: mod_base = OTHER; note = 2'-O-methyladenosine
agacttccaccttcccttccaca

SEQ ID NO: 2824 - RNA, 21 nt, synthetic construct
  source 1..21: mol_type = other RNA
  modified_base 1: mod_base = OTHER; note = 2'-O-methylguanosine-3'-phosphorothioate
  modified_base 2: mod_base = OTHER; note = 2'-O-methyluridine-3'-phosphorothioate
  modified_base 3: mod_base = OTHER; note = 2'-O-methylguanosine-3'-phosphate
  modified_base 4: mod_base = OTHER; note = 2'-O-methylguanosine-3'-phosphate
  modified_base 5: mod_base = OTHER; note = 2'-O-methyladenosine-3'-phosphate
  modified_base 6: mod_base = OTHER; note = 2'-O-methyladenosine-3'-phosphate
  modified_base 7: mod_base = OTHER; note = 2'-deoxy-2'-fluoroguanosine-3'-phosphate
  modified_base 8: mod_base = OTHER; note = 2'-O-methylguanosine-3'-phosphate
  modified_base 9: mod_base = OTHER; note = 2'-deoxy-2'-fluoroguanosine-3'-phosphate
  modified_base 10: mod_base = OTHER; note = 2'-deoxy-2'-fluoroadenosine-3'-phosphate
  modified_base 11: mod_base = OTHER; note = 2'-deoxy-2'-fluoroadenosine-3'-phosphate
  modified_base 12: mod_base = OTHER; note = 2'-O-methylguanosine-3'-phosphate
  modified_base 13: mod_base = OTHER; note = 2'-O-methylguanosine-3'-phosphate
  modified_base 14: mod_base = OTHER; note = 2'-O-methyluridine-3'-phosphate
  modified_base 15: mod_base = OTHER; note = 2'-O-methylguanosine-3'-phosphate
  modified_base 16: mod_base = OTHER; note = 2'-O-methylguanosine-3'-phosphate
  modified_base 17: mod_base = OTHER; note = 2'-O-methyladenosine-3'-phosphate
  modified_base 18: mod_base = OTHER; note = 2'-O-methyladenosine-3'-phosphate
  modified_base 19: mod_base = OTHER; note = 2'-O-methylguanosine-3'-phosphate
  modified_base 20: mod_base = OTHER; note = 2'-O-methyluridine-3'-phosphate
  modified_base 21: mod_base = OTHER; note = 2'-O-methylcytidine-3'-phosphate ((2S,4R)-1-[29-[[2-(acetylamino)-2-deoxy-beta-D-galactopyra nosyl]oxy]-14,14-bis[[3-[[3-[[5-[[2-(acetylamino)-2-deoxy-b eta-D-galactopyranosyl]oxy]-1-oxopentyl]amino]propyl]amino] -3-oxopropoxy]methyl]-1,12,19,25-tetraoxo-16-oxa-13,20,24-t riazanonacos-1-yl]-4-hydroxy-2-pyrrolidinyl)methyl ester
gtggaagggaaggtggaagtc

SEQ ID NO: 2825 - RNA, 23 nt, synthetic construct
  source 1..23: mol_type = other RNA
  modified_base 1: mod_base = OTHER; note = 2'-O-methylguanosine-3'-phosphorothioate
  modified_base 2: mod_base = OTHER; note = 2'-deoxy-2'-fluoroadenosine-3'-phosphorothioate
  modified_base 3: mod_base = OTHER; note = 2'-O-methylcytidine-3'-phosphate
  modified_base 4: mod_base = OTHER; note = 2'-O-methyluridine-3'-phosphate
  modified_base 5: mod_base = OTHER; note = 2'-O-methyluridine-3'-phosphate
  modified_base 6: mod_base = OTHER; note = 2'-deoxy-2'-fluorocytidine-3'-phosphate
  modified_base 7: mod_base = OTHER; note = 2'-O-methylcytidine-3'-phosphate
  modified_base 8: mod_base = OTHER; note = 2'-deoxy-2'-fluoroadenosine-3'-phosphate
  modified_base 9: mod_base = OTHER; note = 2'-deoxy-2'-fluorocytidine-3'-phosphate
  modified_base 10: mod_base = OTHER; note = 2'-O-methylcytidine-3'-phosphate
  modified_base 11: mod_base = OTHER; note = 2'-O-methyluridine-3'-phosphate
  modified_base 12: mod_base = OTHER; note = 2'-O-methyluridine-3'-phosphate
  modified_base 13: mod_base = OTHER; note = 2'-O-methylcytidine-3'-phosphate
  modified_base 14: mod_base = OTHER; note = 2'-deoxy-2'-fluorocytidine-3'-phosphate
  modified_base 15: mod_base = OTHER; note = 2'-O-methylcytidine-3'-phosphate
  modified_base 16: mod_base = OTHER; note = 2'-deoxy-2'-fluorouridine-3'-phosphate
  modified_base 17: mod_base = OTHER; note = 2'-O-methyluridine-3'-phosphate
  modified_base 18: mod_base = OTHER; note = 2'-O-methylcytidine-3'-phosphate
  modified_base 19: mod_base = OTHER; note = 2'-O-methylcytidine-3'-phosphate
  modified_base 20: mod_base = OTHER; note = 2'-O-methyladenosine-3'-phosphate
  modified_base 21: mod_base = OTHER; note = 2'-O-methylcytidine-3'-phosphorothioate
  modified_base 22: mod_base = OTHER; note = 2'-O-methyladenosine-3'-phosphorothioate
  modified_base 23: mod_base = OTHER; note = 2'-O-methylguanosine
gacttccaccttcccttccacag

SEQ ID NO: 2826 - RNA, 21 nt, synthetic construct
  source 1..21: mol_type = other RNA
  modified_base 1: mod_base = OTHER; note = 2'-O-methylguanosine-3'-phosphorothioate
  modified_base 2: mod_base = OTHER; note = 2'-O-methylguanosine-3'-phosphorothioate
  modified_base 3: mod_base = OTHER; note = 2'-O-methylcytidine-3'-phosphate
  modified_base 4: mod_base = OTHER; note = 2'-O-methylguanosine-3'-phosphate
  modified_base 5: mod_base = OTHER; note = 2'-O-methyladenosine-3'-phosphate
  modified_base 6: mod_base = OTHER; note = 2'-O-methylguanosine-3'-phosphate
  modified_base 7: mod_base = OTHER; note = 2'-deoxy-2'-fluorocytidine-3'-phosphate
  modified_base 8: mod_base = OTHER; note = 2'-O-methyluridine-3'-phosphate
  modified_base 9: mod_base = OTHER; note = 2'-deoxy-2'-fluorouridine-3'-phosphate
  modified_base 10: mod_base = OTHER; note = 2'-deoxy-2'-fluoroguanosine-3'-phosphate
  modified_base 11: mod_base = OTHER; note = 2'-deoxy-2'-fluorocytidine-3'-phosphate
  modified_base 12: mod_base = OTHER; note = 2'-O-methylcytidine-3'-phosphate
  modified_base 13: mod_base = OTHER; note = 2'-O-methyladenosine-3'-phosphate
  modified_base 14: mod_base = OTHER; note = 2'-O-methylcytidine-3'-phosphate
  modified_base 15: mod_base = OTHER; note = 2'-O-methyluridine-3'-phosphate
  modified_base 16: mod_base = OTHER; note = 2'-O-methylguanosine-3'-phosphate
  modified_base 17: mod_base = OTHER; note = 2'-O-methyluridine-3'-phosphate
  modified_base 18: mod_base = OTHER; note = 2'-O-methylguanosine-3'-phosphate
  modified_base 19: mod_base = OTHER; note = 2'-O-methyladenosine-3'-phosphate
  modified_base 20: mod_base = OTHER; note = 2'-O-methylguanosine-3'-phosphate
  modified_base 21: mod_base = OTHER; note = 2'-O-methyladenosine-3'-phosphate ((2S,4R)-1-[29-[[2-(acetylamino)-2-deoxy-beta-D-galactopyra nosyl]oxy]-14,14-bis[[3-[[3-[[5-[[2-(acetylamino)-2-deoxy-b eta-D-galactopyranosyl]oxy]-1-oxopentyl]amino]propyl]amino] -3-oxopropoxy]methyl]-1,12,19,25-tetraoxo-16-oxa-13,20,24-t riazanonacos-1-yl]-4-hydroxy-2-pyrrolidinyl)methyl ester
ggcgagcttgccactgtgaga

SEQ ID NO: 2827 - RNA, 23 nt, synthetic construct
  source 1..23: mol_type = other RNA
  modified_base 1: mod_base = OTHER; note = 2'-O-methyluridine-3'-phosphorothioate
  modified_base 2: mod_base = OTHER; note = 2'-deoxy-2'-fluorocytidine-3'-phosphorothioate
  modified_base 3: mod_base = OTHER; note = 2'-O-methyluridine-3'-phosphate
  modified_base 4: mod_base = OTHER; note = 2'-O-methylcytidine-3'-phosphate
  modified_base 5: mod_base = OTHER; note = 2'-O-methyladenosine-3'-phosphate
  modified_base 6: mod_base = OTHER; note = 2'-deoxy-2'-fluorocytidine-3'-phosphate
  modified_base 7: mod_base = OTHER; note = 2'-O-methyladenosine-3'-phosphate
  modified_base 8: mod_base = OTHER; note = 2'-deoxy-2'-fluoroguanosine-3'-phosphate
  modified_base 9: mod_base = OTHER; note = 2'-deoxy-2'-fluorouridine-3'-phosphate
  modified_base 10: mod_base = OTHER; note = 2'-O-methylguanosine-3'-phosphate
  modified_base 11: mod_base = OTHER; note = 2'-O-methylguanosine-3'-phosphate
  modified_base 12: mod_base = OTHER; note = 2'-O-methylcytidine-3'-phosphate
  modified_base 13: mod_base = OTHER; note = 2'-O-methyladenosine-3'-phosphate
  modified_base 14: mod_base = OTHER; note = 2'-deoxy-2'-fluoroadenosine-3'-phosphate
  modified_base 15: mod_base = OTHER; note = 2'-O-methylguanosine-3'-phosphate
  modified_base 16: mod_base = OTHER; note = 2'-deoxy-2'-fluorocytidine-3'-phosphate
  modified_base 17: mod_base = OTHER; note = 2'-O-methyluridine-3'-phosphate
  modified_base 18: mod_base = OTHER; note = 2'-O-methylcytidine-3'-phosphate
  modified_base 19: mod_base = OTHER; note = 2'-O-methylguanosine-3'-phosphate
  modified_base 20: mod_base = OTHER; note = 2'-O-methylcytidine-3'-phosphate
  modified_base 21: mod_base = OTHER; note = 2'-O-methylcytidine-3'-phosphorothioate
  modified_base 22: mod_base = OTHER; note = 2'-O-methylguanosine-3'-phosphorothioate
  modified_base 23: mod_base = OTHER; note = 2'-O-methyluridine
tctcacagtggcaagctcgccgt

SEQ ID NO: 2828 - RNA, 21 nt, synthetic construct
  source 1..21: mol_type = other RNA
  modified_base 1: mod_base = OTHER; note = 2'-O-methylguanosine-3'-phosphorothioate
  modified_base 2: mod_base = OTHER; note = 2'-O-methylcytidine-3'-phosphorothioate
  modified_base 3: mod_base = OTHER; note = 2'-O-methylguanosine-3'-phosphate
  modified_base 4: mod_base = OTHER; note = 2'-O-methyladenosine-3'-phosphate
  modified_base 5: mod_base = OTHER; note = 2'-O-methylguanosine-3'-phosphate
  modified_base 6: mod_base = OTHER; note = 2'-O-methylcytidine-3'-phosphate
  modified_base 7: mod_base = OTHER; note = 2'-deoxy-2'-fluorouridine-3'-phosphate
  modified_base 8: mod_base = OTHER; note = 2'-O-methyluridine-3'-phosphate
  modified_base 9: mod_base = OTHER; note = 2'-deoxy-2'-fluoroguanosine-3'-phosphate
  modified_base 10: mod_base = OTHER; note = 2'-deoxy-2'-fluorocytidine-3'-phosphate
  modified_base 11: mod_base = OTHER; note = 2'-deoxy-2'-fluorocytidine-3'-phosphate
  modified_base 12: mod_base = OTHER; note = 2'-O-methyladenosine-3'-phosphate
  modified_base 13: mod_base = OTHER; note = 2'-O-methylcytidine-3'-phosphate
  modified_base 14: mod_base = OTHER; note = 2'-O-methyluridine-3'-phosphate
  modified_base 15: mod_base = OTHER; note = 2'-O-methylguanosine-3'-phosphate
  modified_base 16: mod_base = OTHER; note = 2'-O-methyluridine-3'-phosphate
  modified_base 17: mod_base = OTHER; note = 2'-O-methylguanosine-3'-phosphate
  modified_base 18: mod_base = OTHER; note = 2'-O-methyladenosine-3'-phosphate
  modified_base 19: mod_base = OTHER; note = 2'-O-methylguanosine-3'-phosphate
  modified_base 20: mod_base = OTHER; note = 2'-O-methyladenosine-3'-phosphate
  modified_base 21: mod_base = OTHER; note = 2'-O-methylguanosine-3'-phosphate ((2S,4R)-1-[29-[[2-(acetylamino)-2-deoxy-beta-D-galactopyra nosyl]oxy]-14,14-bis[[3-[[3-[[5-[[2-(acetylamino)-2-deoxy-b eta-D-galactopyranosyl]oxy]-1-oxopentyl]amino]propyl]amino] -3-oxopropoxy]methyl]-1,12,19,25-tetraoxo-16-oxa-13,20,24-t riazanonacos-1-yl]-4-hydroxy-2-pyrrolidinyl)methyl ester
gcgagcttgccactgtgagag

SEQ ID NO: 2829 - RNA, 23 nt, synthetic construct
  source 1..23: mol_type = other RNA
  modified_base 1: mod_base = OTHER; note = 2'-O-methylcytidine-3'-phosphorothioate
  modified_base 2: mod_base = OTHER; note = 2'-deoxy-2'-fluorouridine-3'-phosphorothioate
  modified_base 3: mod_base = OTHER; note = 2'-O-methylcytidine-3'-phosphate
  modified_base 4: mod_base = OTHER; note = 2'-O-methyluridine-3'-phosphate
  modified_base 5: mod_base = OTHER; note = 2'-O-methylcytidine-3'-phosphate
  modified_base 6: mod_base = OTHER; note = 2'-deoxy-2'-fluoroadenosine-3'-phosphate
  modified_base 7: mod_base = OTHER; note = 2'-O-methylcytidine-3'-phosphate
  modified_base 8: mod_base = OTHER; note = 2'-deoxy-2'-fluoroadenosine-3'-phosphate
  modified_base 9: mod_base = OTHER; note = 2'-deoxy-2'-fluoroguanosine-3'-phosphate
  modified_base 10: mod_base = OTHER; note = 2'-O-methyluridine-3'-phosphate
  modified_base 11: mod_base = OTHER; note = 2'-O-methylguanosine-3'-phosphate
  modified_base 12: mod_base = OTHER; note = 2'-O-methylguanosine-3'-phosphate
  modified_base 13: mod_base = OTHER; note = 2'-O-methylcytidine-3'-phosphate
  modified_base 14: mod_base = OTHER; note = 2'-deoxy-2'-fluoroadenosine-3'-phosphate
  modified_base 15: mod_base = OTHER; note = 2'-O-methyladenosine-3'-phosphate
  modified_base 16: mod_base = OTHER; note = 2'-deoxy-2'-fluoroguanosine-3'-phosphate
  modified_base 17: mod_base = OTHER; note = 2'-O-methylcytidine-3'-phosphate
  modified_base 18: mod_base = OTHER; note = 2'-O-methyluridine-3'-phosphate
  modified_base 19: mod_base = OTHER; note = 2'-O-methylcytidine-3'-phosphate
  modified_base 20: mod_base = OTHER; note = 2'-O-methylguanosine-3'-phosphate
  modified_base 21: mod_base = OTHER; note = 2'-O-methylcytidine-3'-phosphorothioate
  modified_base 22: mod_base = OTHER; note = 2'-O-methylcytidine-3'-phosphorothioate
  modified_base 23: mod_base = OTHER; note = 2'-O-methylguanosine
ctctcacagtggcaagctcgccg

SEQ ID NO: 2830 - RNA, 21 nt, synthetic construct
  source 1..21: mol_type = other RNA
  modified_base 1: mod_base = OTHER; note = 2'-O-methylguanosine-3'-phosphorothioate
  modified_base 2: mod_base = OTHER; note = 2'-O-methylguanosine-3'-phosphorothioate
  modified_base 3: mod_base = OTHER; note = 2'-O-methyladenosine-3'-phosphate
  modified_base 4: mod_base = OTHER; note = 2'-O-methylcytidine-3'-phosphate
  modified_base 5: mod_base = OTHER; note = 2'-O-methylguanosine-3'-phosphate
  modified_base 6: mod_base = OTHER; note = 2'-O-methylguanosine-3'-phosphate
  modified_base 7: mod_base = OTHER; note = 2'-deoxy-2'-fluorocytidine-3'-phosphate
  modified_base 8: mod_base = OTHER; note = 2'-O-methylguanosine-3'-phosphate
  modified_base 9: mod_base = OTHER; note = 2'-deoxy-2'-fluoroadenosine-3'-phosphate
  modified_base 10: mod_base = OTHER; note = 2'-deoxy-2'-fluoroguanosine-3'-phosphate
  modified_base 11: mod_base = OTHER; note = 2'-deoxy-2'-fluorocytidine-3'-phosphate
  modified_base 12: mod_base = OTHER; note = 2'-O-methyluridine-3'-phosphate
  modified_base 13: mod_base = OTHER; note = 2'-O-methyluridine-3'-phosphate
  modified_base 14: mod_base = OTHER; note = 2'-O-methylguanosine-3'-phosphate
  modified_base 15: mod_base = OTHER; note = 2'-O-methylcytidine-3'-phosphate
  modified_base 16: mod_base = OTHER; note = 2'-O-methylcytidine-3'-phosphate
  modified_base 17: mod_base = OTHER; note = 2'-O-methyladenosine-3'-phosphate
  modified_base 18: mod_base = OTHER; note = 2'-O-methylcytidine-3'-phosphate
  modified_base 19: mod_base = OTHER; note = 2'-O-methyluridine-3'-phosphate
  modified_base 20: mod_base = OTHER; note = 2'-O-methylguanosine-3'-phosphate
  modified_base 21: mod_base = OTHER; note = 2'-O-methyluridine-3'-phosphate ((2S,4R)-1-[29-[[2-(acetylamino)-2-deoxy-beta-D-galactopyra nosyl]oxy]-14,14-bis[[3-[[3-[[5-[[2-(acetylamino)-2-deoxy-b eta-D-galactopyranosyl]oxy]-1-oxopentyl]amino]propyl]amino] -3-oxopropoxy]methyl]-1,12,19,25-tetraoxo-16-oxa-13,20,24-t riazanonacos-1-yl]-4-hydroxy-2-pyrrolidinyl)methyl ester
ggacggcgagcttgccactgt

SEQ ID NO: 2831 - RNA, 23 nt, synthetic construct
  source 1..23: mol_type = other RNA
  modified_base 1: mod_base = OTHER; note = 2'-O-methyladenosine-3'-phosphorothioate
  modified_base 2: mod_base = OTHER; note = 2'-deoxy-2'-fluorocytidine-3'-phosphorothioate
  modified_base 3: mod_base = OTHER; note = 2'-O-methyladenosine-3'-phosphate
  modified_base 4: mod_base = OTHER; note = 2'-O-methylguanosine-3'-phosphate
  modified_base 5: mod_base = OTHER; note = 2'-O-methyluridine-3'-phosphate
  modified_base 6: mod_base = OTHER; note = 2'-deoxy-2'-fluoroguanosine-3'-phosphate
  modified_base 7: mod_base = OTHER; note = 2'-O-methylguanosine-3'-phosphate
  modified_base 8: mod_base = OTHER; note = 2'-deoxy-2'-fluorocytidine-3'-phosphate
  modified_base 9: mod_base = OTHER; note = 2'-deoxy-2'-fluoroadenosine-3'-phosphate
  modified_base 10: mod_base = OTHER; note = 2'-O-methyladenosine-3'-phosphate
  modified_base 11: mod_base = OTHER; note = 2'-O-methylguanosine-3'-phosphate
  modified_base 12: mod_base = OTHER; note = 2'-O-methylcytidine-3'-phosphate
  modified_base 13: mod_base = OTHER; note = 2'-O-methyluridine-3'-phosphate
  modified_base 14: mod_base = OTHER; note = 2'-deoxy-2'-fluorocytidine-3'-phosphate
  modified_base 15: mod_base = OTHER; note = 2'-O-methylguanosine-3'-phosphate
  modified_base 16: mod_base = OTHER; note = 2'-deoxy-2'-fluorocytidine-3'-phosphate
  modified_base 17: mod_base = OTHER; note = 2'-O-methylcytidine-3'-phosphate
  modified_base 18: mod_base = OTHER; note = 2'-O-methylguanosine-3'-phosphate
  modified_base 19: mod_base = OTHER; note = 2'-O-methyluridine-3'-phosphate
  modified_base 20: mod_base = OTHER; note = 2'-O-methylcytidine-3'-phosphate
  modified_base 21: mod_base = OTHER; note = 2'-O-methylcytidine-3'-phosphorothioate
  modified_base 22: mod_base = OTHER; note = 2'-O-methyladenosine-3'-phosphorothioate
  modified_base 23: mod_base = OTHER; note = 2'-O-methylcytidine
acagtggcaagctcgccgtccac

SEQ ID NO: 2832 - RNA, 21 nt, synthetic construct
  source 1..21: mol_type = other RNA
  modified_base 1: mod_base = OTHER; note = 2'-O-methyluridine-3'-phosphorothioate
  modified_base 2: mod_base = OTHER; note = 2'-O-methylguanosine-3'-phosphorothioate
  modified_base 3: mod_base = OTHER; note = 2'-O-methylguanosine-3'-phosphate
  modified_base 4: mod_base = OTHER; note = 2'-O-methyladenosine-3'-phosphate
  modified_base 5: mod_base = OTHER; note = 2'-O-methylcytidine-3'-phosphate
  modified_base 6: mod_base = OTHER; note = 2'-O-methylguanosine-3'-phosphate
  modified_base 7: mod_base = OTHER; note = 2'-deoxy-2'-fluoroguanosine-3'-phosphate
  modified_base 8: mod_base = OTHER; note = 2'-O-methylcytidine-3'-phosphate
  modified_base 9: mod_base = OTHER; note = 2'-deoxy-2'-fluoroguanosine-3'-phosphate
  modified_base 10: mod_base = OTHER; note = 2'-deoxy-2'-fluoroadenosine-3'-phosphate
  modified_base 11: mod_base = OTHER; note = 2'-deoxy-2'-fluoroguanosine-3'-phosphate
  modified_base 12: mod_base = OTHER; note = 2'-O-methylcytidine-3'-phosphate
  modified_base 13: mod_base = OTHER; note = 2'-O-methyluridine-3'-phosphate
  modified_base 14: mod_base = OTHER; note = 2'-O-methyluridine-3'-phosphate
  modified_base 15: mod_base = OTHER; note = 2'-O-methylguanosine-3'-phosphate
  modified_base 16: mod_base = OTHER; note = 2'-O-methylcytidine-3'-phosphate
  modified_base 17: mod_base = OTHER; note = 2'-O-methylcytidine-3'-phosphate
  modified_base 18: mod_base = OTHER; note = 2'-O-methyladenosine-3'-phosphate
  modified_base 19: mod_base = OTHER; note = 2'-O-methylcytidine-3'-phosphate
  modified_base 20: mod_base = OTHER; note = 2'-O-methyluridine-3'-phosphate
  modified_base 21: mod_base = OTHER; note = 2'-O-methylguanosine-3'-phosphate ((2S,4R)-1-[29-[[2-(acetylamino)-2-deoxy-beta-D-galactopyra nosyl]oxy]-14,14-bis[[3-[[3-[[5-[[2-(acetylamino)-2-deoxy-b eta-D-galactopyranosyl]oxy]-1-oxopentyl]amino]propyl]amino] -3-oxopropoxy]methyl]-1,12,19,25-tetraoxo-16-oxa-13,20,24-t riazanonacos-1-yl]-4-hydroxy-2-pyrrolidinyl)methyl ester
tggacggcgagcttgccactg

SEQ ID NO: 2833 - RNA, 23 nt, synthetic construct
  source 1..23: mol_type = other RNA
  modified_base 1: mod_base = OTHER; note = 2'-O-methylcytidine-3'-phosphorothioate
  modified_base 2: mod_base = OTHER; note = 2'-deoxy-2'-fluoroadenosine-3'-phosphorothioate
  modified_base 3: mod_base = OTHER; note = 2'-O-methylguanosine-3'-phosphate
  modified_base 4: mod_base = OTHER; note = 2'-O-methyluridine-3'-phosphate
  modified_base 5: mod_base = OTHER; note = 2'-O-methylguanosine-3'-phosphate
  modified_base 6: mod_base = OTHER; note = 2'-deoxy-2'-fluoroguanosine-3'-phosphate
  modified_base 7: mod_base = OTHER; note = 2'-O-methylcytidine-3'-phosphate
  modified_base 8: mod_base = OTHER; note = 2'-deoxy-2'-fluoroadenosine-3'-phosphate
  modified_base 9: mod_base = OTHER; note = 2'-deoxy-2'-fluoroadenosine-3'-phosphate
  modified_base 10: mod_base = OTHER; note = 2'-O-methylguanosine-3'-phosphate
  modified_base 11: mod_base = OTHER; note = 2'-O-methylcytidine-3'-phosphate
  modified_base 12: mod_base = OTHER; note = 2'-O-methyluridine-3'-phosphate
  modified_base 13: mod_base = OTHER; note = 2'-O-methylcytidine-3'-phosphate
  modified_base 14: mod_base = OTHER; note = 2'-deoxy-2'-fluoroguanosine-3'-phosphate
  modified_base 15: mod_base = OTHER; note = 2'-O-methylcytidine-3'-phosphate
  modified_base 16: mod_base = OTHER; note = 2'-deoxy-2'-fluorocytidine-3'-phosphate
  modified_base 17: mod_base = OTHER; note = 2'-O-methylguanosine-3'-phosphate
  modified_base 18: mod_base = OTHER; note = 2'-O-methyluridine-3'-phosphate
  modified_base 19: mod_base = OTHER; note = 2'-O-methylcytidine-3'-phosphate
  modified_base 20: mod_base = OTHER; note = 2'-O-methylcytidine-3'-phosphate
  modified_base 21: mod_base = OTHER; note = 2'-O-methyladenosine-3'-phosphorothioate
  modified_base 22: mod_base = OTHER; note = 2'-O-methylcytidine-3'-phosphorothioate
  modified_base 23: mod_base = OTHER; note = 2'-O-methyladenosine
cagtggcaagctcgccgtccaca

SEQ ID NO: 2834 - RNA, 21 nt, synthetic construct
  source 1..21: mol_type = other RNA
  modified_base 1: mod_base = OTHER; note = 2'-O-methyladenosine-3'-phosphorothioate
  modified_base 2: mod_base = OTHER; note = 2'-O-methyluridine-3'-phosphorothioate
  modified_base 3: mod_base = OTHER; note = 2'-O-methylguanosine-3'-phosphate
  modified_base 4: mod_base = OTHER; note = 2'-O-methyluridine-3'-phosphate
  modified_base 5: mod_base = OTHER; note = 2'-O-methylguanosine-3'-phosphate
  modified_base 6: mod_base = OTHER; note = 2'-O-methylcytidine-3'-phosphate
  modified_base 7: mod_base = OTHER; note = 2'-deoxy-2'-fluoroguanosine-3'-phosphate
  modified_base 8: mod_base = OTHER; note = 2'-O-methyluridine-3'-phosphate
  modified_base 9: mod_base = OTHER; note = 2'-deoxy-2'-fluoroadenosine-3'-phosphate
  modified_base 10: mod_base = OTHER; note = 2'-deoxy-2'-fluoroadenosine-3'-phosphate
  modified_base 11: mod_base = OTHER; note = 2'-deoxy-2'-fluorocytidine-3'-phosphate
  modified_base 12: mod_base = OTHER; note = 2'-O-methyladenosine-3'-phosphate
  modified_base 13: mod_base = OTHER; note = 2'-O-methylguanosine-3'-phosphate
  modified_base 14: mod_base = OTHER; note = 2'-O-methyladenosine-3'-phosphate
  modified_base 15: mod_base = OTHER; note = 2'-O-methyluridine-3'-phosphate
  modified_base 16: mod_base = OTHER; note = 2'-O-methyluridine-3'-phosphate
  modified_base 17: mod_base = OTHER; note = 2'-O-methylcytidine-3'-phosphate
  modified_base 18: mod_base = OTHER; note = 2'-O-methyladenosine-3'-phosphate
  modified_base 19: mod_base = OTHER; note = 2'-O-methyladenosine-3'-phosphate
  modified_base 20: mod_base = OTHER; note = 2'-O-methyladenosine-3'-phosphate
  modified_base 21: mod_base = OTHER; note = 2'-O-methylcytidine-3'-phosphate ((2S,4R)-1-[29-[[2-(acetylamino)-2-deoxy-beta-D-galactopyra nosyl]oxy]-14,14-bis[[3-[[3-[[5-[[2-(acetylamino)-2-deoxy-b eta-D-galactopyranosyl]oxy]-1-oxopentyl]amino]propyl]amino] -3-oxopropoxy]methyl]-1,12,19,25-tetraoxo-16-oxa-13,20,24-t riazanonacos-1-yl]-4-hydroxy-2-pyrrolidinyl)methyl ester
atgtgcgtaacagattcaaac

SEQ ID NO: 2835 - RNA, 23 nt, synthetic construct
  source 1..23: mol_type = other RNA
  modified_base 1: mod_base = OTHER; note = 2'-O-methylguanosine-3'-phosphorothioate
  modified_base 2: mod_base = OTHER; note = 2'-deoxy-2'-fluorouridine-3'-phosphorothioate
  modified_base 3: mod_base = OTHER; note = 2'-O-methyluridine-3'-phosphate
  modified_base 4: mod_base = OTHER; note = 2'-O-methyluridine-3'-phosphate
  modified_base 5: mod_base = OTHER; note = 2'-O-methylguanosine-3'-phosphate
  modified_base 6: mod_base = OTHER; note = 2'-deoxy-2'-fluoroadenosine-3'-phosphate
  modified_base 7: mod_base = OTHER; note = 2'-O-methyladenosine-3'-phosphate
  modified_base 8: mod_base = OTHER; note = 2'-deoxy-2'-fluorouridine-3'-phosphate
  modified_base 9: mod_base = OTHER; note = 2'-deoxy-2'-fluorocytidine-3'-phosphate
  modified_base 10: mod_base = OTHER; note = 2'-O-methyluridine-3'-phosphate
  modified_base 11: mod_base = OTHER; note = 2'-O-methylguanosine-3'-phosphate
  modified_base 12: mod_base = OTHER; note = 2'-O-methyluridine-3'-phosphate
  modified_base 13: mod_base = OTHER; note = 2'-O-methyluridine-3'-phosphate
  modified_base 14: mod_base = OTHER; note = 2'-deoxy-2'-fluoroadenosine-3'-phosphate
  modified_base 15: mod_base = OTHER; note = 2'-O-methylcytidine-3'-phosphate
  modified_base 16: mod_base = OTHER; note = 2'-deoxy-2'-fluoroguanosine-3'-phosphate
  modified_base 17: mod_base = OTHER; note = 2'-O-methylcytidine-3'-phosphate
  modified_base 18: mod_base = OTHER; note = 2'-O-methyladenosine-3'-phosphate
  modified_base 19: mod_base = OTHER; note = 2'-O-methylcytidine-3'-phosphate
  modified_base 20: mod_base = OTHER; note = 2'-O-methyladenosine-3'-phosphate
  modified_base 21: mod_base = OTHER; note = 2'-O-methyluridine-3'-phosphorothioate
  modified_base 22: mod_base = OTHER; note = 2'-O-methylcytidine-3'-phosphorothioate
  modified_base 23: mod_base = OTHER; note = 2'-O-methyladenosine
gtttgaatctgttacgcacatca

SEQ ID NO: 2836 - RNA, 21 nt, synthetic construct
  source 1..21: mol_type = other RNA
  modified_base 1: mod_base = OTHER; note = 2'-O-methyluridine-3'-phosphorothioate
  modified_base 2: mod_base = OTHER; note = 2'-O-methylguanosine-3'-phosphorothioate
  modified_base 3: mod_base = OTHER; note = 2'-O-methyluridine-3'-phosphate
  modified_base 4: mod_base = OTHER; note = 2'-O-methylguanosine-3'-phosphate
  modified_base 5: mod_base = OTHER; note = 2'-O-methylcytidine-3'-phosphate
  modified_base 6: mod_base = OTHER; note = 2'-O-methylguanosine-3'-phosphate
  modified_base 7: mod_base = OTHER; note = 2'-deoxy-2'-fluorouridine-3'-phosphate
  modified_base 8: mod_base = OTHER; note = 2'-O-methyladenosine-3'-phosphate
  modified_base 9: mod_base = OTHER; note = 2'-deoxy-2'-fluoroadenosine-3'-phosphate
  modified_base 10: mod_base = OTHER; note = 2'-deoxy-2'-fluorocytidine-3'-phosphate
  modified_base 11: mod_base = OTHER; note = 2'-deoxy-2'-fluoroadenosine-3'-phosphate
  modified_base 12: mod_base = OTHER; note = 2'-O-methylguanosine-3'-phosphate
  modified_base 13: mod_base = OTHER; note = 2'-O-methyladenosine-3'-phosphate
  modified_base 14: mod_base = OTHER; note = 2'-O-methyluridine-3'-phosphate
  modified_base 15: mod_base = OTHER; note = 2'-O-methyluridine-3'-phosphate
  modified_base 16: mod_base = OTHER; note = 2'-O-methylcytidine-3'-phosphate
  modified_base 17: mod_base = OTHER; note = 2'-O-methyladenosine-3'-phosphate
  modified_base 18: mod_base = OTHER; note = 2'-O-methyladenosine-3'-phosphate
  modified_base 19: mod_base = OTHER; note = 2'-O-methyladenosine-3'-phosphate
  modified_base 20: mod_base = OTHER; note = 2'-O-methylcytidine-3'-phosphate
  modified_base 21: mod_base = OTHER; note = 2'-O-methyluridine-3'-phosphate ((2S,4R)-1-[29-[[2-(acetylamino)-2-deoxy-beta-D-galactopyra nosyl]oxy]-14,14-bis[[3-[[3-[[5-[[2-(acetylamino)-2-deoxy-b eta-D-galactopyranosyl]oxy]-1-oxopentyl]amino]propyl]amino] -3-oxopropoxy]methyl]-1,12,19,25-tetraoxo-16-oxa-13,20,24-t riazanonacos-1-yl]-4-hydroxy-2-pyrrolidinyl)methyl ester
tgtgcgtaacagattcaaact

SEQ ID NO: 2837 - RNA, 23 nt, synthetic construct
  source 1..23: mol_type = other RNA
  modified_base 1: mod_base = OTHER; note = 2'-O-methyladenosine-3'-phosphorothioate
  modified_base 2: mod_base = OTHER; note = 2'-deoxy-2'-fluoroguanosine-3'-phosphorothioate
  modified_base 3: mod_base = OTHER; note = 2'-O-methyluridine-3'-phosphate
  modified_base 4: mod_base = OTHER; note = 2'-O-methyluridine-3'-phosphate
  modified_base 5: mod_base = OTHER; note = 2'-O-methyluridine-3'-phosphate
  modified_base 6: mod_base = OTHER; note = 2'-deoxy-2'-fluoroguanosine-3'-phosphate
  modified_base 7: mod_base = OTHER; note = 2'-O-methyladenosine-3'-phosphate
  modified_base 8: mod_base = OTHER; note = 2'-deoxy-2'-fluoroadenosine-3'-phosphate
  modified_base 9: mod_base = OTHER; note = 2'-deoxy-2'-fluorouridine-3'-phosphate
  modified_base 10: mod_base = OTHER; note = 2'-O-methylcytidine-3'-phosphate
  modified_base 11: mod_base = OTHER; note = 2'-O-methyluridine-3'-phosphate
  modified_base 12: mod_base = OTHER; note = 2'-O-methylguanosine-3'-phosphate
  modified_base 13: mod_base = OTHER; note = 2'-O-methyluridine-3'-phosphate
  modified_base 14: mod_base = OTHER; note = 2'-deoxy-2'-fluorouridine-3'-phosphate
  modified_base 15: mod_base = OTHER; note = 2'-O-methyladenosine-3'-phosphate
  modified_base 16: mod_base = OTHER; note = 2'-deoxy-2'-fluorocytidine-3'-phosphate
  modified_base 17: mod_base = OTHER; note = 2'-O-methylguanosine-3'-phosphate
  modified_base 18: mod_base = OTHER; note = 2'-O-methylcytidine-3'-phosphate
  modified_base 19: mod_base = OTHER; note = 2'-O-methyladenosine-3'-phosphate
  modified_base 20: mod_base = OTHER; note = 2'-O-methylcytidine-3'-phosphate
  modified_base 21: mod_base = OTHER; note = 2'-O-methyladenosine-3'-phosphorothioate
  modified_base 22: mod_base = OTHER; note = 2'-O-methyluridine-3'-phosphorothioate
  modified_base 23: mod_base = OTHER; note = 2'-O-methylcytidine
agtttgaatctgttacgcacatc

SEQ ID NO: 2838 - RNA, 21 nt, synthetic construct
  source 1..21: mol_type = other RNA
  modified_base 1: mod_base = OTHER; note = 2'-O-methylguanosine-3'-phosphorothioate
  modified_base 2: mod_base = OTHER; note = 2'-O-methyladenosine-3'-phosphorothioate
  modified_base 3: mod_base = OTHER; note = 2'-O-methyluridine-3'-phosphate
  modified_base 4: mod_base = OTHER; note = 2'-O-methylguanosine-3'-phosphate
  modified_base 5: mod_base = OTHER; note = 2'-O-methyladenosine-3'-phosphate
  modified_base 6: mod_base = OTHER; note = 2'-O-methyluridine-3'-phosphate
  modified_base 7: mod_base = OTHER; note = 2'-deoxy-2'-fluoroguanosine-3'-phosphate
  modified_base 8: mod_base = OTHER; note = 2'-O-methyluridine-3'-phosphate
  modified_base 9: mod_base = OTHER; note = 2'-deoxy-2'-fluoroguanosine-3'-phosphate
  modified_base 10: mod_base = OTHER; note = 2'-deoxy-2'-fluorocytidine-3'-phosphate
  modified_base 11: mod_base = OTHER; note = 2'-deoxy-2'-fluoroguanosine-3'-phosphate
  modified_base 12: mod_base = OTHER; note = 2'-O-methyluridine-3'-phosphate
  modified_base 13: mod_base = OTHER; note = 2'-O-methyladenosine-3'-phosphate
  modified_base 14: mod_base = OTHER; note = 2'-O-methyladenosine-3'-phosphate
  modified_base 15: mod_base = OTHER; note = 2'-O-methylcytidine-3'-phosphate
  modified_base 16: mod_base = OTHER; note = 2'-O-methyladenosine-3'-phosphate
  modified_base 17: mod_base = OTHER; note = 2'-O-methylguanosine-3'-phosphate
  modified_base 18: mod_base = OTHER; note = 2'-O-methyladenosine-3'-phosphate
  modified_base 19: mod_base = OTHER; note = 2'-O-methyluridine-3'-phosphate
  modified_base 20: mod_base = OTHER; note = 2'-O-methyluridine-3'-phosphate
  modified_base 21: mod_base = OTHER; note = 2'-O-methylcytidine-3'-phosphate ((2S,4R)-1-[29-[[2-(acetylamino)-2-deoxy-beta-D-galactopyra nosyl]oxy]-14,14-bis[[3-[[3-[[5-[[2-(acetylamino)-2-deoxy-b eta-D-galactopyranosyl]oxy]-1-oxopentyl]amino]propyl]amino] -3-oxopropoxy]methyl]-1,12,19,25-tetraoxo-16-oxa-13,20,24-t riazanonacos-1-yl]-4-hydroxy-2-pyrrolidinyl)methyl ester
gatgatgtgcgtaacagattc

SEQ ID NO: 2839 - RNA, 23 nt, synthetic construct
  source 1..23: mol_type = other RNA
  modified_base 1: mod_base = OTHER; note = 2'-O-methylguanosine-3'-phosphorothioate
  modified_base 2: mod_base = OTHER; note = 2'-deoxy-2'-fluoroadenosine-3'-phosphorothioate
  modified_base 3: mod_base = OTHER; note = 2'-O-methyladenosine-3'-phosphate
  modified_base 4: mod_base = OTHER; note = 2'-O-methyluridine-3'-phosphate
  modified_base 5: mod_base = OTHER; note = 2'-O-methylcytidine-3'-phosphate
  modified_base 6: mod_base = OTHER; note = 2'-deoxy-2'-fluorouridine-3'-phosphate
  modified_base 7: mod_base = OTHER; note = 2'-O-methylguanosine-3'-phosphate
  modified_base 8: mod_base = OTHER; note = 2'-deoxy-2'-fluorouridine-3'-phosphate
  modified_base 9: mod_base = OTHER; note = 2'-deoxy-2'-fluorouridine-3'-phosphate
  modified_base 10: mod_base = OTHER; note = 2'-O-methyladenosine-3'-phosphate
  modified_base 11: mod_base = OTHER; note = 2'-O-methylcytidine-3'-phosphate
  modified_base 12: mod_base = OTHER; note = 2'-O-methylguanosine-3'-phosphate
  modified_base 13: mod_base = OTHER; note = 2'-O-methylcytidine-3'-phosphate
  modified_base 14: mod_base = OTHER; note = 2'-deoxy-2'-fluoroadenosine-3'-phosphate
  modified_base 15: mod_base = OTHER; note = 2'-O-methylcytidine-3'-phosphate
  modified_base 16: mod_base = OTHER; note = 2'-deoxy-2'-fluoroadenosine-3'-phosphate
  modified_base 17: mod_base = OTHER; note = 2'-O-methyluridine-3'-phosphate
  modified_base 18: mod_base = OTHER; note = 2'-O-methylcytidine-3'-phosphate
  modified_base 19: mod_base = OTHER; note = 2'-O-methyladenosine-3'-phosphate
  modified_base 20: mod_base = OTHER; note = 2'-O-methyluridine-3'-phosphate
  modified_base 21: mod_base = OTHER; note = 2'-O-methylcytidine-3'-phosphorothioate
  modified_base 22: mod_base = OTHER; note = 2'-O-methylcytidine-3'-phosphorothioate
  modified_base 23: mod_base = OTHER; note = 2'-O-methyladenosine
gaatctgttacgcacatcatcca

SEQ ID NO: 2840 - RNA, 21 nt, synthetic construct
  source 1..21: mol_type = other RNA
  modified_base 1: mod_base = OTHER; note = 2'-O-methylguanosine-3'-phosphorothioate
  modified_base 2: mod_base = OTHER; note = 2'-O-methylguanosine-3'-phosphorothioate
  modified_base 3: mod_base = OTHER; note = 2'-O-methyladenosine-3'-phosphate
  modified_base 4: mod_base = OTHER; note = 2'-O-methyluridine-3'-phosphate
  modified_base 5: mod_base = OTHER; note = 2'-O-methylguanosine-3'-phosphate
  modified_base 6: mod_base = OTHER; note = 2'-O-methyladenosine-3'-phosphate
  modified_base 7: mod_base = OTHER; note = 2'-deoxy-2'-fluorouridine-3'-phosphate
  modified_base 8: mod_base = OTHER; note = 2'-O-methylguanosine-3'-phosphate
  modified_base 9: mod_base = OTHER; note = 2'-deoxy-2'-fluorouridine-3'-phosphate
  modified_base 10: mod_base = OTHER; note = 2'-deoxy-2'-fluoroguanosine-3'-phosphate
  modified_base 11: mod_base = OTHER; note = 2'-deoxy-2'-fluorocytidine-3'-phosphate
  modified_base 12: mod_base = OTHER; note = 2'-O-methylguanosine-3'-phosphate
  modified_base 13: mod_base = OTHER; note = 2'-O-methyluridine-3'-phosphate
  modified_base 14: mod_base = OTHER; note = 2'-O-methyladenosine-3'-phosphate
  modified_base 15: mod_base = OTHER; note = 2'-O-methyladenosine-3'-phosphate
  modified_base 16: mod_base = OTHER; note = 2'-O-methylcytidine-3'-phosphate
  modified_base 17: mod_base = OTHER; note = 2'-O-methyladenosine-3'-phosphate
  modified_base 18: mod_base = OTHER; note = 2'-O-methylguanosine-3'-phosphate
  modified_base 19: mod_base = OTHER; note = 2'-O-methyladenosine-3'-phosphate
  modified_base 20: mod_base = OTHER; note = 2'-O-methyluridine-3'-phosphate
  modified_base 21: mod_base = OTHER; note = 2'-O-methyluridine-3'-phosphate ((2S,4R)-1-[29-[[2-(acetylamino)-2-deoxy-beta-D-galactopyra nosyl]oxy]-14,14-bis[[3-[[3-[[5-[[2-(acetylamino)-2-deoxy-b eta-D-galactopyranosyl]oxy]-1-oxopentyl]amino]propyl]amino] -3-oxopropoxy]methyl]-1,12,19,25-tetraoxo-16-oxa-13,20,24-t riazanonacos-1-yl]-4-hydroxy-2-pyrrolidinyl)methyl ester
ggatgatgtgcgtaacagatt

SEQ ID NO: 2841 - RNA, 23 nt, synthetic construct
  source 1..23: mol_type = other RNA
  modified_base 1: mod_base = OTHER; note = 2'-O-methyladenosine-3'-phosphorothioate
  modified_base 2: mod_base = OTHER; note = 2'-deoxy-2'-fluoroadenosine-3'-phosphorothioate
  modified_base 3: mod_base = OTHER; note = 2'-O-methyluridine-3'-phosphate
  modified_base 4: mod_base = OTHER; note = 2'-O-methylcytidine-3'-phosphate
  modified_base 5: mod_base = OTHER; note = 2'-O-methyluridine-3'-phosphate
  modified_base 6: mod_base = OTHER; note = 2'-deoxy-2'-fluoroguanosine-3'-phosphate
  modified_base 7: mod_base = OTHER; note = 2'-O-methyluridine-3'-phosphate
  modified_base 8: mod_base = OTHER; note = 2'-deoxy-2'-fluorouridine-3'-phosphate
  modified_base 9: mod_base = OTHER; note = 2'-deoxy-2'-fluoroadenosine-3'-phosphate
  modified_base 10: mod_base = OTHER; note = 2'-O-methylcytidine-3'-phosphate
  modified_base 11: mod_base = OTHER; note = 2'-O-methylguanosine-3'-phosphate
  modified_base 12: mod_base = OTHER; note = 2'-O-methylcytidine-3'-phosphate
  modified_base 13: mod_base = OTHER; note = 2'-O-methyladenosine-3'-phosphate
  modified_base 14: mod_base = OTHER; note = 2'-deoxy-2'-fluorocytidine-3'-phosphate
  modified_base 15: mod_base = OTHER; note = 2'-O-methyladenosine-3'-phosphate
  modified_base 16: mod_base = OTHER; note = 2'-deoxy-2'-fluorouridine-3'-phosphate
  modified_base 17: mod_base = OTHER; note = 2'-O-methylcytidine-3'-phosphate
  modified_base 18: mod_base = OTHER; note = 2'-O-methyladenosine-3'-phosphate
  modified_base 19: mod_base = OTHER; note = 2'-O-methyluridine-3'-phosphate
  modified_base 20: mod_base = OTHER; note = 2'-O-methylcytidine-3'-phosphate
  modified_base 21: mod_base = OTHER; note = 2'-O-methylcytidine-3'-phosphorothioate
  modified_base 22: mod_base = OTHER; note = 2'-O-methyladenosine-3'-phosphorothioate
  modified_base 23: mod_base = OTHER; note = 2'-O-methylguanosine
aatctgttacgcacatcatccag

SEQ ID NO: 2842 - RNA, 21 nt, synthetic construct
  source 1..21: mol_type = other RNA
  modified_base 1: mod_base = OTHER; note = 2'-O-methylguanosine-3'-phosphorothioate
  modified_base 2: mod_base = OTHER; note = 2'-O-methylguanosine-3'-phosphorothioate
  modified_base 3: mod_base = OTHER; note = 2'-O-methylguanosine-3'-phosphate
  modified_base 4: mod_base = OTHER; note = 2'-O-methyluridine-3'-phosphate
  modified_base 5: mod_base = OTHER; note = 2'-O-methylcytidine-3'-phosphate
  modified_base 6: mod_base = OTHER; note = 2'-O-methyladenosine-3'-phosphate
  modified_base 7: mod_base = OTHER; note = 2'-deoxy-2'-fluoroguanosine-3'-phosphate
  modified_base 8: mod_base = OTHER; note = 2'-O-methylcytidine-3'-phosphate
  modified_base 9: mod_base = OTHER; note = 2'-deoxy-2'-fluoroadenosine-3'-phosphate
  modified_base 10: mod_base = OTHER; note = 2'-deoxy-2'-fluorouridine-3'-phosphate
  modified_base 11: mod_base = OTHER; note = 2'-deoxy-2'-fluoroguanosine-3'-phosphate
  modified_base 12: mod_base = OTHER; note = 2'-O-methylcytidine-3'-phosphate
  modified_base 13: mod_base = OTHER; note = 2'-O-methylcytidine-3'-phosphate
  modified_base 14: mod_base = OTHER; note = 2'-O-methyladenosine-3'-phosphate
  modified_base 15: mod_base = OTHER; note = 2'-O-methyladenosine-3'-phosphate
  modified_base 16: mod_base = OTHER; note = 2'-O-methyluridine-3'-phosphate
  modified_base 17: mod_base = OTHER; note = 2'-O-methyladenosine-3'-phosphate
  modified_base 18: mod_base = OTHER; note = 2'-O-methyluridine-3'-phosphate
  modified_base 19: mod_base = OTHER; note = 2'-O-methylguanosine-3'-phosphate
  modified_base 20: mod_base = OTHER; note = 2'-O-methyluridine-3'-phosphate
  modified_base 21: mod_base = OTHER; note = 2'-O-methylguanosine-3'-phosphate ((2S,4R)-1-[29-[[2-(acetylamino)-2-deoxy-beta-D-galactopyra nosyl]oxy]-14,14-bis[[3-[[3-[[5-[[2-(acetylamino)-2-deoxy-b eta-D-galactopyranosyl]oxy]-1-oxopentyl]amino]propyl]amino] -3-oxopropoxy]methyl]-1,12,19,25-tetraoxo-16-oxa-13,20,24-t riazanonacos-1-yl]-4-hydroxy-2-pyrrolidinyl)methyl ester
gggtcagcatgccaatatgtg

SEQ ID NO: 2843 - RNA, 23 nt, synthetic construct
  source 1..23: mol_type = other RNA
  modified_base 1: mod_base = OTHER; note = 2'-O-methylcytidine-3'-phosphorothioate
  modified_base 2: mod_base = OTHER; note = 2'-deoxy-2'-fluoroadenosine-3'-phosphorothioate
  modified_base 3: mod_base = OTHER; note = 2'-O-methylcytidine-3'-phosphate
  modified_base 4: mod_base = OTHER; note = 2'-O-methyladenosine-3'-phosphate
  modified_base 5: mod_base = OTHER; note = 2'-O-methyluridine-3'-phosphate
  modified_base 6: mod_base = OTHER; note = 2'-deoxy-2'-fluoroadenosine-3'-phosphate
  modified_base 7: mod_base = OTHER; note = 2'-O-methyluridine-3'-phosphate
  modified_base 8: mod_base = OTHER; note = 2'-deoxy-2'-fluorouridine-3'-phosphate
  modified_base 9: mod_base = OTHER; note = 2'-deoxy-2'-fluoroguanosine-3'-phosphate
  modified_base 10: mod_base = OTHER; note = 2'-O-methylguanosine-3'-phosphate
  modified_base 11: mod_base = OTHER; note = 2'-O-methylcytidine-3'-phosphate
  modified_base 12: mod_base = OTHER; note = 2'-O-methyladenosine-3'-phosphate
  modified_base 13: mod_base = OTHER; note = 2'-O-methyluridine-3'-phosphate
  modified_base 14: mod_base = OTHER; note = 2'-deoxy-2'-fluoroguanosine-3'-phosphate
  modified_base 15: mod_base = OTHER; note = 2'-O-methylcytidine-3'-phosphate
  modified_base 16: mod_base = OTHER; note = 2'-deoxy-2'-fluorouridine-3'-phosphate
  modified_base 17: mod_base = OTHER; note = 2'-O-methylguanosine-3'-phosphate
  modified_base 18: mod_base = OTHER; note = 2'-O-methyladenosine-3'-phosphate
  modified_base 19: mod_base = OTHER; note = 2'-O-methylcytidine-3'-phosphate
  modified_base 20: mod_base = OTHER; note = 2'-O-methylcytidine-3'-phosphate
  modified_base 21: mod_base = OTHER; note = 2'-O-methylcytidine-3'-phosphorothioate
  modified_base 22: mod_base = OTHER; note = 2'-O-methyluridine-3'-phosphorothioate
  modified_base 23: mod_base = OTHER; note = 2'-O-methylcytidine
cacatattggcatgctgaccctc

SEQ ID NO: 2844 - RNA, 21 nt, synthetic construct
  source 1..21: mol_type = other RNA
  modified_base 1: mod_base = OTHER; note = 2'-O-methylguanosine-3'-phosphorothioate
  modified_base 2: mod_base = OTHER; note = 2'-O-methylguanosine-3'-phosphorothioate
  modified_base 3: mod_base = OTHER; note = 2'-O-methyluridine-3'-phosphate
  modified_base 4: mod_base = OTHER; note = 2'-O-methylcytidine-3'-phosphate
  modified_base 5: mod_base = OTHER; note = 2'-O-methyladenosine-3'-phosphate
  modified_base 6: mod_base = OTHER; note = 2'-O-methylguanosine-3'-phosphate
  modified_base 7: mod_base = OTHER; note = 2'-deoxy-2'-fluorocytidine-3'-phosphate
  modified_base 8: mod_base = OTHER; note = 2'-O-methyladenosine-3'-phosphate
  modified_base 9: mod_base = OTHER; note = 2'-deoxy-2'-fluorouridine-3'-phosphate
  modified_base 10: mod_base = OTHER; note = 2'-deoxy-2'-fluoroguanosine-3'-phosphate
  modified_base 11: mod_base = OTHER; note = 2'-deoxy-2'-fluorocytidine-3'-phosphate
  modified_base 12: mod_base = OTHER; note = 2'-O-methylcytidine-3'-phosphate
  modified_base 13: mod_base = OTHER; note = 2'-O-methyladenosine-3'-phosphate
  modified_base 14: mod_base = OTHER; note = 2'-O-methyladenosine-3'-phosphate
  modified_base 15: mod_base = OTHER; note = 2'-O-methyluridine-3'-phosphate
  modified_base 16: mod_base = OTHER; note = 2'-O-methyladenosine-3'-phosphate
  modified_base 17: mod_base = OTHER; note = 2'-O-methyluridine-3'-phosphate
  modified_base 18: mod_base = OTHER; note = 2'-O-methylguanosine-3'-phosphate
  modified_base 19: mod_base = OTHER; note = 2'-O-methyluridine-3'-phosphate
  modified_base 20: mod_base = OTHER; note = 2'-O-methylguanosine-3'-phosphate
  modified_base 21: mod_base = OTHER; note = 2'-O-methyluridine-3'-phosphate ((2S,4R)-1-[29-[[2-(acetylamino)-2-deoxy-beta-D-galactopyra nosyl]oxy]-14,14-bis[[3-[[3-[[5-[[2-(acetylamino)-2-deoxy-b eta-D-galactopyranosyl]oxy]-1-oxopentyl]amino]propyl]amino] -3-oxopropoxy]methyl]-1,12,19,25-tetraoxo-16-oxa-13,20,24-t riazanonacos-1-yl]-4-hydroxy-2-pyrrolidinyl)methyl ester
ggtcagcatgccaatatgtgt

SEQ ID NO: 2845 - RNA, 23 nt, synthetic construct
  source 1..23: mol_type = other RNA
  modified_base 1: mod_base = OTHER; note = 2'-O-methyladenosine-3'-phosphorothioate
  modified_base 2: mod_base = OTHER; note = 2'-deoxy-2'-fluorocytidine-3'-phosphorothioate
  modified_base 3: mod_base = OTHER; note = 2'-O-methyladenosine-3'-phosphate
  modified_base 4: mod_base = OTHER; note = 2'-O-methylcytidine-3'-phosphate
  modified_base 5: mod_base = OTHER; note = 2'-O-methyladenosine-3'-phosphate
  modified_base 6: mod_base = OTHER; note = 2'-deoxy-2'-fluorouridine-3'-phosphate
  modified_base 7: mod_base = OTHER; note = 2'-O-methyladenosine-3'-phosphate
  modified_base 8: mod_base = OTHER; note = 2'-deoxy-2'-fluorouridine-3'-phosphate
  modified_base 9: mod_base = OTHER; note = 2'-deoxy-2'-fluorouridine-3'-phosphate
  modified_base 10: mod_base = OTHER; note = 2'-O-methylguanosine-3'-phosphate
  modified_base 11: mod_base = OTHER; note = 2'-O-methylguanosine-3'-phosphate
  modified_base 12: mod_base = OTHER; note = 2'-O-methylcytidine-3'-phosphate
  modified_base 13: mod_base = OTHER; note = 2'-O-methyladenosine-3'-phosphate
  modified_base 14: mod_base = OTHER; note = 2'-deoxy-2'-fluorouridine-3'-phosphate
  modified_base 15: mod_base = OTHER; note = 2'-O-methylguanosine-3'-phosphate
  modified_base 16: mod_base = OTHER; note = 2'-deoxy-2'-fluorocytidine-3'-phosphate
  modified_base 17: mod_base = OTHER; note = 2'-O-methyluridine-3'-phosphate
  modified_base 18: mod_base = OTHER; note = 2'-O-methylguanosine-3'-phosphate
  modified_base 19: mod_base = OTHER; note = 2'-O-methyladenosine-3'-phosphate
  modified_base 20: mod_base = OTHER; note = 2'-O-methylcytidine-3'-phosphate
  modified_base 21: mod_base = OTHER; note = 2'-O-methylcytidine-3'-phosphorothioate
  modified_base 22: mod_base = OTHER; note = 2'-O-methylcytidine-3'-phosphorothioate
  modified_base 23: mod_base = OTHER; note = 2'-O-methyluridine
acacatattggcatgctgaccct

SEQ ID NO: 2846 - RNA, 21 nt, synthetic construct
  source 1..21: mol_type = other RNA
  modified_base 1: mod_base = OTHER; note = 2'-O-methylcytidine-3'-phosphorothioate
  modified_base 2: mod_base = OTHER; note = 2'-O-methyladenosine-3'-phosphorothioate
  modified_base 3: mod_base = OTHER; note = 2'-O-methylguanosine-3'-phosphate
  modified_base 4: mod_base = OTHER; note = 2'-O-methyladenosine-3'-phosphate
  modified_base 5: mod_base = OTHER; note = 2'-O-methylguanosine-3'-phosphate
  modified_base 6: mod_base = OTHER; note = 2'-O-methylguanosine-3'-phosphate
  modified_base 7: mod_base = OTHER; note = 2'-deoxy-2'-fluoroguanosine-3'-phosphate
  modified_base 8: mod_base = OTHER; note = 2'-O-methyluridine-3'-phosphate
  modified_base 9: mod_base = OTHER; note = 2'-deoxy-2'-fluorocytidine-3'-phosphate
  modified_base 10: mod_base = OTHER; note = 2'-deoxy-2'-fluoroadenosine-3'-phosphate
  modified_base 11: mod_base = OTHER; note = 2'-deoxy-2'-fluoroguanosine-3'-phosphate
  modified_base 12: mod_base = OTHER; note = 2'-O-methylcytidine-3'-phosphate
  modified_base 13: mod_base = OTHER; note = 2'-O-methyladenosine-3'-phosphate
  modified_base 14: mod_base = OTHER; note = 2'-O-methyluridine-3'-phosphate
  modified_base 15: mod_base = OTHER; note = 2'-O-methylguanosine-3'-phosphate
  modified_base 16: mod_base = OTHER; note = 2'-O-methylcytidine-3'-phosphate
  modified_base 17: mod_base = OTHER; note = 2'-O-methylcytidine-3'-phosphate
  modified_base 18: mod_base = OTHER; note = 2'-O-methyladenosine-3'-phosphate
  modified_base 19: mod_base = OTHER; note = 2'-O-methyladenosine-3'-phosphate
  modified_base 20: mod_base = OTHER; note = 2'-O-methyluridine-3'-phosphate
  modified_base 21: mod_base = OTHER; note = 2'-O-methyladenosine-3'-phosphate ((2S,4R)-1-[29-[[2-(acetylamino)-2-deoxy-beta-D-galactopyra nosyl]oxy]-14,14-bis[[3-[[3-[[5-[[2-(acetylamino)-2-deoxy-b eta-D-galactopyranosyl]oxy]-1-oxopentyl]amino]propyl]amino] -3-oxopropoxy]methyl]-1,12,19,25-tetraoxo-16-oxa-13,20,24-t riazanonacos-1-yl]-4-hydroxy-2-pyrrolidinyl)methyl ester
cagagggtcagcatgccaata

SEQ ID NO: 2847 - RNA, 23 nt, synthetic construct
  source 1..23: mol_type = other RNA
  modified_base 1: mod_base = OTHER; note = 2'-O-methyluridine-3'-phosphorothioate
  modified_base 2: mod_base = OTHER; note = 2'-deoxy-2'-fluoroadenosine-3'-phosphorothioate
  modified_base 3: mod_base = OTHER; note = 2'-O-methyluridine-3'-phosphate
  modified_base 4: mod_base = OTHER; note = 2'-O-methyluridine-3'-phosphate
  modified_base 5: mod_base = OTHER; note = 2'-O-methylguanosine-3'-phosphate
  modified_base 6: mod_base = OTHER; note = 2'-deoxy-2'-fluoroguanosine-3'-phosphate
  modified_base 7: mod_base = OTHER; note = 2'-O-methylcytidine-3'-phosphate
  modified_base 8: mod_base = OTHER; note = 2'-deoxy-2'-fluoroadenosine-3'-phosphate
  modified_base 9: mod_base = OTHER; note = 2'-deoxy-2'-fluorouridine-3'-phosphate
  modified_base 10: mod_base = OTHER; note = 2'-O-methylguanosine-3'-phosphate
  modified_base 11: mod_base = OTHER; note = 2'-O-methylcytidine-3'-phosphate
  modified_base 12: mod_base = OTHER; note = 2'-O-methyluridine-3'-phosphate
  modified_base 13: mod_base = OTHER; note = 2'-O-methylguanosine-3'-phosphate
  modified_base 14: mod_base = OTHER; note = 2'-deoxy-2'-fluoroadenosine-3'-phosphate
  modified_base 15: mod_base = OTHER; note = 2'-O-methylcytidine-3'-phosphate
  modified_base 16: mod_base = OTHER; note = 2'-deoxy-2'-fluorocytidine-3'-phosphate
  modified_base 17: mod_base = OTHER; note = 2'-O-methylcytidine-3'-phosphate
  modified_base 18: mod_base = OTHER; note = 2'-O-methyluridine-3'-phosphate
  modified_base 19: mod_base = OTHER; note = 2'-O-methylcytidine-3'-phosphate
  modified_base 20: mod_base = OTHER; note = 2'-O-methyluridine-3'-phosphate
  modified_base 21: mod_base = OTHER; note = 2'-O-methylguanosine-3'-phosphorothioate
  modified_base 22: mod_base = OTHER; note = 2'-O-methyluridine-3'-phosphorothioate
  modified_base 23: mod_base = OTHER; note = 2'-O-methylcytidine
tattggcatgctgaccctctgtc

SEQ ID NO: 2848 - RNA, 21 nt, synthetic construct
  source 1..21: mol_type = other RNA
  modified_base 1: mod_base = OTHER; note = 2'-O-methyladenosine-3'-phosphorothioate
  modified_base 2: mod_base = OTHER; note = 2'-O-methylcytidine-3'-phosphorothioate
  modified_base 3: mod_base = OTHER; note = 2'-O-methyladenosine-3'-phosphate
  modified_base 4: mod_base = OTHER; note = 2'-O-methylguanosine-3'-phosphate
  modified_base 5: mod_base = OTHER; note = 2'-O-methyladenosine-3'-phosphate
  modified_base 6: mod_base = OTHER; note = 2'-O-methylguanosine-3'-phosphate
  modified_base 7: mod_base = OTHER; note = 2'-deoxy-2'-fluoroguanosine-3'-phosphate
  modified_base 8: mod_base = OTHER; note = 2'-O-methylguanosine-3'-phosphate
  modified_base 9: mod_base = OTHER; note = 2'-deoxy-2'-fluorouridine-3'-phosphate
  modified_base 10: mod_base = OTHER; note = 2'-deoxy-2'-fluorocytidine-3'-phosphate
  modified_base 11: mod_base = OTHER; note = 2'-deoxy-2'-fluoroadenosine-3'-phosphate
  modified_base 12: mod_base = OTHER; note = 2'-O-methylguanosine-3'-phosphate
  modified_base 13: mod_base = OTHER; note = 2'-O-methylcytidine-3'-phosphate
  modified_base 14: mod_base = OTHER; note = 2'-O-methyladenosine-3'-phosphate
  modified_base 15: mod_base = OTHER; note = 2'-O-methyluridine-3'-phosphate
  modified_base 16: mod_base = OTHER; note = 2'-O-methylguanosine-3'-phosphate
  modified_base 17: mod_base = OTHER; note = 2'-O-methylcytidine-3'-phosphate
  modified_base 18: mod_base = OTHER; note = 2'-O-methylcytidine-3'-phosphate
  modified_base 19: mod_base = OTHER; note = 2'-O-methyladenosine-3'-phosphate
  modified_base 20: mod_base = OTHER; note = 2'-O-methyladenosine-3'-phosphate
  modified_base 21: mod_base = OTHER; note = 2'-O-methyluridine-3'-phosphate ((2S,4R)-1-[29-[[2-(acetylamino)-2-deoxy-beta-D-galactopyra nosyl]oxy]-14,14-bis[[3-[[3-[[5-[[2-(acetylamino)-2-deoxy-b eta-D-galactopyranosyl]oxy]-1-oxopentyl]amino]propyl]amino] -3-oxopropoxy]methyl]-1,12,19,25-tetraoxo-16-oxa-13,20,24-t riazanonacos-1-yl]-4-hydroxy-2-pyrrolidinyl)methyl ester
acagagggtcagcatgccaat

SEQ ID NO: 2849 - RNA, 23 nt, synthetic construct
  source 1..23: mol_type = other RNA
  modified_base 1: mod_base = OTHER; note = 2'-O-methyladenosine-3'-phosphorothioate
  modified_base 2: mod_base = OTHER; note = 2'-deoxy-2'-fluorouridine-3'-phosphorothioate
  modified_base 3: mod_base = OTHER; note = 2'-O-methyluridine-3'-phosphate
  modified_base 4: mod_base = OTHER; note = 2'-O-methylguanosine-3'-phosphate
  modified_base 5: mod_base = OTHER; note = 2'-O-methylguanosine-3'-phosphate
  modified_base 6: mod_base = OTHER; note = 2'-deoxy-2'-fluorocytidine-3'-phosphate
  modified_base 7: mod_base = OTHER; note = 2'-O-methyladenosine-3'-phosphate
  modified_base 8: mod_base = OTHER; note = 2'-deoxy-2'-fluorouridine-3'-phosphate
  modified_base 9: mod_base = OTHER; note = 2'-deoxy-2'-fluoroguanosine-3'-phosphate
  modified_base 10: mod_base = OTHER; note = 2'-O-methylcytidine-3'-phosphate
  modified_base 11: mod_base = OTHER; note = 2'-O-methyluridine-3'-phosphate
  modified_base 12: mod_base = OTHER; note = 2'-O-methylguanosine-3'-phosphate
  modified_base 13: mod_base = OTHER; note = 2'-O-methyladenosine-3'-phosphate
  modified_base 14: mod_base = OTHER; note = 2'-deoxy-2'-fluorocytidine-3'-phosphate
  modified_base 15: mod_base = OTHER; note = 2'-O-methylcytidine-3'-phosphate
  modified_base 16: mod_base = OTHER; note = 2'-deoxy-2'-fluorocytidine-3'-phosphate
  modified_base 17: mod_base = OTHER; note = 2'-O-methyluridine-3'-phosphate
  modified_base 18: mod_base = OTHER; note = 2'-O-methylcytidine-3'-phosphate
  modified_base 19: mod_base = OTHER; note = 2'-O-methyluridine-3'-phosphate
  modified_base 20: mod_base = OTHER; note = 2'-O-methylguanosine-3'-phosphate
  modified_base 21: mod_base = OTHER; note = 2'-O-methyluridine-3'-phosphorothioate
  modified_base 22: mod_base = OTHER; note = 2'-O-methylcytidine-3'-phosphorothioate
  modified_base 23: mod_base = OTHER; note = 2'-O-methylcytidine
attggcatgctgaccctctgtcc

SEQ ID NO: 2850 - RNA, 21 nt, synthetic construct
  source 1..21: mol_type = other RNA
  modified_base 1: mod_base = OTHER; note = 2'-O-methylguanosine-3'-phosphorothioate
  modified_base 2: mod_base = OTHER; note = 2'-O-methylcytidine-3'-phosphorothioate
  modified_base 3: mod_base = OTHER; note = 2'-O-methyluridine-3'-phosphate
  modified_base 4: mod_base = OTHER; note = 2'-O-methyluridine-3'-phosphate
  modified_base 5: mod_base = OTHER; note = 2'-O-methylguanosine-3'-phosphate
  modified_base 6: mod_base = OTHER; note = 2'-O-methyladenosine-3'-phosphate
  modified_base 7: mod_base = OTHER; note = 2'-deoxy-2'-fluoroadenosine-3'-phosphate
  modified_base 8: mod_base = OTHER; note = 2'-O-methyluridine-3'-phosphate
  modified_base 9: mod_base = OTHER; note = 2'-deoxy-2'-fluoroguanosine-3'-phosphate
  modified_base 10: mod_base = OTHER; note = 2'-deoxy-2'-fluoroguanosine-3'-phosphate
  modified_base 11: mod_base = OTHER; note = 2'-deoxy-2'-fluoroguanosine-3'-phosphate
  modified_base 12: mod_base = OTHER; note = 2'-O-methyladenosine-3'-phosphate
  modified_base 13: mod_base = OTHER; note = 2'-O-methyluridine-3'-phosphate
  modified_base 14: mod_base = OTHER; note = 2'-O-methylcytidine-3'-phosphate
  modified_base 15: mod_base = OTHER; note = 2'-O-methyluridine-3'-phosphate
  modified_base 16: mod_base = OTHER; note = 2'-O-methyluridine-3'-phosphate
  modified_base 17: mod_base = OTHER; note = 2'-O-methylguanosine-3'-phosphate
  modified_base 18: mod_base = OTHER; note = 2'-O-methylguanosine-3'-phosphate
  modified_base 19: mod_base = OTHER; note = 2'-O-methyluridine-3'-phosphate
  modified_base 20: mod_base = OTHER; note = 2'-O-methylguanosine-3'-phosphate
  modified_base 21: mod_base = OTHER; note = 2'-O-methyluridine-3'-phosphate ((2S,4R)-1-[29-[[2-(acetylamino)-2-deoxy-beta-D-galactopyra nosyl]oxy]-14,14-bis[[3-[[3-[[5-[[2-(acetylamino)-2-deoxy-b eta-D-galactopyranosyl]oxy]-1-oxopentyl]amino]propyl]amino] -3-oxopropoxy]methyl]-1,12,19,25-tetraoxo-16-oxa-13,20,24-t riazanonacos-1-yl]-4-hydroxy-2-pyrrolidinyl)methyl ester
gcttgaatgggatcttggtgt

SEQ ID NO: 2851 - RNA, 23 nt, synthetic construct
  source 1..23: mol_type = other RNA
  modified_base 1: mod_base = OTHER; note = 2'-O-methyladenosine-3'-phosphorothioate
  modified_base 2: mod_base = OTHER; note = 2'-deoxy-2'-fluorocytidine-3'-phosphorothioate
  modified_base 3: mod_base = OTHER; note = 2'-O-methyladenosine-3'-phosphate
  modified_base 4: mod_base = OTHER; note = 2'-O-methylcytidine-3'-phosphate
  modified_base 5: mod_base = OTHER; note = 2'-O-methylcytidine-3'-phosphate
  modified_base 6: mod_base = OTHER; note = 2'-deoxy-2'-fluoroadenosine-3'-phosphate
  modified_base 7: mod_base = OTHER; note = 2'-O-methyladenosine-3'-phosphate
  modified_base 8: mod_base = OTHER; note = 2'-deoxy-2'-fluoroguanosine-3'-phosphate
  modified_base 9: mod_base = OTHER; note = 2'-deoxy-2'-fluoroadenosine-3'-phosphate
  modified_base 10: mod_base = OTHER; note = 2'-O-methyluridine-3'-phosphate
  modified_base 11: mod_base = OTHER; note = 2'-O-methylcytidine-3'-phosphate
  modified_base 12: mod_base = OTHER; note = 2'-O-methylcytidine-3'-phosphate
  modified_base 13: mod_base = OTHER; note = 2'-O-methylcytidine-3'-phosphate
  modified_base 14: mod_base = OTHER; note = 2'-deoxy-2'-fluoroadenosine-3'-phosphate
  modified_base 15: mod_base = OTHER; note = 2'-O-methyluridine-3'-phosphate
  modified_base 16: mod_base = OTHER; note = 2'-deoxy-2'-fluorouridine-3'-phosphate
  modified_base 17: mod_base = OTHER; note = 2'-O-methylcytidine-3'-phosphate
  modified_base 18: mod_base = OTHER; note = 2'-O-methyladenosine-3'-phosphate
  modified_base 19: mod_base = OTHER; note = 2'-O-methyladenosine-3'-phosphate
  modified_base 20: mod_base = OTHER; note = 2'-O-methylguanosine-3'-phosphate
  modified_base 21: mod_base = OTHER; note = 2'-O-methylcytidine-3'-phosphorothioate
  modified_base 22: mod_base = OTHER; note = 2'-O-methylcytidine-3'-phosphorothioate
  modified_base 23: mod_base = OTHER; note = 2'-O-methyladenosine
acaccaagatcccattcaagcca

SEQ ID NO: 2852 - RNA, 21 nt, synthetic construct
  source 1..21: mol_type = other RNA
  modified_base 1: mod_base = OTHER; note = 2'-O-methylcytidine-3'-phosphorothioate
  modified_base 2: mod_base = OTHER; note = 2'-O-methyluridine-3'-phosphorothioate
  modified_base 3: mod_base = OTHER; note = 2'-O-methyluridine-3'-phosphate
  modified_base 4: mod_base = OTHER; note = 2'-O-methylguanosine-3'-phosphate
  modified_base 5: mod_base = OTHER; note = 2'-O-methyladenosine-3'-phosphate
  modified_base 6: mod_base = OTHER; note = 2'-O-methyladenosine-3'-phosphate
  modified_base 7: mod_base = OTHER; note = 2'-deoxy-2'-fluorouridine-3'-phosphate
  modified_base 8: mod_base = OTHER; note = 2'-O-methylguanosine-3'-phosphate
  modified_base 9: mod_base = OTHER; note = 2'-deoxy-2'-fluoroguanosine-3'-phosphate
  modified_base 10: mod_base = OTHER; note = 2'-deoxy-2'-fluoroguanosine-3'-phosphate
  modified_base 11: mod_base = OTHER; note = 2'-deoxy-2'-fluoroadenosine-3'-phosphate
  modified_base 12: mod_base = OTHER; note = 2'-O-methyluridine-3'-phosphate
  modified_base 13: mod_base = OTHER; note = 2'-O-methylcytidine-3'-phosphate
  modified_base 14: mod_base = OTHER; note = 2'-O-methyluridine-3'-phosphate
  modified_base 15: mod_base = OTHER; note = 2'-O-methyluridine-3'-phosphate
  modified_base 16: mod_base = OTHER; note = 2'-O-methylguanosine-3'-phosphate
  modified_base 17: mod_base = OTHER; note = 2'-O-methylguanosine-3'-phosphate
  modified_base 18: mod_base = OTHER; note = 2'-O-methyluridine-3'-phosphate
  modified_base 19: mod_base = OTHER; note = 2'-O-methylguanosine-3'-phosphate
  modified_base 20: mod_base = OTHER; note = 2'-O-methyluridine-3'-phosphate
  modified_base 21: mod_base = OTHER; note = 2'-O-methylcytidine-3'-phosphate ((2S,4R)-1-[29-[[2-(acetylamino)-2-deoxy-beta-D-galactopyra nosyl]oxy]-14,14-bis[[3-[[3-[[5-[[2-(acetylamino)-2-deoxy-b eta-D-galactopyranosyl]oxy]-1-oxopentyl]amino]propyl]amino] -3-oxopropoxy]methyl]-1,12,19,25-tetraoxo-16-oxa-13,20,24-t riazanonacos-1-yl]-4-hydroxy-2-pyrrolidinyl)methyl ester
cttgaatgggatcttggtgtc

SEQ ID NO: 2853 - RNA, 23 nt, synthetic construct
  source 1..23: mol_type = other RNA
  modified_base 1: mod_base = OTHER; note = 2'-O-methylguanosine-3'-phosphorothioate
  modified_base 2: mod_base = OTHER; note = 2'-deoxy-2'-fluoroadenosine-3'-phosphorothioate
  modified_base 3: mod_base = OTHER; note = 2'-O-methylcytidine-3'-phosphate
  modified_base 4: mod_base = OTHER; note = 2'-O-methyladenosine-3'-phosphate
  modified_base 5: mod_base = OTHER; note = 2'-O-methylcytidine-3'-phosphate
  modified_base 6: mod_base = OTHER; note = 2'-deoxy-2'-fluorocytidine-3'-phosphate
  modified_base 7: mod_base = OTHER; note = 2'-O-methyladenosine-3'-phosphate
  modified_base 8: mod_base = OTHER; note = 2'-deoxy-2'-fluoroadenosine-3'-phosphate
  modified_base 9: mod_base = OTHER; note = 2'-deoxy-2'-fluoroguanosine-3'-phosphate
  modified_base 10: mod_base = OTHER; note = 2'-O-methyladenosine-3'-phosphate
  modified_base 11: mod_base = OTHER; note = 2'-O-methyluridine-3'-phosphate
  modified_base 12: mod_base = OTHER; note = 2'-O-methylcytidine-3'-phosphate
  modified_base 13: mod_base = OTHER; note = 2'-O-methylcytidine-3'-phosphate
  modified_base 14: mod_base = OTHER; note = 2'-deoxy-2'-fluorocytidine-3'-phosphate
  modified_base 15: mod_base = OTHER; note = 2'-O-methyladenosine-3'-phosphate
  modified_base 16: mod_base = OTHER; note = 2'-deoxy-2'-fluorouridine-3'-phosphate
  modified_base 17: mod_base = OTHER; note = 2'-O-methyluridine-3'-phosphate
  modified_base 18: mod_base = OTHER; note = 2'-O-methylcytidine-3'-phosphate
  modified_base 19: mod_base = OTHER; note = 2'-O-methyladenosine-3'-phosphate
  modified_base 20: mod_base = OTHER; note = 2'-O-methyladenosine-3'-phosphate
  modified_base 21: mod_base = OTHER; note = 2'-O-methylguanosine-3'-phosphorothioate
  modified_base 22: mod_base = OTHER; note = 2'-O-methylcytidine-3'-phosphorothioate
  modified_base 23: mod_base = OTHER; note = 2'-O-methylcytidine
gacaccaagatcccattcaagcc

SEQ ID NO: 2854 - RNA, 21 nt, synthetic construct
  source 1..21: mol_type = other RNA
  modified_base 1: mod_base = OTHER; note = 2'-O-methylcytidine-3'-phosphorothioate
  modified_base 2: mod_base = OTHER; note = 2'-O-methyladenosine-3'-phosphorothioate
  modified_base 3: mod_base = OTHER; note = 2'-O-methyluridine-3'-phosphate
  modified_base 4: mod_base = OTHER; note = 2'-O-methylguanosine-3'-phosphate
  modified_base 5: mod_base = OTHER; note = 2'-O-methylguanosine-3'-phosphate
  modified_base 6: mod_base = OTHER; note = 2'-O-methylcytidine-3'-phosphate
  modified_base 7: mod_base = OTHER; note = 2'-deoxy-2'-fluorouridine-3'-phosphate
  modified_base 8: mod_base = OTHER; note = 2'-O-methyluridine-3'-phosphate
  modified_base 9: mod_base = OTHER; note = 2'-deoxy-2'-fluoroguanosine-3'-phosphate
  modified_base 10: mod_base = OTHER; note = 2'-deoxy-2'-fluoroadenosine-3'-phosphate
  modified_base 11: mod_base = OTHER; note = 2'-deoxy-2'-fluoroadenosine-3'-phosphate
  modified_base 12: mod_base = OTHER; note = 2'-O-methyluridine-3'-phosphate
  modified_base 13: mod_base = OTHER; note = 2'-O-methylguanosine-3'-phosphate
  modified_base 14: mod_base = OTHER; note = 2'-O-methylguanosine-3'-phosphate
  modified_base 15: mod_base = OTHER; note = 2'-O-methylguanosine-3'-phosphate
  modified_base 16: mod_base = OTHER; note = 2'-O-methyladenosine-3'-phosphate
  modified_base 17: mod_base = OTHER; note = 2'-O-methyluridine-3'-phosphate
  modified_base 18: mod_base = OTHER; note = 2'-O-methylcytidine-3'-phosphate
  modified_base 19: mod_base = OTHER; note = 2'-O-methyluridine-3'-phosphate
  modified_base 20: mod_base = OTHER; note = 2'-O-methyluridine-3'-phosphate
  modified_base 21: mod_base = OTHER; note = 2'-O-methylguanosine-3'-phosphate ((2S,4R)-1-[29-[[2-(acetylamino)-2-deoxy-beta-D-galactopyra nosyl]oxy]-14,14-bis[[3-[[3-[[5-[[2-(acetylamino)-2-deoxy-b eta-D-galactopyranosyl]oxy]-1-oxopentyl]amino]propyl]amino] -3-oxopropoxy]methyl]-1,12,19,25-tetraoxo-16-oxa-13,20,24-t riazanonacos-1-yl]-4-hydroxy-2-pyrrolidinyl)methyl ester
catggcttgaatgggatcttg

SEQ ID NO: 2855 - RNA, 23 nt, synthetic construct
  source 1..23: mol_type = other RNA
  modified_base 1: mod_base = OTHER; note = 2'-O-methylcytidine-3'-phosphorothioate
  modified_base 2: mod_base = OTHER; note = 2'-deoxy-2'-fluoroadenosine-3'-phosphorothioate
  modified_base 3: mod_base = OTHER; note = 2'-O-methyladenosine-3'-phosphate
  modified_base 4: mod_base = OTHER; note = 2'-O-methylguanosine-3'-phosphate
  modified_base 5: mod_base = OTHER; note = 2'-O-methyladenosine-3'-phosphate
  modified_base 6: mod_base = OTHER; note = 2'-deoxy-2'-fluorouridine-3'-phosphate
  modified_base 7: mod_base = OTHER; note = 2'-O-methylcytidine-3'-phosphate
  modified_base 8: mod_base = OTHER; note = 2'-deoxy-2'-fluorocytidine-3'-phosphate
  modified_base 9: mod_base = OTHER; note = 2'-deoxy-2'-fluorocytidine-3'-phosphate
  modified_base 10: mod_base = OTHER; note = 2'-O-methyladenosine-3'-phosphate
  modified_base 11: mod_base = OTHER; note = 2'-O-methyluridine-3'-phosphate
  modified_base 12: mod_base = OTHER; note = 2'-O-methyluridine-3'-phosphate
  modified_base 13: mod_base = OTHER; note = 2'-O-methylcytidine-3'-phosphate
  modified_base 14: mod_base = OTHER; note = 2'-deoxy-2'-fluoroadenosine-3'-phosphate
  modified_base 15: mod_base = OTHER; note = 2'-O-methyladenosine-3'-phosphate
  modified_base 16: mod_base = OTHER; note = 2'-deoxy-2'-fluoroguanosine-3'-phosphate
  modified_base 17: mod_base = OTHER; note = 2'-O-methylcytidine-3'-phosphate
  modified_base 18: mod_base = OTHER; note = 2'-O-methylcytidine-3'-phosphate
  modified_base 19: mod_base = OTHER; note = 2'-O-methyladenosine-3'-phosphate
  modified_base 20: mod_base = OTHER; note = 2'-O-methyluridine-3'-phosphate
  modified_base 21: mod_base = OTHER; note = 2'-O-methylguanosine-3'-phosphorothioate
  modified_base 22: mod_base = OTHER; note = 2'-O-methyluridine-3'-phosphorothioate
  modified_base 23: mod_base = OTHER; note = 2'-O-methyluridine
caagatcccattcaagccatgtt

SEQ ID NO: 2856 - RNA, 21 nt, synthetic construct
  source 1..21: mol_type = other RNA
  modified_base 1: mod_base = OTHER; note = 2'-O-methyladenosine-3'-phosphorothioate
  modified_base 2: mod_base = OTHER; note = 2'-O-methylcytidine-3'-phosphorothioate
  modified_base 3: mod_base = OTHER; note = 2'-O-methyladenosine-3'-phosphate
  modified_base 4: mod_base = OTHER; note = 2'-O-methyluridine-3'-phosphate
  modified_base 5: mod_base = OTHER; note = 2'-O-methylguanosine-3'-phosphate
  modified_base 6: mod_base = OTHER; note = 2'-O-methylguanosine-3'-phosphate
  modified_base 7: mod_base = OTHER; note = 2'-deoxy-2'-fluorocytidine-3'-phosphate
  modified_base 8: mod_base = OTHER; note = 2'-O-methyluridine-3'-phosphate
  modified_base 9: mod_base = OTHER; note = 2'-deoxy-2'-fluorouridine-3'-phosphate
  modified_base 10: mod_base = OTHER; note = 2'-deoxy-2'-fluoroguanosine-3'-phosphate
  modified_base 11: mod_base = OTHER; note = 2'-deoxy-2'-fluoroadenosine-3'-phosphate
  modified_base 12: mod_base = OTHER; note = 2'-O-methyladenosine-3'-phosphate
  modified_base 13: mod_base = OTHER; note = 2'-O-methyluridine-3'-phosphate
  modified_base 14: mod_base = OTHER; note = 2'-O-methylguanosine-3'-phosphate
  modified_base 15: mod_base = OTHER; note = 2'-O-methylguanosine-3'-phosphate
  modified_base 16: mod_base = OTHER; note = 2'-O-methylguanosine-3'-phosphate
  modified_base 17: mod_base = OTHER; note = 2'-O-methyladenosine-3'-phosphate
  modified_base 18: mod_base = OTHER; note = 2'-O-methyluridine-3'-phosphate
  modified_base 19: mod_base = OTHER; note = 2'-O-methylcytidine-3'-phosphate
  modified_base 20: mod_base = OTHER; note = 2'-O-methyluridine-3'-phosphate
  modified_base 21: mod_base = OTHER; note = 2'-O-methyluridine-3'-phosphate ((2S,4R)-1-[29-[[2-(acetylamino)-2-deoxy-beta-D-galactopyra nosyl]oxy]-14,14-bis[[3-[[3-[[5-[[2-(acetylamino)-2-deoxy-b eta-D-galactopyranosyl]oxy]-1-oxopentyl]amino]propyl]amino] -3-oxopropoxy]methyl]-1,12,19,25-tetraoxo-16-oxa-13,20,24-t riazanonacos-1-yl]-4-hydroxy-2-pyrrolidinyl)methyl ester
acatggcttgaatgggatctt

SEQ ID NO: 2857 - RNA, 23 nt, synthetic construct
  source 1..23: mol_type = other RNA
  modified_base 1: mod_base = OTHER; note = 2'-O-methyladenosine-3'-phosphorothioate
  modified_base 2: mod_base = OTHER; note = 2'-deoxy-2'-fluoroadenosine-3'-phosphorothioate
  modified_base 3: mod_base = OTHER; note = 2'-O-methylguanosine-3'-phosphate
  modified_base 4: mod_base = OTHER; note = 2'-O-methyladenosine-3'-phosphate
  modified_base 5: mod_base = OTHER; note = 2'-O-methyluridine-3'-phosphate
  modified_base 6: mod_base = OTHER; note = 2'-deoxy-2'-fluorocytidine-3'-phosphate
  modified_base 7: mod_base = OTHER; note = 2'-O-methylcytidine-3'-phosphate
  modified_base 8: mod_base = OTHER; note = 2'-deoxy-2'-fluorocytidine-3'-phosphate
  modified_base 9: mod_base = OTHER; note = 2'-deoxy-2'-fluoroadenosine-3'-phosphate
  modified_base 10: mod_base = OTHER; note = 2'-O-methyluridine-3'-phosphate
  modified_base 11: mod_base = OTHER; note = 2'-O-methyluridine-3'-phosphate
  modified_base 12: mod_base = OTHER; note = 2'-O-methylcytidine-3'-phosphate
  modified_base 13: mod_base = OTHER; note = 2'-O-methyladenosine-3'-phosphate
  modified_base 14: mod_base = OTHER; note = 2'-deoxy-2'-fluoroadenosine-3'-phosphate
  modified_base 15: mod_base = OTHER; note = 2'-O-methylguanosine-3'-phosphate
  modified_base 16: mod_base = OTHER; note = 2'-deoxy-2'-fluorocytidine-3'-phosphate
  modified_base 17: mod_base = OTHER; note = 2'-O-methylcytidine-3'-phosphate
  modified_base 18: mod_base = OTHER; note = 2'-O-methyladenosine-3'-phosphate
  modified_base 19: mod_base = OTHER; note = 2'-O-methyluridine-3'-phosphate
  modified_base 20: mod_base = OTHER; note = 2'-O-methylguanosine-3'-phosphate
  modified_base 21: mod_base = OTHER; note = 2'-O-methyluridine-3'-phosphorothioate
  modified_base 22: mod_base = OTHER; note = 2'-O-methyluridine-3'-phosphorothioate
  modified_base 23: mod_base = OTHER; note = 2'-O-methyluridine
aagatcccattcaagccatgttt

SEQ ID NO: 2858 - RNA, 21 nt, synthetic construct
  source 1..21: mol_type = other RNA
  modified_base 1: mod_base = OTHER; note = 2'-O-methyluridine-3'-phosphorothioate
  modified_base 2: mod_base = OTHER; note = 2'-O-methylcytidine-3'-phosphorothioate
  modified_base 3: mod_base = OTHER; note = 2'-O-methyladenosine-3'-phosphate
  modified_base 4: mod_base = OTHER; note = 2'-O-methyladenosine-3'-phosphate
  modified_base 5: mod_base = OTHER; note = 2'-O-methyladenosine-3'-phosphate
  modified_base 6: mod_base = OTHER; note = 2'-O-methyluridine-3'-phosphate
  modified_base 7: mod_base = OTHER; note = 2'-deoxy-2'-fluoroguanosine-3'-phosphate
  modified_base 8: mod_base = OTHER; note = 2'-O-methylguanosine-3'-phosphate
  modified_base 9: mod_base = OTHER; note = 2'-deoxy-2'-fluorocytidine-3'-phosphate
  modified_base 10: mod_base = OTHER; note = 2'-deoxy-2'-fluorouridine-3'-phosphate
  modified_base 11: mod_base = OTHER; note = 2'-deoxy-2'-fluoroguanosine-3'-phosphate
  modified_base 12: mod_base = OTHER; note = 2'-O-methyladenosine-3'-phosphate
  modified_base 13: mod_base = OTHER; note = 2'-O-methylguanosine-3'-phosphate
  modified_base 14: mod_base = OTHER; note = 2'-O-methyladenosine-3'-phosphate
  modified_base 15: mod_base = OTHER; note = 2'-O-methyladenosine-3'-phosphate
  modified_base 16: mod_base = OTHER; note = 2'-O-methylguanosine-3'-phosphate
  modified_base 17: mod_base = OTHER; note = 2'-O-methyladenosine-3'-phosphate
  modified_base 18: mod_base = OTHER; note = 2'-O-methylcytidine-3'-phosphate
  modified_base 19: mod_base = OTHER; note = 2'-O-methyluridine-3'-phosphate
  modified_base 20: mod_base = OTHER; note = 2'-O-methylguanosine-3'-phosphate
  modified_base 21: mod_base = OTHER; note = 2'-O-methyladenosine-3'-phosphate ((2S,4R)-1-[29-[[2-(acetylamino)-2-deoxy-beta-D-galactopyra nosyl]oxy]-14,14-bis[[3-[[3-[[5-[[2-(acetylamino)-2-deoxy-b eta-D-galactopyranosyl]oxy]-1-oxopentyl]amino]propyl]amino] -3-oxopropoxy]methyl]-1,12,19,25-tetraoxo-16-oxa-13,20,24-t riazanonacos-1-yl]-4-hydroxy-2-pyrrolidinyl)methyl ester
tcaaatggctgagaagactga

SEQ ID NO: 2859 - RNA, 23 nt, synthetic construct
  source 1..23: mol_type = other RNA
  modified_base 1: mod_base = OTHER; note = 2'-O-methyluridine-3'-phosphorothioate
  modified_base 2: mod_base = OTHER; note = 2'-deoxy-2'-fluorocytidine-3'-phosphorothioate
  modified_base 3: mod_base = OTHER; note = 2'-O-methyladenosine-3'-phosphate
  modified_base 4: mod_base = OTHER; note = 2'-O-methylguanosine-3'-phosphate
  modified_base 5: mod_base = OTHER; note = 2'-O-methyluridine-3'-phosphate
  modified_base 6: mod_base = OTHER; note = 2'-deoxy-2'-fluorocytidine-3'-phosphate
  modified_base 7: mod_base = OTHER; note = 2'-O-methyluridine-3'-phosphate
  modified_base 8: mod_base = OTHER; note = 2'-deoxy-2'-fluorouridine-3'-phosphate
  modified_base 9: mod_base = OTHER; note = 2'-deoxy-2'-fluorocytidine-3'-phosphate
  modified_base 10: mod_base = OTHER; note = 2'-O-methyluridine-3'-phosphate
  modified_base 11: mod_base = OTHER; note = 2'-O-methylcytidine-3'-phosphate
  modified_base 12: mod_base = OTHER; note = 2'-O-methyladenosine-3'-phosphate
  modified_base 13: mod_base = OTHER; note = 2'-O-methylguanosine-3'-phosphate
  modified_base 14: mod_base = OTHER; note = 2'-deoxy-2'-fluorocytidine-3'-phosphate
  modified_base 15: mod_base = OTHER; note = 2'-O-methylcytidine-3'-phosphate
  modified_base 16: mod_base = OTHER; note = 2'-deoxy-2'-fluoroadenosine-3'-phosphate
  modified_base 17: mod_base = OTHER; note = 2'-O-methyluridine-3'-phosphate
  modified_base 18: mod_base = OTHER; note = 2'-O-methyluridine-3'-phosphate
  modified_base 19: mod_base = OTHER; note = 2'-O-methyluridine-3'-phosphate
  modified_base 20: mod_base = OTHER; note = 2'-O-methylguanosine-3'-phosphate
  modified_base 21: mod_base = OTHER; note = 2'-O-methyladenosine-3'-phosphorothioate
  modified_base 22: mod_base = OTHER; note = 2'-O-methyluridine-3'-phosphorothioate
  modified_base 23: mod_base = OTHER; note = 2'-O-methyladenosine
tcagtcttctcagccatttgata

SEQ ID NO: 2860 - RNA, 21 nt, synthetic construct
  source 1..21: mol_type = other RNA
  modified_base 1: mod_base = OTHER; note = 2'-O-methylcytidine-3'-phosphorothioate
  modified_base 2: mod_base = OTHER; note = 2'-O-methyladenosine-3'-phosphorothioate
  modified_base 3: mod_base = OTHER; note = 2'-O-methyladenosine-3'-phosphate
  modified_base 4: mod_base = OTHER; note = 2'-O-methyladenosine-3'-phosphate
  modified_base 5: mod_base = OTHER; note = 2'-O-methyluridine-3'-phosphate
  modified_base 6: mod_base = OTHER; note = 2'-O-methylguanosine-3'-phosphate
  modified_base 7: mod_base = OTHER; note = 2'-deoxy-2'-fluoroguanosine-3'-phosphate
  modified_base 8: mod_base = OTHER; note = 2'-O-methylcytidine-3'-phosphate
  modified_base 9: mod_base = OTHER; note = 2'-deoxy-2'-fluorouridine-3'-phosphate
  modified_base 10: mod_base = OTHER; note = 2'-deoxy-2'-fluoroguanosine-3'-phosphate
  modified_base 11: mod_base = OTHER; note = 2'-deoxy-2'-fluoroadenosine-3'-phosphate
  modified_base 12: mod_base = OTHER; note = 2'-O-methylguanosine-3'-phosphate
  modified_base 13: mod_base = OTHER; note = 2'-O-methyladenosine-3'-phosphate
  modified_base 14: mod_base = OTHER; note = 2'-O-methyladenosine-3'-phosphate
  modified_base 15: mod_base = OTHER; note = 2'-O-methylguanosine-3'-phosphate
  modified_base 16: mod_base = OTHER; note = 2'-O-methyladenosine-3'-phosphate
  modified_base 17: mod_base = OTHER; note = 2'-O-methylcytidine-3'-phosphate
  modified_base 18: mod_base = OTHER; note = 2'-O-methyluridine-3'-phosphate
  modified_base 19: mod_base = OTHER; note = 2'-O-methylguanosine-3'-phosphate
  modified_base 20: mod_base = OTHER; note = 2'-O-methyladenosine-3'-phosphate
  modified_base 21: mod_base = OTHER; note = 2'-O-methylcytidine-3'-phosphate ((2S,4R)-1-[29-[[2-(acetylamino)-2-deoxy-beta-D-galactopyra nosyl]oxy]-14,14-bis[[3-[[3-[[5-[[2-(acetylamino)-2-deoxy-b eta-D-galactopyranosyl]oxy]-1-oxopentyl]amino]propyl]amino] -3-oxopropoxy]methyl]-1,12,19,25-tetraoxo-16-oxa-13,20,24-t riazanonacos-1-yl]-4-hydroxy-2-pyrrolidinyl)methyl ester
caaatggctgagaagactgac

SEQ ID NO: 2861 - RNA, 23 nt, synthetic construct
  source 1..23: mol_type = other RNA
  modified_base 1: mod_base = OTHER; note = 2'-O-methylguanosine-3'-phosphorothioate
  modified_base 2: mod_base = OTHER; note = 2'-deoxy-2'-fluorouridine-3'-phosphorothioate
  modified_base 3: mod_base = OTHER; note = 2'-O-methylcytidine-3'-phosphate
  modified_base 4: mod_base = OTHER; note = 2'-O-methyladenosine-3'-phosphate
  modified_base 5: mod_base = OTHER; note = 2'-O-methylguanosine-3'-phosphate
  modified_base 6: mod_base = OTHER; note = 2'-deoxy-2'-fluorouridine-3'-phosphate
  modified_base 7: mod_base = OTHER; note = 2'-O-methylcytidine-3'-phosphate
  modified_base 8: mod_base = OTHER; note = 2'-deoxy-2'-fluorouridine-3'-phosphate
  modified_base 9: mod_base = OTHER; note = 2'-deoxy-2'-fluorouridine-3'-phosphate
  modified_base 10: mod_base = OTHER; note = 2'-O-methylcytidine-3'-phosphate
  modified_base 11: mod_base = OTHER; note = 2'-O-methyluridine-3'-phosphate
  modified_base 12: mod_base = OTHER; note = 2'-O-methylcytidine-3'-phosphate
  modified_base 13: mod_base = OTHER; note = 2'-O-methyladenosine-3'-phosphate
  modified_base 14: mod_base = OTHER; note = 2'-deoxy-2'-fluoroguanosine-3'-phosphate
  modified_base 15: mod_base = OTHER; note = 2'-O-methylcytidine-3'-phosphate
  modified_base 16: mod_base = OTHER; note = 2'-deoxy-2'-fluorocytidine-3'-phosphate
  modified_base 17: mod_base = OTHER; note = 2'-O-methyladenosine-3'-phosphate
  modified_base 18: mod_base = OTHER; note = 2'-O-methyluridine-3'-phosphate
  modified_base 19: mod_base = OTHER; note = 2'-O-methyluridine-3'-phosphate
  modified_base 20: mod_base = OTHER; note = 2'-O-methyluridine-3'-phosphate
  modified_base 21: mod_base = OTHER; note = 2'-O-methylguanosine-3'-phosphorothioate
  modified_base 22: mod_base = OTHER; note = 2'-O-methyladenosine-3'-phosphorothioate
  modified_base 23: mod_base = OTHER; note = 2'-O-methyluridine
gtcagtcttctcagccatttgat

SEQ ID NO: 2862 - RNA, 21 nt, synthetic construct
  source 1..21: mol_type = other RNA
  modified_base 1: mod_base = OTHER; note = 2'-O-methylguanosine-3'-phosphorothioate
  modified_base 2: mod_base = OTHER; note = 2'-O-methyladenosine-3'-phosphorothioate
  modified_base 3: mod_base = OTHER; note = 2'-O-methyluridine-3'-phosphate
  modified_base 4: mod_base = OTHER; note = 2'-O-methyladenosine-3'-phosphate
  modified_base 5: mod_base = OTHER; note = 2'-O-methyluridine-3'-phosphate
  modified_base 6: mod_base = OTHER; note = 2'-O-methylcytidine-3'-phosphate
  modified_base 7: mod_base = OTHER; note = 2'-deoxy-2'-fluoroadenosine-3'-phosphate
  modified_base 8: mod_base = OTHER; note = 2'-O-methyladenosine-3'-phosphate
  modified_base 9: mod_base = OTHER; note = 2'-deoxy-2'-fluoroadenosine-3'-phosphate
  modified_base 10: mod_base = OTHER; note = 2'-deoxy-2'-fluorouridine-3'-phosphate
  modified_base 11: mod_base = OTHER; note = 2'-deoxy-2'-fluoroguanosine-3'-phosphate
  modified_base 12: mod_base = OTHER; note = 2'-O-methylguanosine-3'-phosphate
  modified_base 13: mod_base = OTHER; note = 2'-O-methylcytidine-3'-phosphate
  modified_base 14: mod_base = OTHER; note = 2'-O-methyluridine-3'-phosphate
  modified_base 15: mod_base = OTHER; note = 2'-O-methylguanosine-3'-phosphate
  modified_base 16: mod_base = OTHER; note = 2'-O-methyladenosine-3'-phosphate
  modified_base 17: mod_base = OTHER; note = 2'-O-methylguanosine-3'-phosphate
  modified_base 18: mod_base = OTHER; note = 2'-O-methyladenosine-3'-phosphate
  modified_base 19: mod_base = OTHER; note = 2'-O-methyladenosine-3'-phosphate
  modified_base 20: mod_base = OTHER; note = 2'-O-methylguanosine-3'-phosphate
  modified_base 21: mod_base = OTHER; note = 2'-O-methyladenosine-3'-phosphate ((2S,4R)-1-[29-[[2-(acetylamino)-2-deoxy-beta-D-galactopyra nosyl]oxy]-14,14-bis[[3-[[3-[[5-[[2-(acetylamino)-2-deoxy-b eta-D-galactopyranosyl]oxy]-1-oxopentyl]amino]propyl]amino] -3-oxopropoxy]methyl]-1,12,19,25-tetraoxo-16-oxa-13,20,24-t riazanonacos-1-yl]-4-hydroxy-2-pyrrolidinyl)methyl ester
gatatcaaatggctgagaaga

SEQ ID NO: 2863 - RNA, 23 nt, synthetic construct
  source 1..23: mol_type = other RNA
  modified_base 1: mod_base = OTHER; note = 2'-O-methyluridine-3'-phosphorothioate
  modified_base 2: mod_base = OTHER; note = 2'-deoxy-2'-fluorocytidine-3'-phosphorothioate
  modified_base 3: mod_base = OTHER; note = 2'-O-methyluridine-3'-phosphate
  modified_base 4: mod_base = OTHER; note = 2'-O-methyluridine-3'-phosphate
  modified_base 5: mod_base = OTHER; note = 2'-O-methylcytidine-3'-phosphate
  modified_base 6: mod_base = OTHER; note = 2'-deoxy-2'-fluorouridine-3'-phosphate
  modified_base 7: mod_base = OTHER; note = 2'-O-methylcytidine-3'-phosphate
  modified_base 8: mod_base = OTHER; note = 2'-deoxy-2'-fluoroadenosine-3'-phosphate
  modified_base 9: mod_base = OTHER; note = 2'-deoxy-2'-fluoroguanosine-3'-phosphate
  modified_base 10: mod_base = OTHER; note = 2'-O-methylcytidine-3'-phosphate
  modified_base 11: mod_base = OTHER; note = 2'-O-methylcytidine-3'-phosphate
  modified_base 12: mod_base = OTHER; note = 2'-O-methyladenosine-3'-phosphate
  modified_base 13: mod_base = OTHER; note = 2'-O-methyluridine-3'-phosphate
  modified_base 14: mod_base = OTHER; note = 2'-deoxy-2'-fluorouridine-3'-phosphate
  modified_base 15: mod_base = OTHER; note = 2'-O-methyluridine-3'-phosphate
  modified_base 16: mod_base = OTHER; note = 2'-deoxy-2'-fluoroguanosine-3'-phosphate
  modified_base 17: mod_base = OTHER; note = 2'-O-methyladenosine-3'-phosphate
  modified_base 18: mod_base = OTHER; note = 2'-O-methyluridine-3'-phosphate
  modified_base 19: mod_base = OTHER; note = 2'-O-methyladenosine-3'-phosphate
  modified_base 20: mod_base = OTHER; note = 2'-O-methyluridine-3'-phosphate
  modified_base 21: mod_base = OTHER; note = 2'-O-methylcytidine-3'-phosphorothioate
  modified_base 22: mod_base = OTHER; note = 2'-O-methyluridine-3'-phosphorothioate
  modified_base 23: mod_base = OTHER; note = 2'-O-methyluridine
tcttctcagccatttgatatctt

SEQ ID NO: 2864 - RNA, 21 nt, synthetic construct
  source 1..21: mol_type = other RNA
  modified_base 1: mod_base = OTHER; note = 2'-O-methyladenosine-3'-phosphorothioate
  modified_base 2: mod_base = OTHER; note = 2'-O-methylguanosine-3'-phosphorothioate
  modified_base 3: mod_base = OTHER; note = 2'-O-methyladenosine-3'-phosphate
  modified_base 4: mod_base = OTHER; note = 2'-O-methyluridine-3'-phosphate
  modified_base 5: mod_base = OTHER; note = 2'-O-methyladenosine-3'-phosphate
  modified_base 6: mod_base = OTHER; note = 2'-O-methyluridine-3'-phosphate
  modified_base 7: mod_base = OTHER; note = 2'-deoxy-2'-fluorocytidine-3'-phosphate
  modified_base 8: mod_base = OTHER; note = 2'-O-methyladenosine-3'-phosphate
  modified_base 9: mod_base = OTHER; note = 2'-deoxy-2'-fluoroadenosine-3'-phosphate
  modified_base 10: mod_base = OTHER; note = 2'-deoxy-2'-fluoroadenosine-3'-phosphate
  modified_base 11: mod_base = OTHER; note = 2'-deoxy-2'-fluorouridine-3'-phosphate
  modified_base 12: mod_base = OTHER; note = 2'-O-methylguanosine-3'-phosphate
  modified_base 13: mod_base = OTHER; note = 2'-O-methylguanosine-3'-phosphate
  modified_base 14: mod_base = OTHER; note = 2'-O-methylcytidine-3'-phosphate
  modified_base 15: mod_base = OTHER; note = 2'-O-methyluridine-3'-phosphate
  modified_base 16: mod_base = OTHER; note = 2'-O-methylguanosine-3'-phosphate
  modified_base 17: mod_base = OTHER; note = 2'-O-methyladenosine-3'-phosphate
  modified_base 18: mod_base = OTHER; note = 2'-O-methylguanosine-3'-phosphate
  modified_base 19: mod_base = OTHER; note = 2'-O-methyladenosine-3'-phosphate
  modified_base 20: mod_base = OTHER; note = 2'-O-methyladenosine-3'-phosphate
  modified_base 21: mod_base = OTHER; note = 2'-O-methylguanosine-3'-phosphate ((2S,4R)-1-[29-[[2-(acetylamino)-2-deoxy-beta-D-galactopyra nosyl]oxy]-14,14-bis[[3-[[3-[[5-[[2-(acetylamino)-2-deoxy-b eta-D-galactopyranosyl]oxy]-1-oxopentyl]amino]propyl]amino] -3-oxopropoxy]methyl]-1,12,19,25-tetraoxo-16-oxa-13,20,24-t riazanonacos-1-yl]-4-hydroxy-2-pyrrolidinyl)methyl ester
agatatcaaatggctgagaag

SEQ ID NO: 2865 - RNA, 23 nt, synthetic construct
  source 1..23: mol_type = other RNA
  modified_base 1: mod_base = OTHER; note = 2'-O-methylcytidine-3'-phosphorothioate
  modified_base 2: mod_base = OTHER; note = 2'-deoxy-2'-fluorouridine-3'-phosphorothioate
  modified_base 3: mod_base = OTHER; note = 2'-O-methyluridine-3'-phosphate
  modified_base 4: mod_base = OTHER; note = 2'-O-methylcytidine-3'-phosphate
  modified_base 5: mod_base = OTHER; note = 2'-O-methyluridine-3'-phosphate
  modified_base 6: mod_base = OTHER; note = 2'-deoxy-2'-fluorocytidine-3'-phosphate
  modified_base 7: mod_base = OTHER; note = 2'-O-methyladenosine-3'-phosphate
  modified_base 8: mod_base = OTHER; note = 2'-deoxy-2'-fluoroguanosine-3'-phosphate
  modified_base 9: mod_base = OTHER; note = 2'-deoxy-2'-fluorocytidine-3'-phosphate
  modified_base 10: mod_base = OTHER; note = 2'-O-methylcytidine-3'-phosphate
  modified_base 11: mod_base = OTHER; note = 2'-O-methyladenosine-3'-phosphate
  modified_base 12: mod_base = OTHER; note = 2'-O-methyluridine-3'-phosphate
  modified_base 13: mod_base = OTHER; note = 2'-O-methyluridine-3'-phosphate
  modified_base 14: mod_base = OTHER; note = 2'-deoxy-2'-fluorouridine-3'-phosphate
  modified_base 15: mod_base = OTHER; note = 2'-O-methylguanosine-3'-phosphate
  modified_base 16: mod_base = OTHER; note = 2'-deoxy-2'-fluoroadenosine-3'-phosphate
  modified_base 17: mod_base = OTHER; note = 2'-O-methyluridine-3'-phosphate
  modified_base 18: mod_base = OTHER; note = 2'-O-methyladenosine-3'-phosphate
  modified_base 19: mod_base = OTHER; note = 2'-O-methyluridine-3'-phosphate
  modified_base 20: mod_base = OTHER; note = 2'-O-methylcytidine-3'-phosphate
  modified_base 21: mod_base = OTHER; note = 2'-O-methyluridine-3'-phosphorothioate
  modified_base 22: mod_base = OTHER; note = 2'-O-methyluridine-3'-phosphorothioate
  modified_base 23: mod_base = OTHER; note = 2'-O-methylcytidine
cttctcagccatttgatatcttc

SEQ ID NO: 2866 - RNA, 21 nt, synthetic construct
  source 1..21: mol_type = other RNA
  modified_base 1: mod_base = OTHER; note = 2'-O-methylguanosine-3'-phosphorothioate
  modified_base 2: mod_base = OTHER; note = 2'-O-methyladenosine-3'-phosphorothioate
  modified_base 3: mod_base = OTHER; note = 2'-O-methyladenosine-3'-phosphate
  modified_base 4: mod_base = OTHER; note = 2'-O-methyladenosine-3'-phosphate
  modified_base 5: mod_base = OTHER; note = 2'-O-methylguanosine-3'-phosphate
  modified_base 6: mod_base = OTHER; note = 2'-O-methyluridine-3'-phosphate
  modified_base 7: mod_base = OTHER; note = 2'-deoxy-2'-fluorocytidine-3'-phosphate
  modified_base 8: mod_base = OTHER; note = 2'-O-methyladenosine-3'-phosphate
  modified_base 9: mod_base = OTHER; note = 2'-deoxy-2'-fluorouridine-3'-phosphate
  modified_base 10: mod_base = OTHER; note = 2'-deoxy-2'-fluorocytidine-3'-phosphate
  modified_base 11: mod_base = OTHER; note = 2'-deoxy-2'-fluoroguanosine-3'-phosphate
  modified_base 12: mod_base = OTHER; note = 2'-O-methyladenosine-3'-phosphate
  modified_base 13: mod_base = OTHER; note = 2'-O-methylcytidine-3'-phosphate
  modified_base 14: mod_base = OTHER; note = 2'-O-methyladenosine-3'-phosphate
  modified_base 15: mod_base = OTHER; note = 2'-O-methyladenosine-3'-phosphate
  modified_base 16: mod_base = OTHER; note = 2'-O-methylguanosine-3'-phosphate
  modified_base 17: mod_base = OTHER; note = 2'-O-methyladenosine-3'-phosphate
  modified_base 18: mod_base = OTHER; note = 2'-O-methylcytidine-3'-phosphate
  modified_base 19: mod_base = OTHER; note = 2'-O-methyladenosine-3'-phosphate
  modified_base 20: mod_base = OTHER; note = 2'-O-methyluridine-3'-phosphate
  modified_base 21: mod_base = OTHER; note = 2'-O-methyluridine-3'-phosphate ((2S,4R)-1-[29-[[2-(acetylamino)-2-deoxy-beta-D-galactopyra nosyl]oxy]-14,14-bis[[3-[[3-[[5-[[2-(acetylamino)-2-deoxy-b eta-D-galactopyranosyl]oxy]-1-oxopentyl]amino]propyl]amino] -3-oxopropoxy]methyl]-1,12,19,25-tetraoxo-16-oxa-13,20,24-t riazanonacos-1-yl]-4-hydroxy-2-pyrrolidinyl)methyl ester
gaaagtcatcgacaagacatt

SEQ ID NO: 2867 - RNA, 23 nt, synthetic construct
  source 1..23: mol_type = other RNA
  modified_base 1: mod_base = OTHER; note = 2'-O-methyladenosine-3'-phosphorothioate
  modified_base 2: mod_base = OTHER; note = 2'-deoxy-2'-fluoroadenosine-3'-phosphorothioate
  modified_base 3: mod_base = OTHER; note = 2'-O-methyluridine-3'-phosphate
  modified_base 4: mod_base = OTHER; note = 2'-O-methylguanosine-3'-phosphate
  modified_base 5: mod_base = OTHER; note = 2'-O-methyluridine-3'-phosphate
  modified_base 6: mod_base = OTHER; note = 2'-deoxy-2'-fluorocytidine-3'-phosphate
  modified_base 7: mod_base = OTHER; note = 2'-O-methyluridine-3'-phosphate
  modified_base 8: mod_base = OTHER; note = 2'-deoxy-2'-fluorouridine-3'-phosphate
  modified_base 9: mod_base = OTHER; note = 2'-deoxy-2'-fluoroguanosine-3'-phosphate
  modified_base 10: mod_base = OTHER; note = 2'-O-methyluridine-3'-phosphate
  modified_base 11: mod_base = OTHER; note = 2'-O-methylcytidine-3'-phosphate
  modified_base 12: mod_base = OTHER; note = 2'-O-methylguanosine-3'-phosphate
  modified_base 13: mod_base = OTHER; note = 2'-O-methyladenosine-3'-phosphate
  modified_base 14: mod_base = OTHER; note = 2'-deoxy-2'-fluorouridine-3'-phosphate
  modified_base 15: mod_base = OTHER; note = 2'-O-methylguanosine-3'-phosphate
  modified_base 16: mod_base = OTHER; note = 2'-deoxy-2'-fluoroadenosine-3'-phosphate
  modified_base 17: mod_base = OTHER; note = 2'-O-methylcytidine-3'-phosphate
  modified_base 18: mod_base = OTHER; note = 2'-O-methyluridine-3'-phosphate
  modified_base 19: mod_base = OTHER; note = 2'-O-methyluridine-3'-phosphate
  modified_base 20: mod_base = OTHER; note = 2'-O-methyluridine-3'-phosphate
  modified_base 21: mod_base = OTHER; note = 2'-O-methylcytidine-3'-phosphorothioate
  modified_base 22: mod_base = OTHER; note = 2'-O-methyladenosine-3'-phosphorothioate
  modified_base 23: mod_base = OTHER; note = 2'-O-methylcytidine
aatgtcttgtcgatgactttcac

SEQ ID NO: 2868 - RNA, 21 nt, synthetic construct
  source 1..21: mol_type = other RNA
  modified_base 1: mod_base = OTHER; note = 2'-O-methyladenosine-3'-phosphorothioate
  modified_base 2: mod_base = OTHER; note = 2'-O-methyladenosine-3'-phosphorothioate
  modified_base 3: mod_base = OTHER; note = 2'-O-methyladenosine-3'-phosphate
  modified_base 4: mod_base = OTHER; note = 2'-O-methylguanosine-3'-phosphate
  modified_base 5: mod_base = OTHER; note = 2'-O-methyluridine-3'-phosphate
  modified_base 6: mod_base = OTHER; note = 2'-O-methylcytidine-3'-phosphate
  modified_base 7: mod_base = OTHER; note = 2'-deoxy-2'-fluoroadenosine-3'-phosphate
  modified_base 8: mod_base = OTHER; note = 2'-O-methyluridine-3'-phosphate
  modified_base 9: mod_base = OTHER; note = 2'-deoxy-2'-fluorocytidine-3'-phosphate
  modified_base 10: mod_base = OTHER; note = 2'-deoxy-2'-fluoroguanosine-3'-phosphate
  modified_base 11: mod_base = OTHER; note = 2'-deoxy-2'-fluoroadenosine-3'-phosphate
  modified_base 12: mod_base = OTHER; note = 2'-O-methylcytidine-3'-phosphate
  modified_base 13: mod_base = OTHER; note = 2'-O-methyladenosine-3'-phosphate
  modified_base 14: mod_base = OTHER; note = 2'-O-methyladenosine-3'-phosphate
  modified_base 15: mod_base = OTHER; note = 2'-O-methylguanosine-3'-phosphate
  modified_base 16: mod_base = OTHER; note = 2'-O-methyladenosine-3'-phosphate
  modified_base 17: mod_base = OTHER; note = 2'-O-methylcytidine-3'-phosphate
  modified_base 18: mod_base = OTHER; note = 2'-O-methyladenosine-3'-phosphate
  modified_base 19: mod_base = OTHER; note = 2'-O-methyluridine-3'-phosphate
  modified_base 20: mod_base = OTHER; note = 2'-O-methyluridine-3'-phosphate
  modified_base 21: mod_base = OTHER; note = 2'-O-methylguanosine-3'-phosphate ((2S,4R)-1-[29-[[2-(acetylamino)-2-deoxy-beta-D-galactopyra nosyl]oxy]-14,14-bis[[3-[[3-[[5-[[2-(acetylamino)-2-deoxy-b eta-D-galactopyranosyl]oxy]-1-oxopentyl]amino]propyl]amino] -3-oxopropoxy]methyl]-1,12,19,25-tetraoxo-16-oxa-13,20,24-t riazanonacos-1-yl]-4-hydroxy-2-pyrrolidinyl)methyl ester
aaagtcatcgacaagacattg

SEQ ID NO: 2869 - RNA, 23 nt, synthetic construct
  source 1..23: mol_type = other RNA
  modified_base 1: mod_base = OTHER; note = 2'-O-methylcytidine-3'-phosphorothioate
  modified_base 2: mod_base = OTHER; note = 2'-deoxy-2'-fluoroadenosine-3'-phosphorothioate
  modified_base 3: mod_base = OTHER; note = 2'-O-methyladenosine-3'-phosphate
  modified_base 4: mod_base = OTHER; note = 2'-O-methyluridine-3'-phosphate
  modified_base 5: mod_base = OTHER; note = 2'-O-methylguanosine-3'-phosphate
  modified_base 6: mod_base = OTHER; note = 2'-deoxy-2'-fluorouridine-3'-phosphate
  modified_base 7: mod_base = OTHER; note = 2'-O-methylcytidine-3'-phosphate
  modified_base 8: mod_base = OTHER; note = 2'-deoxy-2'-fluorouridine-3'-phosphate
  modified_base 9: mod_base = OTHER; note = 2'-deoxy-2'-fluorouridine-3'-phosphate
  modified_base 10: mod_base = OTHER; note = 2'-O-methylguanosine-3'-phosphate
  modified_base 11: mod_base = OTHER; note = 2'-O-methyluridine-3'-phosphate
  modified_base 12: mod_base = OTHER; note = 2'-O-methylcytidine-3'-phosphate
  modified_base 13: mod_base = OTHER; note = 2'-O-methylguanosine-3'-phosphate
  modified_base 14: mod_base = OTHER; note = 2'-deoxy-2'-fluoroadenosine-3'-phosphate
  modified_base 15: mod_base = OTHER; note = 2'-O-methyluridine-3'-phosphate
  modified_base 16: mod_base = OTHER; note = 2'-deoxy-2'-fluoroguanosine-3'-phosphate
  modified_base 17: mod_base = OTHER; note = 2'-O-methyladenosine-3'-phosphate
  modified_base 18: mod_base = OTHER; note = 2'-O-methylcytidine-3'-phosphate
  modified_base 19: mod_base = OTHER; note = 2'-O-methyluridine-3'-phosphate
  modified_base 20: mod_base = OTHER; note = 2'-O-methyluridine-3'-phosphate
  modified_base 21: mod_base = OTHER; note = 2'-O-methyluridine-3'-phosphorothioate
  modified_base 22: mod_base = OTHER; note = 2'-O-methylcytidine-3'-phosphorothioate
  modified_base 23: mod_base = OTHER; note = 2'-O-methyladenosine
caatgtcttgtcgatgactttca

SEQ ID NO: 2870 - RNA, 21 nt, synthetic construct
  source 1..21: mol_type = other RNA
  modified_base 1: mod_base = OTHER; note = 2'-O-methyladenosine-3'-phosphorothioate
  modified_base 2: mod_base = OTHER; note = 2'-O-methyluridine-3'-phosphorothioate
  modified_base 3: mod_base = OTHER; note = 2'-O-methylguanosine-3'-phosphate
  modified_base 4: mod_base = OTHER; note = 2'-O-methyluridine-3'-phosphate
  modified_base 5: mod_base = OTHER; note = 2'-O-methylguanosine-3'-phosphate
  modified_base 6: mod_base = OTHER; note = 2'-O-methyladenosine-3'-phosphate
  modified_base 7: mod_base = OTHER; note = 2'-deoxy-2'-fluoroadenosine-3'-phosphate
  modified_base 8: mod_base = OTHER; note = 2'-O-methyladenosine-3'-phosphate
  modified_base 9: mod_base = OTHER; note = 2'-deoxy-2'-fluoroguanosine-3'-phosphate
  modified_base 10: mod_base = OTHER; note = 2'-deoxy-2'-fluorouridine-3'-phosphate
  modified_base 11: mod_base = OTHER; note = 2'-deoxy-2'-fluorocytidine-3'-phosphate
  modified_base 12: mod_base = OTHER; note = 2'-O-methyladenosine-3'-phosphate
  modified_base 13: mod_base = OTHER; note = 2'-O-methyluridine-3'-phosphate
  modified_base 14: mod_base = OTHER; note = 2'-O-methylcytidine-3'-phosphate
  modified_base 15: mod_base = OTHER; note = 2'-O-methylguanosine-3'-phosphate
  modified_base 16: mod_base = OTHER; note = 2'-O-methyladenosine-3'-phosphate
  modified_base 17: mod_base = OTHER; note = 2'-O-methylcytidine-3'-phosphate
  modified_base 18: mod_base = OTHER; note = 2'-O-methyladenosine-3'-phosphate
  modified_base 19: mod_base = OTHER; note = 2'-O-methyladenosine-3'-phosphate
  modified_base 20: mod_base = OTHER; note = 2'-O-methylguanosine-3'-phosphate
  modified_base 21: mod_base = OTHER; note = 2'-O-methyladenosine-3'-phosphate ((2S,4R)-1-[29-[[2-(acetylamino)-2-deoxy-beta-D-galactopyra nosyl]oxy]-14,14-bis[[3-[[3-[[5-[[2-(acetylamino)-2-deoxy-b eta-D-galactopyranosyl]oxy]-1-oxopentyl]amino]propyl]amino] -3-oxopropoxy]methyl]-1,12,19,25-tetraoxo-16-oxa-13,20,24-t riazanonacos-1-yl]-4-hydroxy-2-pyrrolidinyl)methyl ester
atgtgaaagtcatcgacaaga

SEQ ID NO: 2871 - RNA, 23 nt, synthetic construct
  source 1..23: mol_type = other RNA
  modified_base 1: mod_base = OTHER; note = 2'-O-methyluridine-3'-phosphorothioate
  modified_base 2: mod_base = OTHER; note = 2'-deoxy-2'-fluorocytidine-3'-phosphorothioate
  modified_base 3: mod_base = OTHER; note = 2'-O-methyluridine-3'-phosphate
  modified_base 4: mod_base = OTHER; note = 2'-O-methyluridine-3'-phosphate
  modified_base 5: mod_base = OTHER; note = 2'-O-methylguanosine-3'-phosphate
  modified_base 6: mod_base = OTHER; note = 2'-deoxy-2'-fluorouridine-3'-phosphate
  modified_base 7: mod_base = OTHER; note = 2'-O-methylcytidine-3'-phosphate
  modified_base 8: mod_base = OTHER; note = 2'-deoxy-2'-fluoroguanosine-3'-phosphate
  modified_base 9: mod_base = OTHER; note = 2'-deoxy-2'-fluoroadenosine-3'-phosphate
  modified_base 10: mod_base = OTHER; note = 2'-O-methyluridine-3'-phosphate
  modified_base 11: mod_base = OTHER; note = 2'-O-methylguanosine-3'-phosphate
  modified_base 12: mod_base = OTHER; note = 2'-O-methyladenosine-3'-phosphate
  modified_base 13: mod_base = OTHER; note = 2'-O-methylcytidine-3'-phosphate
  modified_base 14: mod_base = OTHER; note = 2'-deoxy-2'-fluorouridine-3'-phosphate
  modified_base 15: mod_base = OTHER; note = 2'-O-methyluridine-3'-phosphate
  modified_base 16: mod_base = OTHER; note = 2'-deoxy-2'-fluorouridine-3'-phosphate
  modified_base 17: mod_base = OTHER; note = 2'-O-methylcytidine-3'-phosphate
  modified_base 18: mod_base = OTHER; note = 2'-O-methyladenosine-3'-phosphate
  modified_base 19: mod_base = OTHER; note = 2'-O-methylcytidine-3'-phosphate
  modified_base 20: mod_base = OTHER; note = 2'-O-methyladenosine-3'-phosphate
  modified_base 21: mod_base = OTHER; note = 2'-O-methyluridine-3'-phosphorothioate
  modified_base 22: mod_base = OTHER; note = 2'-O-methyluridine-3'-phosphorothioate
  modified_base 23: mod_base = OTHER; note = 2'-O-methylcytidine
tcttgtcgatgactttcacattc

SEQ ID NO: 2872 - RNA, 21 nt, synthetic construct
  source 1..21: mol_type = other RNA
  modified_base 1: mod_base = OTHER; note = 2'-O-methyladenosine-3'-phosphorothioate
  modified_base 2: mod_base = OTHER; note = 2'-O-methyladenosine-3'-phosphorothioate
  modified_base 3: mod_base = OTHER; note = 2'-O-methyluridine-3'-phosphate
  modified_base 4: mod_base = OTHER; note = 2'-O-methylguanosine-3'-phosphate
  modified_base 5: mod_base = OTHER; note = 2'-O-methyluridine-3'-phosphate
  modified_base 6: mod_base = OTHER; note = 2'-O-methylguanosine-3'-phosphate
  modified_base 7: mod_base = OTHER; note = 2'-deoxy-2'-fluoroadenosine-3'-phosphate
  modified_base 8: mod_base = OTHER; note = 2'-O-methyladenosine-3'-phosphate
  modified_base 9: mod_base = OTHER; note = 2'-deoxy-2'-fluoroadenosine-3'-phosphate
  modified_base 10: mod_base = OTHER; note = 2'-deoxy-2'-fluoroguanosine-3'-phosphate
  modified_base 11: mod_base = OTHER; note = 2'-deoxy-2'-fluorouridine-3'-phosphate
  modified_base 12: mod_base = OTHER; note = 2'-O-methylcytidine-3'-phosphate
  modified_base 13: mod_base = OTHER; note = 2'-O-methyladenosine-3'-phosphate
  modified_base 14: mod_base = OTHER; note = 2'-O-methyluridine-3'-phosphate
  modified_base 15: mod_base = OTHER; note = 2'-O-methylcytidine-3'-phosphate
  modified_base 16: mod_base = OTHER; note = 2'-O-methylguanosine-3'-phosphate
  modified_base 17: mod_base = OTHER; note = 2'-O-methyladenosine-3'-phosphate
  modified_base 18: mod_base = OTHER; note = 2'-O-methylcytidine-3'-phosphate
  modified_base 19: mod_base = OTHER; note = 2'-O-methyladenosine-3'-phosphate
  modified_base 20: mod_base = OTHER; note = 2'-O-methyladenosine-3'-phosphate
  modified_base 21: mod_base = OTHER; note = 2'-O-methylguanosine-3'-phosphate ((2S,4R)-1-[29-[[2-(acetylamino)-2-deoxy-beta-D-galactopyra nosyl]oxy]-14,14-bis[[3-[[3-[[5-[[2-(acetylamino)-2-deoxy-b eta-D-galactopyranosyl]oxy]-1-oxopentyl]amino]propyl]amino] -3-oxopropoxy]methyl]-1,12,19,25-tetraoxo-16-oxa-13,20,24-t riazanonacos-1-yl]-4-hydroxy-2-pyrrolidinyl)methyl ester
aatgtgaaagtcatcgacaag

SEQ ID NO: 2873 - RNA, 23 nt, synthetic construct
  source 1..23: mol_type = other RNA
  modified_base 1: mod_base = OTHER; note = 2'-O-methylcytidine-3'-phosphorothioate
  modified_base 2: mod_base = OTHER; note = 2'-deoxy-2'-fluorouridine-3'-phosphorothioate
  modified_base 3: mod_base = OTHER; note = 2'-O-methyluridine-3'-phosphate
  modified_base 4: mod_base = OTHER; note = 2'-O-methylguanosine-3'-phosphate
  modified_base 5: mod_base = OTHER; note = 2'-O-methyluridine-3'-phosphate
  modified_base 6: mod_base = OTHER; note = 2'-deoxy-2'-fluorocytidine-3'-phosphate
  modified_base 7: mod_base = OTHER; note = 2'-O-methylguanosine-3'-phosphate
  modified_base 8: mod_base = OTHER; note = 2'-deoxy-2'-fluoroadenosine-3'-phosphate
  modified_base 9: mod_base = OTHER; note = 2'-deoxy-2'-fluorouridine-3'-phosphate
  modified_base 10: mod_base = OTHER; note = 2'-O-methylguanosine-3'-phosphate
  modified_base 11: mod_base = OTHER; note = 2'-O-methyladenosine-3'-phosphate
  modified_base 12: mod_base = OTHER; note = 2'-O-methylcytidine-3'-phosphate
  modified_base 13: mod_base = OTHER; note = 2'-O-methyluridine-3'-phosphate
  modified_base 14: mod_base = OTHER; note = 2'-deoxy-2'-fluorouridine-3'-phosphate
  modified_base 15: mod_base = OTHER; note = 2'-O-methyluridine-3'-phosphate
  modified_base 16: mod_base = OTHER; note = 2'-deoxy-2'-fluorocytidine-3'-phosphate
  modified_base 17: mod_base = OTHER; note = 2'-O-methyladenosine-3'-phosphate
  modified_base 18: mod_base = OTHER; note = 2'-O-methylcytidine-3'-phosphate
  modified_base 19: mod_base = OTHER; note = 2'-O-methyladenosine-3'-phosphate
  modified_base 20: mod_base = OTHER; note = 2'-O-methyluridine-3'-phosphate
  modified_base 21: mod_base = OTHER; note = 2'-O-methyluridine-3'-phosphorothioate
  modified_base 22: mod_base = OTHER; note = 2'-O-methylcytidine-3'-phosphorothioate
  modified_base 23: mod_base = OTHER; note = 2'-O-methyluridine
cttgtcgatgactttcacattct

SEQ ID NO: 2874 - RNA, 21 nt, synthetic construct
  source 1..21: mol_type = other RNA
  modified_base 1: mod_base = OTHER; note = 2'-O-methylguanosine-3'-phosphorothioate
  modified_base 2: mod_base = OTHER; note = 2'-O-methylguanosine-3'-phosphorothioate
  modified_base 3: mod_base = OTHER; note = 2'-O-methylcytidine-3'-phosphate
  modified_base 4: mod_base = OTHER; note = 2'-O-methyluridine-3'-phosphate
  modified_base 5: mod_base = OTHER; note = 2'-O-methyladenosine-3'-phosphate
  modified_base 6: mod_base = OTHER; note = 2'-O-methyladenosine-3'-phosphate
  modified_base 7: mod_base = OTHER; note = 2'-deoxy-2'-fluorouridine-3'-phosphate
  modified_base 8: mod_base = OTHER; note = 2'-O-methyluridine-3'-phosphate
  modified_base 9: mod_base = OTHER; note = 2'-deoxy-2'-fluorouridine-3'-phosphate
  modified_base 10: mod_base = OTHER; note = 2'-deoxy-2'-fluoroguanosine-3'-phosphate
  modified_base 11: mod_base = OTHER; note = 2'-deoxy-2'-fluorouridine-3'-phosphate
  modified_base 12: mod_base = OTHER; note = 2'-O-methyladenosine-3'-phosphate
  modified_base 13: mod_base = OTHER; note = 2'-O-methyluridine-3'-phosphate
  modified_base 14: mod_base = OTHER; note = 2'-O-methylcytidine-3'-phosphate
  modified_base 15: mod_base = OTHER; note = 2'-O-methyladenosine-3'-phosphate
  modified_base 16: mod_base = OTHER; note = 2'-O-methyladenosine-3'-phosphate
  modified_base 17: mod_base = OTHER; note = 2'-O-methyluridine-3'-phosphate
  modified_base 18: mod_base = OTHER; note = 2'-O-methylguanosine-3'-phosphate
  modified_base 19: mod_base = OTHER; note = 2'-O-methyladenosine-3'-phosphate
  modified_base 20: mod_base = OTHER; note = 2'-O-methyluridine-3'-phosphate
  modified_base 21: mod_base = OTHER; note = 2'-O-methyluridine-3'-phosphate ((2S,4R)-1-[29-[[2-(acetylamino)-2-deoxy-beta-D-galactopyra nosyl]oxy]-14,14-bis[[3-[[3-[[5-[[2-(acetylamino)-2-deoxy-b eta-D-galactopyranosyl]oxy]-1-oxopentyl]amino]propyl]amino] -3-oxopropoxy]methyl]-1,12,19,25-tetraoxo-16-oxa-13,20,24-t riazanonacos-1-yl]-4-hydroxy-2-pyrrolidinyl)methyl ester
ggctaatttgtatcaatgatt

SEQ ID NO: 2875 - RNA, 23 nt, synthetic construct
  source 1..23: mol_type = other RNA
  modified_base 1: mod_base = OTHER; note = 2'-O-methyladenosine-3'-phosphorothioate
  modified_base 2: mod_base = OTHER; note = 2'-deoxy-2'-fluoroadenosine-3'-phosphorothioate
  modified_base 3: mod_base = OTHER; note = 2'-O-methyluridine-3'-phosphate
  modified_base 4: mod_base = OTHER; note = 2'-O-methylcytidine-3'-phosphate
  modified_base 5: mod_base = OTHER; note = 2'-O-methyladenosine-3'-phosphate
  modified_base 6: mod_base = OTHER; note = 2'-deoxy-2'-fluorouridine-3'-phosphate
  modified_base 7: mod_base = OTHER; note = 2'-O-methyluridine-3'-phosphate
  modified_base 8: mod_base = OTHER; note = 2'-deoxy-2'-fluoroguanosine-3'-phosphate
  modified_base 9: mod_base = OTHER; note = 2'-deoxy-2'-fluoroadenosine-3'-phosphate
  modified_base 10: mod_base = OTHER; note = 2'-O-methyluridine-3'-phosphate
  modified_base 11: mod_base = OTHER; note = 2'-O-methyladenosine-3'-phosphate
  modified_base 12: mod_base = OTHER; note = 2'-O-methylcytidine-3'-phosphate
  modified_base 13: mod_base = OTHER; note = 2'-O-methyladenosine-3'-phosphate
  modified_base 14: mod_base = OTHER; note = 2'-deoxy-2'-fluoroadenosine-3'-phosphate
  modified_base 15: mod_base = OTHER; note = 2'-O-methyladenosine-3'-phosphate
  modified_base 16: mod_base = OTHER; note = 2'-deoxy-2'-fluorouridine-3'-phosphate
  modified_base 17: mod_base = OTHER; note = 2'-O-methyluridine-3'-phosphate
  modified_base 18: mod_base = OTHER; note = 2'-O-methyladenosine-3'-phosphate
  modified_base 19: mod_base = OTHER; note = 2'-O-methylguanosine-3'-phosphate
  modified_base 20: mod_base = OTHER; note = 2'-O-methylcytidine-3'-phosphate
  modified_base 21: mod_base = OTHER; note = 2'-O-methylcytidine-3'-phosphorothioate
  modified_base 22: mod_base = OTHER; note = 2'-O-methylguanosine-3'-phosphorothioate
  modified_base 23: mod_base = OTHER; note = 2'-O-methylguanosine
aatcattgatacaaattagccgg

SEQ ID NO: 2876 - RNA, 21 nt, synthetic construct
  source 1..21: mol_type = other RNA
  modified_base 1: mod_base = OTHER; note = 2'-O-methylguanosine-3'-phosphorothioate
  modified_base 2: mod_base = OTHER; note = 2'-O-methylcytidine-3'-phosphorothioate
  modified_base 3: mod_base = OTHER; note = 2'-O-methyluridine-3'-phosphate
  modified_base 4: mod_base = OTHER; note = 2'-O-methyladenosine-3'-phosphate
  modified_base 5: mod_base = OTHER; note = 2'-O-methyladenosine-3'-phosphate
  modified_base 6: mod_base = OTHER; note = 2'-O-methyluridine-3'-phosphate
  modified_base 7: mod_base = OTHER; note = 2'-deoxy-2'-fluorouridine-3'-phosphate
  modified_base 8: mod_base = OTHER; note = 2'-O-methyluridine-3'-phosphate
  modified_base 9: mod_base = OTHER; note = 2'-deoxy-2'-fluoroguanosine-3'-phosphate
  modified_base 10: mod_base = OTHER; note = 2'-deoxy-2'-fluorouridine-3'-phosphate
  modified_base 11: mod_base = OTHER; note = 2'-deoxy-2'-fluoroadenosine-3'-phosphate
  modified_base 12: mod_base = OTHER; note = 2'-O-methyluridine-3'-phosphate
  modified_base 13: mod_base = OTHER; note = 2'-O-methylcytidine-3'-phosphate
  modified_base 14: mod_base = OTHER; note = 2'-O-methyladenosine-3'-phosphate
  modified_base 15: mod_base = OTHER; note = 2'-O-methyladenosine-3'-phosphate
  modified_base 16: mod_base = OTHER; note = 2'-O-methyluridine-3'-phosphate
  modified_base 17: mod_base = OTHER; note = 2'-O-methylguanosine-3'-phosphate
  modified_base 18: mod_base = OTHER; note = 2'-O-methyladenosine-3'-phosphate
  modified_base 19: mod_base = OTHER; note = 2'-O-methyluridine-3'-phosphate
  modified_base 20: mod_base = OTHER; note = 2'-O-methyluridine-3'-phosphate
  modified_base 21: mod_base = OTHER; note = 2'-O-methyladenosine-3'-phosphate ((2S,4R)-1-[29-[[2-(acetylamino)-2-deoxy-beta-D-galactopyra nosyl]oxy]-14,14-bis[[3-[[3-[[5-[[2-(acetylamino)-2-deoxy-b eta-D-galactopyranosyl]oxy]-1-oxopentyl]amino]propyl]amino] -3-oxopropoxy]methyl]-1,12,19,25-tetraoxo-16-oxa-13,20,24-t riazanonacos-1-yl]-4-hydroxy-2-pyrrolidinyl)methyl ester
gctaatttgtatcaatgatta

SEQ ID NO: 2877 - RNA, 23 nt, synthetic construct
  source 1..23: mol_type = other RNA
  modified_base 1: mod_base = OTHER; note = 2'-O-methyluridine-3'-phosphorothioate
  modified_base 2: mod_base = OTHER; note = 2'-deoxy-2'-fluoroadenosine-3'-phosphorothioate
  modified_base 3: mod_base = OTHER; note = 2'-O-methyladenosine-3'-phosphate
  modified_base 4: mod_base = OTHER; note = 2'-O-methyluridine-3'-phosphate
  modified_base 5: mod_base = OTHER; note = 2'-O-methylcytidine-3'-phosphate
  modified_base 6: mod_base = OTHER; note = 2'-deoxy-2'-fluoroadenosine-3'-phosphate
  modified_base 7: mod_base = OTHER; note = 2'-O-methyluridine-3'-phosphate
  modified_base 8: mod_base = OTHER; note = 2'-deoxy-2'-fluorouridine-3'-phosphate
  modified_base 9: mod_base = OTHER; note = 2'-deoxy-2'-fluoroguanosine-3'-phosphate
  modified_base 10: mod_base = OTHER; note = 2'-O-methyladenosine-3'-phosphate
  modified_base 11: mod_base = OTHER; note = 2'-O-methyluridine-3'-phosphate
  modified_base 12: mod_base = OTHER; note = 2'-O-methyladenosine-3'-phosphate
  modified_base 13: mod_base = OTHER; note = 2'-O-methylcytidine-3'-phosphate
  modified_base 14: mod_base = OTHER; note = 2'-deoxy-2'-fluoroadenosine-3'-phosphate
  modified_base 15: mod_base = OTHER; note = 2'-O-methyladenosine-3'-phosphate
  modified_base 16: mod_base = OTHER; note = 2'-deoxy-2'-fluoroadenosine-3'-phosphate
  modified_base 17: mod_base = OTHER; note = 2'-O-methyluridine-3'-phosphate
  modified_base 18: mod_base = OTHER; note = 2'-O-methyluridine-3'-phosphate
  modified_base 19: mod_base = OTHER; note = 2'-O-methyladenosine-3'-phosphate
  modified_base 20: mod_base = OTHER; note = 2'-O-methylguanosine-3'-phosphate
  modified_base 21: mod_base = OTHER; note = 2'-O-methylcytidine-3'-phosphorothioate
  modified_base 22: mod_base = OTHER; note = 2'-O-methylcytidine-3'-phosphorothioate
  modified_base 23: mod_base = OTHER; note = 2'-O-methylguanosine
taatcattgatacaaattagccg

SEQ ID NO: 2878 - RNA, 21 nt, synthetic construct
  source 1..21: mol_type = other RNA
  modified_base 1: mod_base = OTHER; note = 2'-O-methylcytidine-3'-phosphorothioate
  modified_base 2: mod_base = OTHER; note = 2'-O-methylcytidine-3'-phosphorothioate
  modified_base 3: mod_base = OTHER; note = 2'-O-methylcytidine-3'-phosphate
  modified_base 4: mod_base = OTHER; note = 2'-O-methylcytidine-3'-phosphate
  modified_base 5: mod_base = OTHER; note = 2'-O-methylguanosine-3'-phosphate
  modified_base 6: mod_base = OTHER; note = 2'-O-methylguanosine-3'-phosphate
  modified_base 7: mod_base = OTHER; note = 2'-deoxy-2'-fluorocytidine-3'-phosphate
  modified_base 8: mod_base = OTHER; note = 2'-O-methyluridine-3'-phosphate
  modified_base 9: mod_base = OTHER; note = 2'-deoxy-2'-fluoroadenosine-3'-phosphate
  modified_base 10: mod_base = OTHER; note = 2'-deoxy-2'-fluoroadenosine-3'-phosphate
  modified_base 11: mod_base = OTHER; note = 2'-deoxy-2'-fluorouridine-3'-phosphate
  modified_base 12: mod_base = OTHER; note = 2'-O-methyluridine-3'-phosphate
  modified_base 13: mod_base = OTHER; note = 2'-O-methyluridine-3'-phosphate
  modified_base 14: mod_base = OTHER; note = 2'-O-methylguanosine-3'-phosphate
  modified_base 15: mod_base = OTHER; note = 2'-O-methyluridine-3'-phosphate
  modified_base 16: mod_base = OTHER; note = 2'-O-methyladenosine-3'-phosphate
  modified_base 17: mod_base = OTHER; note = 2'-O-methyluridine-3'-phosphate
  modified_base 18: mod_base = OTHER; note = 2'-O-methylcytidine-3'-phosphate
  modified_base 19: mod_base = OTHER; note = 2'-O-methyladenosine-3'-phosphate
  modified_base 20: mod_base = OTHER; note = 2'-O-methyladenosine-3'-phosphate
  modified_base 21: mod_base = OTHER; note = 2'-O-methyluridine-3'-phosphate ((2S,4R)-1-[29-[[2-(acetylamino)-2-deoxy-beta-D-galactopyra nosyl]oxy]-14,14-bis[[3-[[3-[[5-[[2-(acetylamino)-2-deoxy-b eta-D-galactopyranosyl]oxy]-1-oxopentyl]amino]propyl]amino] -3-oxopropoxy]methyl]-1,12,19,25-tetraoxo-16-oxa-13,20,24-t riazanonacos-1-yl]-4-hydroxy-2-pyrrolidinyl)methyl ester
ccccggctaatttgtatcaat

SEQ ID NO: 2879 - RNA, 23 nt, synthetic construct
  source 1..23: mol_type = other RNA
  modified_base 1: mod_base = OTHER; note = 2'-O-methyladenosine-3'-phosphorothioate
  modified_base 2: mod_base = OTHER; note = 2'-deoxy-2'-fluorouridine-3'-phosphorothioate
  modified_base 3: mod_base = OTHER; note = 2'-O-methyluridine-3'-phosphate
  modified_base 4: mod_base = OTHER; note = 2'-O-methylguanosine-3'-phosphate
  modified_base 5: mod_base = OTHER; note = 2'-O-methyladenosine-3'-phosphate
  modified_base 6: mod_base = OTHER; note = 2'-deoxy-2'-fluorouridine-3'-phosphate
  modified_base 7: mod_base = OTHER; note = 2'-O-methyladenosine-3'-phosphate
  modified_base 8: mod_base = OTHER; note = 2'-deoxy-2'-fluorocytidine-3'-phosphate
  modified_base 9: mod_base = OTHER; note = 2'-deoxy-2'-fluoroadenosine-3'-phosphate
  modified_base 10: mod_base = OTHER; note = 2'-O-methyladenosine-3'-phosphate
  modified_base 11: mod_base = OTHER; note = 2'-O-methyladenosine-3'-phosphate
  modified_base 12: mod_base = OTHER; note = 2'-O-methyluridine-3'-phosphate
  modified_base 13: mod_base = OTHER; note = 2'-O-methyluridine-3'-phosphate
  modified_base 14: mod_base = OTHER; note = 2'-deoxy-2'-fluoroadenosine-3'-phosphate
  modified_base 15: mod_base = OTHER; note = 2'-O-methylguanosine-3'-phosphate
  modified_base 16: mod_base = OTHER; note = 2'-deoxy-2'-fluorocytidine-3'-phosphate
  modified_base 17: mod_base = OTHER; note = 2'-O-methylcytidine-3'-phosphate
  modified_base 18: mod_base = OTHER; note = 2'-O-methylguanosine-3'-phosphate
  modified_base 19: mod_base = OTHER; note = 2'-O-methylguanosine-3'-phosphate
  modified_base 20: mod_base = OTHER; note = 2'-O-methylguanosine-3'-phosphate
  modified_base 21: mod_base = OTHER; note = 2'-O-methylguanosine-3'-phosphorothioate
  modified_base 22: mod_base = OTHER; note = 2'-O-methylguanosine-3'-phosphorothioate
  modified_base 23: mod_base = OTHER; note = 2'-O-methyladenosine
attgatacaaattagccggggga

SEQ ID NO: 2880 - RNA, 21 nt, synthetic construct
  source 1..21: mol_type = other RNA
  modified_base 1: mod_base = OTHER; note = 2'-O-methylcytidine-3'-phosphorothioate
  modified_base 2: mod_base = OTHER; note = 2'-O-methylcytidine-3'-phosphorothioate
  modified_base 3: mod_base = OTHER; note = 2'-O-methylcytidine-3'-phosphate
  modified_base 4: mod_base = OTHER; note = 2'-O-methylcytidine-3'-phosphate
  modified_base 5: mod_base = OTHER; note = 2'-O-methylcytidine-3'-phosphate
  modified_base 6: mod_base = OTHER; note = 2'-O-methylguanosine-3'-phosphate
  modified_base 7: mod_base = OTHER; note = 2'-deoxy-2'-fluoroguanosine-3'-phosphate
  modified_base 8: mod_base = OTHER; note = 2'-O-methylcytidine-3'-phosphate
  modified_base 9: mod_base = OTHER; note = 2'-deoxy-2'-fluorouridine-3'-phosphate
  modified_base 10: mod_base = OTHER; note = 2'-deoxy-2'-fluoroadenosine-3'-phosphate
  modified_base 11: mod_base = OTHER; note = 2'-deoxy-2'-fluoroadenosine-3'-phosphate
  modified_base 12: mod_base = OTHER; note = 2'-O-methyluridine-3'-phosphate
  modified_base 13: mod_base = OTHER; note = 2'-O-methyluridine-3'-phosphate
  modified_base 14: mod_base = OTHER; note = 2'-O-methyluridine-3'-phosphate
  modified_base 15: mod_base = OTHER; note = 2'-O-methylguanosine-3'-phosphate
  modified_base 16: mod_base = OTHER; note = 2'-O-methyluridine-3'-phosphate
  modified_base 17: mod_base = OTHER; note = 2'-O-methyladenosine-3'-phosphate
  modified_base 18: mod_base = OTHER; note = 2'-O-methyluridine-3'-phosphate
  modified_base 19: mod_base = OTHER; note = 2'-O-methylcytidine-3'-phosphate
  modified_base 20: mod_base = OTHER; note = 2'-O-methyladenosine-3'-phosphate
  modified_base 21: mod_base = OTHER; note = 2'-O-methyladenosine-3'-phosphate ((2S,4R)-1-[29-[[2-(acetylamino)-2-deoxy-beta-D-galactopyra nosyl]oxy]-14,14-bis[[3-[[3-[[5-[[2-(acetylamino)-2-deoxy-b eta-D-galactopyranosyl]oxy]-1-oxopentyl]amino]propyl]amino] -3-oxopropoxy]methyl]-1,12,19,25-tetraoxo-16-oxa-13,20,24-t riazanonacos-1-yl]-4-hydroxy-2-pyrrolidinyl)methyl ester
cccccggctaatttgtatcaa

SEQ ID NO: 2881 - RNA, 23 nt, synthetic construct
  source 1..23: mol_type = other RNA
  modified_base 1: mod_base = OTHER; note = 2'-O-methyluridine-3'-phosphorothioate
  modified_base 2: mod_base = OTHER; note = 2'-deoxy-2'-fluorouridine-3'-phosphorothioate
  modified_base 3: mod_base = OTHER; note = 2'-O-methylguanosine-3'-phosphate
  modified_base 4: mod_base = OTHER; note = 2'-O-methyladenosine-3'-phosphate
  modified_base 5: mod_base = OTHER; note = 2'-O-methyluridine-3'-phosphate
  modified_base 6: mod_base = OTHER; note = 2'-deoxy-2'-fluoroadenosine-3'-phosphate
  modified_base 7: mod_base = OTHER; note = 2'-O-methylcytidine-3'-phosphate
  modified_base 8: mod_base = OTHER; note = 2'-deoxy-2'-fluoroadenosine-3'-phosphate
  modified_base 9: mod_base = OTHER; note = 2'-deoxy-2'-fluoroadenosine-3'-phosphate
  modified_base 10: mod_base = OTHER; note = 2'-O-methyladenosine-3'-phosphate
  modified_base 11: mod_base = OTHER; note = 2'-O-methyluridine-3'-phosphate
  modified_base 12: mod_base = OTHER; note = 2'-O-methyluridine-3'-phosphate
  modified_base 13: mod_base = OTHER; note = 2'-O-methyladenosine-3'-phosphate
  modified_base 14: mod_base = OTHER; note = 2'-deoxy-2'-fluoroguanosine-3'-phosphate
  modified_base 15: mod_base = OTHER; note = 2'-O-methylcytidine-3'-phosphate
  modified_base 16: mod_base = OTHER; note = 2'-deoxy-2'-fluorocytidine-3'-phosphate
  modified_base 17: mod_base = OTHER; note = 2'-O-methylguanosine-3'-phosphate
  modified_base 18: mod_base = OTHER; note = 2'-O-methylguanosine-3'-phosphate
  modified_base 19: mod_base = OTHER; note = 2'-O-methylguanosine-3'-phosphate
  modified_base 20: mod_base = OTHER; note = 2'-O-methylguanosine-3'-phosphate
  modified_base 21: mod_base = OTHER; note = 2'-O-methylguanosine-3'-phosphorothioate
  modified_base 22: mod_base = OTHER; note = 2'-O-methyladenosine-3'-phosphorothioate
  modified_base 23: mod_base = OTHER; note = 2'-O-methylguanosine
ttgatacaaattagccgggggag

SEQ ID NO: 2882 - RNA, 21 nt, synthetic construct
  source 1..21: mol_type = other RNA
  modified_base 1: mod_base = OTHER; note = 2'-O-methyluridine-3'-phosphorothioate
  modified_base 2: mod_base = OTHER; note = 2'-O-methylguanosine-3'-phosphorothioate
  modified_base 3: mod_base = OTHER; note = 2'-O-methyluridine-3'-phosphate
  modified_base 4: mod_base = OTHER; note = 2'-O-methylcytidine-3'-phosphate
  modified_base 5: mod_base = OTHER; note = 2'-O-methylguanosine-3'-phosphate
  modified_base 6: mod_base = OTHER; note = 2'-O-methyladenosine-3'-phosphate
  modified_base 7: mod_base = OTHER; note = 2'-deoxy-2'-fluorocytidine-3'-phosphate
  modified_base 8: mod_base = OTHER; note = 2'-O-methyluridine-3'-phosphate
  modified_base 9: mod_base = OTHER; note = 2'-deoxy-2'-fluorouridine-3'-phosphate
  modified_base 10: mod_base = OTHER; note = 2'-deoxy-2'-fluorocytidine-3'-phosphate
  modified_base 11: mod_base = OTHER; note = 2'-deoxy-2'-fluorouridine-3'-phosphate
  modified_base 12: mod_base = OTHER; note = 2'-O-methylguanosine-3'-phosphate
  modified_base 13: mod_base = OTHER; note = 2'-O-methyluridine-3'-phosphate
  modified_base 14: mod_base = OTHER; note = 2'-O-methyluridine-3'-phosphate
  modified_base 15: mod_base = OTHER; note = 2'-O-methyluridine-3'-phosphate
  modified_base 16: mod_base = OTHER; note = 2'-O-methyluridine-3'-phosphate
  modified_base 17: mod_base = OTHER; note = 2'-O-methyladenosine-3'-phosphate
  modified_base 18: mod_base = OTHER; note = 2'-O-methylguanosine-3'-phosphate
  modified_base 19: mod_base = OTHER; note = 2'-O-methylguanosine-3'-phosphate
  modified_base 20: mod_base = OTHER; note = 2'-O-methyladenosine-3'-phosphate
  modified_base 21: mod_base = OTHER; note = 2'-O-methylcytidine-3'-phosphate ((2S,4R)-1-[29-[[2-(acetylamino)-2-deoxy-beta-D-galactopyra nosyl]oxy]-14,14-bis[[3-[[3-[[5-[[2-(acetylamino)-2-deoxy-b eta-D-galactopyranosyl]oxy]-1-oxopentyl]amino]propyl]amino] -3-oxopropoxy]methyl]-1,12,19,25-tetraoxo-16-oxa-13,20,24-t riazanonacos-1-yl]-4-hydroxy-2-pyrrolidinyl)methyl ester
tgtcgacttctgttttaggac

SEQ ID NO: 2883 - RNA, 23 nt, synthetic construct
  source 1..23: mol_type = other RNA
  modified_base 1: mod_base = OTHER; note = 2'-O-methylguanosine-3'-phosphorothioate
  modified_base 2: mod_base = OTHER; note = 2'-deoxy-2'-fluorouridine-3'-phosphorothioate
  modified_base 3: mod_base = OTHER; note = 2'-O-methylcytidine-3'-phosphate
  modified_base 4: mod_base = OTHER; note = 2'-O-methylcytidine-3'-phosphate
  modified_base 5: mod_base = OTHER; note = 2'-O-methyluridine-3'-phosphate
  modified_base 6: mod_base = OTHER; note = 2'-deoxy-2'-fluoroadenosine-3'-phosphate
  modified_base 7: mod_base = OTHER; note = 2'-O-methyladenosine-3'-phosphate
  modified_base 8: mod_base = OTHER; note = 2'-deoxy-2'-fluoroadenosine-3'-phosphate
  modified_base 9: mod_base = OTHER; note = 2'-deoxy-2'-fluoroadenosine-3'-phosphate
  modified_base 10: mod_base = OTHER; note = 2'-O-methylcytidine-3'-phosphate
  modified_base 11: mod_base = OTHER; note = 2'-O-methyladenosine-3'-phosphate
  modified_base 12: mod_base = OTHER; note = 2'-O-methylguanosine-3'-phosphate
  modified_base 13: mod_base = OTHER; note = 2'-O-methyladenosine-3'-phosphate
  modified_base 14: mod_base = OTHER; note = 2'-deoxy-2'-fluoroadenosine-3'-phosphate
  modified_base 15: mod_base = OTHER; note = 2'-O-methylguanosine-3'-phosphate
  modified_base 16: mod_base = OTHER; note = 2'-deoxy-2'-fluorouridine-3'-phosphate
  modified_base 17: mod_base = OTHER; note = 2'-O-methylcytidine-3'-phosphate
  modified_base 18: mod_base = OTHER; note = 2'-O-methylguanosine-3'-phosphate
  modified_base 19: mod_base = OTHER; note = 2'-O-methyladenosine-3'-phosphate
  modified_base 20: mod_base = OTHER; note = 2'-O-methylcytidine-3'-phosphate
  modified_base 21: mod_base = OTHER; note = 2'-O-methyladenosine-3'-phosphorothioate
  modified_base 22: mod_base = OTHER; note = 2'-O-methylguanosine-3'-phosphorothioate
  modified_base 23: mod_base = OTHER; note = 2'-O-methyladenosine
gtcctaaaacagaagtcgacaga

SEQ ID NO: 2884 - RNA, 21 nt, synthetic construct
  source 1..21: mol_type = other RNA
  modified_base 1: mod_base = OTHER; note = 2'-O-methylguanosine-3'-phosphorothioate
  modified_base 2: mod_base = OTHER; note = 2'-O-methyluridine-3'-phosphorothioate
  modified_base 3: mod_base = OTHER; note = 2'-O-methylcytidine-3'-phosphate
  modified_base 4: mod_base = OTHER; note = 2'-O-methylguanosine-3'-phosphate
  modified_base 5: mod_base = OTHER; note = 2'-O-methyladenosine-3'-phosphate
  modified_base 6: mod_base = OTHER; note = 2'-O-methylcytidine-3'-phosphate
  modified_base 7: mod_base = OTHER; note = 2'-deoxy-2'-fluorouridine-3'-phosphate
  modified_base 8: mod_base = OTHER; note = 2'-O-methyluridine-3'-phosphate
  modified_base 9: mod_base = OTHER; note = 2'-deoxy-2'-fluorocytidine-3'-phosphate
  modified_base 10: mod_base = OTHER; note = 2'-deoxy-2'-fluorouridine-3'-phosphate
  modified_base 11: mod_base = OTHER; note = 2'-deoxy-2'-fluoroguanosine-3'-phosphate
  modified_base 12: mod_base = OTHER; note = 2'-O-methyluridine-3'-phosphate
  modified_base 13: mod_base = OTHER; note = 2'-O-methyluridine-3'-phosphate
  modified_base 14: mod_base = OTHER; note = 2'-O-methyluridine-3'-phosphate
  modified_base 15: mod_base = OTHER; note = 2'-O-methyluridine-3'-phosphate
  modified_base 16: mod_base = OTHER; note = 2'-O-methyladenosine-3'-phosphate
  modified_base 17: mod_base = OTHER; note = 2'-O-methylguanosine-3'-phosphate
  modified_base 18: mod_base = OTHER; note = 2'-O-methylguanosine-3'-phosphate
  modified_base 19: mod_base = OTHER; note = 2'-O-methyladenosine-3'-phosphate
  modified_base 20: mod_base = OTHER; note = 2'-O-methylcytidine-3'-phosphate
  modified_base 21: mod_base = OTHER; note = 2'-O-methyladenosine-3'-phosphate ((2S,4R)-1-[29-[[2-(acetylamino)-2-deoxy-beta-D-galactopyra nosyl]oxy]-14,14-bis[[3-[[3-[[5-[[2-(acetylamino)-2-deoxy-b eta-D-galactopyranosyl]oxy]-1-oxopentyl]amino]propyl]amino] -3-oxopropoxy]methyl]-1,12,19,25-tetraoxo-16-oxa-13,20,24-t riazanonacos-1-yl]-4-hydroxy-2-pyrrolidinyl)methyl ester
gtcgacttctgttttaggaca

SEQ ID NO: 2885 - RNA, 23 nt, synthetic construct
  source 1..23: mol_type = other RNA
  modified_base 1: mod_base = OTHER; note = 2'-O-methyluridine-3'-phosphorothioate
  modified_base 2: mod_base = OTHER; note = 2'-deoxy-2'-fluoroguanosine-3'-phosphorothioate
  modified_base 3: mod_base = OTHER; note = 2'-O-methyluridine-3'-phosphate
  modified_base 4: mod_base = OTHER; note = 2'-O-methylcytidine-3'-phosphate
  modified_base 5: mod_base = OTHER; note = 2'-O-methylcytidine-3'-phosphate
  modified_base 6: mod_base = OTHER; note = 2'-deoxy-2'-fluorouridine-3'-phosphate
  modified_base 7: mod_base = OTHER; note = 2'-O-methyladenosine-3'-phosphate
  modified_base 8: mod_base = OTHER; note = 2'-deoxy-2'-fluoroadenosine-3'-phosphate
  modified_base 9: mod_base = OTHER; note = 2'-deoxy-2'-fluoroadenosine-3'-phosphate
  modified_base 10: mod_base = OTHER; note = 2'-O-methyladenosine-3'-phosphate
  modified_base 11: mod_base = OTHER; note = 2'-O-methylcytidine-3'-phosphate
  modified_base 12: mod_base = OTHER; note = 2'-O-methyladenosine-3'-phosphate
  modified_base 13: mod_base = OTHER; note = 2'-O-methylguanosine-3'-phosphate
  modified_base 14: mod_base = OTHER; note = 2'-deoxy-2'-fluoroadenosine-3'-phosphate
  modified_base 15: mod_base = OTHER; note = 2'-O-methyladenosine-3'-phosphate
  modified_base 16: mod_base = OTHER; note = 2'-deoxy-2'-fluoroguanosine-3'-phosphate
  modified_base 17: mod_base = OTHER; note = 2'-O-methyluridine-3'-phosphate
  modified_base 18: mod_base = OTHER; note = 2'-O-methylcytidine-3'-phosphate
  modified_base 19: mod_base = OTHER; note = 2'-O-methylguanosine-3'-phosphate
  modified_base 20: mod_base = OTHER; note = 2'-O-methyladenosine-3'-phosphate
  modified_base 21: mod_base = OTHER; note = 2'-O-methylcytidine-3'-phosphorothioate
  modified_base 22: mod_base = OTHER; note = 2'-O-methyladenosine-3'-phosphorothioate
  modified_base 23: mod_base = OTHER; note = 2'-O-methylguanosine
tgtcctaaaacagaagtcgacag

SEQ ID NO: 2886 - RNA, 21 nt, synthetic construct
  source 1..21: mol_type = other RNA
  modified_base 1: mod_base = OTHER; note = 2'-O-methylguanosine-3'-phosphorothioate
  modified_base 2: mod_base = OTHER; note = 2'-O-methyladenosine-3'-phosphorothioate
  modified_base 3: mod_base = OTHER; note = 2'-O-methyluridine-3'-phosphate
  modified_base 4: mod_base = OTHER; note = 2'-O-methylcytidine-3'-phosphate
  modified_base 5: mod_base = OTHER; note = 2'-O-methyluridine-3'-phosphate
  modified_base 6: mod_base = OTHER; note = 2'-O-methylguanosine-3'-phosphate
  modified_base 7: mod_base = OTHER; note = 2'-deoxy-2'-fluorouridine-3'-phosphate
  modified_base 8: mod_base = OTHER; note = 2'-O-methylcytidine-3'-phosphate
  modified_base 9: mod_base = OTHER; note = 2'-deoxy-2'-fluoroguanosine-3'-phosphate
  modified_base 10: mod_base = OTHER; note = 2'-deoxy-2'-fluoroadenosine-3'-phosphate
  modified_base 11: mod_base = OTHER; note = 2'-deoxy-2'-fluorocytidine-3'-phosphate
  modified_base 12: mod_base = OTHER; note = 2'-O-methyluridine-3'-phosphate
  modified_base 13: mod_base = OTHER; note = 2'-O-methyluridine-3'-phosphate
  modified_base 14: mod_base = OTHER; note = 2'-O-methylcytidine-3'-phosphate
  modified_base 15: mod_base = OTHER; note = 2'-O-methyluridine-3'-phosphate
  modified_base 16: mod_base = OTHER; note = 2'-O-methylguanosine-3'-phosphate
  modified_base 17: mod_base = OTHER; note = 2'-O-methyluridine-3'-phosphate
  modified_base 18: mod_base = OTHER; note = 2'-O-methyluridine-3'-phosphate
  modified_base 19: mod_base = OTHER; note = 2'-O-methyluridine-3'-phosphate
  modified_base 20: mod_base = OTHER; note = 2'-O-methyluridine-3'-phosphate
  modified_base 21: mod_base = OTHER; note = 2'-O-methyladenosine-3'-phosphate ((2S,4R)-1-[29-[[2-(acetylamino)-2-deoxy-beta-D-galactopyra nosyl]oxy]-14,14-bis[[3-[[3-[[5-[[2-(acetylamino)-2-deoxy-b eta-D-galactopyranosyl]oxy]-1-oxopentyl]amino]propyl]amino] -3-oxopropoxy]methyl]-1,12,19,25-tetraoxo-16-oxa-13,20,24-t riazanonacos-1-yl]-4-hydroxy-2-pyrrolidinyl)methyl ester
gatctgtcgacttctgtttta

SEQ ID NO: 2887 - RNA, 23 nt, synthetic construct
  source 1..23: mol_type = other RNA
  modified_base 1: mod_base = OTHER; note = 2'-O-methyluridine-3'-phosphorothioate
  modified_base 2: mod_base = OTHER; note = 2'-deoxy-2'-fluoroadenosine-3'-phosphorothioate
  modified_base 3: mod_base = OTHER; note = 2'-O-methyladenosine-3'-phosphate
  modified_base 4: mod_base = OTHER; note = 2'-O-methyladenosine-3'-phosphate
  modified_base 5: mod_base = OTHER; note = 2'-O-methyladenosine-3'-phosphate
  modified_base 6: mod_base = OTHER; note = 2'-deoxy-2'-fluorocytidine-3'-phosphate
  modified_base 7: mod_base = OTHER; note = 2'-O-methyladenosine-3'-phosphate
  modified_base 8: mod_base = OTHER; note = 2'-deoxy-2'-fluoroguanosine-3'-phosphate
  modified_base 9: mod_base = OTHER; note = 2'-deoxy-2'-fluoroadenosine-3'-phosphate
  modified_base 10: mod_base = OTHER; note = 2'-O-methyladenosine-3'-phosphate
  modified_base 11: mod_base = OTHER; note = 2'-O-methylguanosine-3'-phosphate
  modified_base 12: mod_base = OTHER; note = 2'-O-methyluridine-3'-phosphate
  modified_base 13: mod_base = OTHER; note = 2'-O-methylcytidine-3'-phosphate
  modified_base 14: mod_base = OTHER; note = 2'-deoxy-2'-fluoroguanosine-3'-phosphate
  modified_base 15: mod_base = OTHER; note = 2'-O-methyladenosine-3'-phosphate
  modified_base 16: mod_base = OTHER; note = 2'-deoxy-2'-fluorocytidine-3'-phosphate
  modified_base 17: mod_base = OTHER; note = 2'-O-methyladenosine-3'-phosphate
  modified_base 18: mod_base = OTHER; note = 2'-O-methylguanosine-3'-phosphate
  modified_base 19: mod_base = OTHER; note = 2'-O-methyladenosine-3'-phosphate
  modified_base 20: mod_base = OTHER; note = 2'-O-methyluridine-3'-phosphate
  modified_base 21: mod_base = OTHER; note = 2'-O-methylcytidine-3'-phosphorothioate
  modified_base 22: mod_base = OTHER; note = 2'-O-methyluridine-3'-phosphorothioate
  modified_base 23: mod_base = OTHER; note = 2'-O-methylguanosine
taaaacagaagtcgacagatctg

SEQ ID NO: 2888 - RNA, 21 nt, synthetic construct
  source 1..21: mol_type = other RNA
  modified_base 1: mod_base = OTHER; note = 2'-O-methyladenosine-3'-phosphorothioate
  modified_base 2: mod_base = OTHER; note = 2'-O-methylguanosine-3'-phosphorothioate
  modified_base 3: mod_base = OTHER; note = 2'-O-methyladenosine-3'-phosphate
  modified_base 4: mod_base = OTHER; note = 2'-O-methyluridine-3'-phosphate
  modified_base 5: mod_base = OTHER; note = 2'-O-methylcytidine-3'-phosphate
  modified_base 6: mod_base = OTHER; note = 2'-O-methyluridine-3'-phosphate
  modified_base 7: mod_base = OTHER; note = 2'-deoxy-2'-fluoroguanosine-3'-phosphate
  modified_base 8: mod_base = OTHER; note = 2'-O-methyluridine-3'-phosphate
  modified_base 9: mod_base = OTHER; note = 2'-deoxy-2'-fluorocytidine-3'-phosphate
  modified_base 10: mod_base = OTHER; note = 2'-deoxy-2'-fluoroguanosine-3'-phosphate
  modified_base 11: mod_base = OTHER; note = 2'-deoxy-2'-fluoroadenosine-3'-phosphate
  modified_base 12: mod_base = OTHER; note = 2'-O-methylcytidine-3'-phosphate
  modified_base 13: mod_base = OTHER; note = 2'-O-methyluridine-3'-phosphate
  modified_base 14: mod_base = OTHER; note = 2'-O-methyluridine-3'-phosphate
  modified_base 15: mod_base = OTHER; note = 2'-O-methylcytidine-3'-phosphate
  modified_base 16: mod_base = OTHER; note = 2'-O-methyluridine-3'-phosphate
  modified_base 17: mod_base = OTHER; note = 2'-O-methylguanosine-3'-phosphate
  modified_base 18: mod_base = OTHER; note = 2'-O-methyluridine-3'-phosphate
  modified_base 19: mod_base = OTHER; note = 2'-O-methyluridine-3'-phosphate
  modified_base 20: mod_base = OTHER; note = 2'-O-methyluridine-3'-phosphate
  modified_base 21: mod_base = OTHER; note = 2'-O-methyluridine-3'-phosphate ((2S,4R)-1-[29-[[2-(acetylamino)-2-deoxy-beta-D-galactopyra nosyl]oxy]-14,14-bis[[3-[[3-[[5-[[2-(acetylamino)-2-deoxy-b eta-D-galactopyranosyl]oxy]-1-oxopentyl]amino]propyl]amino] -3-oxopropoxy]methyl]-1,12,19,25-tetraoxo-16-oxa-13,20,24-t riazanonacos-1-yl]-4-hydroxy-2-pyrrolidinyl)methyl ester
agatctgtcgacttctgtttt

SEQ ID NO: 2889 - RNA, 23 nt, synthetic construct
  source 1..23: mol_type = other RNA
  modified_base 1: mod_base = OTHER; note = 2'-O-methyladenosine-3'-phosphorothioate
  modified_base 2: mod_base = OTHER; note = 2'-deoxy-2'-fluoroadenosine-3'-phosphorothioate
  modified_base 3: mod_base = OTHER; note = 2'-O-methyladenosine-3'-phosphate
  modified_base 4: mod_base = OTHER; note = 2'-O-methyladenosine-3'-phosphate
  modified_base 5: mod_base = OTHER; note = 2'-O-methylcytidine-3'-phosphate
  modified_base 6: mod_base = OTHER; note = 2'-deoxy-2'-fluoroadenosine-3'-phosphate
  modified_base 7: mod_base = OTHER; note = 2'-O-methylguanosine-3'-phosphate
  modified_base 8: mod_base = OTHER; note = 2'-deoxy-2'-fluoroadenosine-3'-phosphate
  modified_base 9: mod_base = OTHER; note = 2'-deoxy-2'-fluoroadenosine-3'-phosphate
  modified_base 10: mod_base = OTHER; note = 2'-O-methylguanosine-3'-phosphate
  modified_base 11: mod_base = OTHER; note = 2'-O-methyluridine-3'-phosphate
  modified_base 12: mod_base = OTHER; note = 2'-O-methylcytidine-3'-phosphate
  modified_base 13: mod_base = OTHER; note = 2'-O-methylguanosine-3'-phosphate
  modified_base 14: mod_base = OTHER; note = 2'-deoxy-2'-fluoroadenosine-3'-phosphate
  modified_base 15: mod_base = OTHER; note = 2'-O-methylcytidine-3'-phosphate
  modified_base 16: mod_base = OTHER; note = 2'-deoxy-2'-fluoroadenosine-3'-phosphate
  modified_base 17: mod_base = OTHER; note = 2'-O-methylguanosine-3'-phosphate
  modified_base 18: mod_base = OTHER; note = 2'-O-methyladenosine-3'-phosphate
  modified_base 19: mod_base = OTHER; note = 2'-O-methyluridine-3'-phosphate
  modified_base 20: mod_base = OTHER; note = 2'-O-methylcytidine-3'-phosphate
  modified_base 21: mod_base = OTHER; note = 2'-O-methyluridine-3'-phosphorothioate
  modified_base 22: mod_base = OTHER; note = 2'-O-methylguanosine-3'-phosphorothioate
  modified_base 23: mod_base = OTHER; note = 2'-O-methyluridine
aaaacagaagtcgacagatctgt

SEQ ID NO: 2890 - RNA, 21 nt, synthetic construct
  source 1..21: mol_type = other RNA
  modified_base 1: mod_base = OTHER; note = 2'-O-methylcytidine-3'-phosphorothioate
  modified_base 2: mod_base = OTHER; note = 2'-O-methylcytidine-3'-phosphorothioate
  modified_base 3: mod_base = OTHER; note = 2'-O-methylguanosine-3'-phosphate
  modified_base 4: mod_base = OTHER; note = 2'-O-methyladenosine-3'-phosphate
  modified_base 5: mod_base = OTHER; note = 2'-O-methylguanosine-3'-phosphate
  modified_base 6: mod_base = OTHER; note = 2'-O-methyladenosine-3'-phosphate
  modified_base 7: mod_base = OTHER; note = 2'-deoxy-2'-fluoroadenosine-3'-phosphate
  modified_base 8: mod_base = OTHER; note = 2'-O-methylguanosine-3'-phosphate
  modified_base 9: mod_base = OTHER; note = 2'-deoxy-2'-fluorouridine-3'-phosphate
  modified_base 10: mod_base = OTHER; note = 2'-deoxy-2'-fluorocytidine-3'-phosphate
  modified_base 11: mod_base = OTHER; note = 2'-deoxy-2'-fluoroadenosine-3'-phosphate
  modified_base 12: mod_base = OTHER; note = 2'-O-methylcytidine-3'-phosphate
  modified_base 13: mod_base = OTHER; note = 2'-O-methylcytidine-3'-phosphate
  modified_base 14: mod_base = OTHER; note = 2'-O-methyladenosine-3'-phosphate
  modified_base 15: mod_base = OTHER; note = 2'-O-methyladenosine-3'-phosphate
  modified_base 16: mod_base = OTHER; note = 2'-O-methylguanosine-3'-phosphate
  modified_base 17: mod_base = OTHER; note = 2'-O-methyladenosine-3'-phosphate
  modified_base 18: mod_base = OTHER; note = 2'-O-methyladenosine-3'-phosphate
  modified_base 19: mod_base = OTHER; note = 2'-O-methylguanosine-3'-phosphate
  modified_base 20: mod_base = OTHER; note = 2'-O-methylcytidine-3'-phosphate
  modified_base 21: mod_base = OTHER; note = 2'-O-methyluridine-3'-phosphate ((2S,4R)-1-[29-[[2-(acetylamino)-2-deoxy-beta-D-galactopyra nosyl]oxy]-14,14-bis[[3-[[3-[[5-[[2-(acetylamino)-2-deoxy-b eta-D-galactopyranosyl]oxy]-1-oxopentyl]amino]propyl]amino] -3-oxopropoxy]methyl]-1,12,19,25-tetraoxo-16-oxa-13,20,24-t riazanonacos-1-yl]-4-hydroxy-2-pyrrolidinyl)methyl ester
ccgagaagtcaccaagaagct

SEQ ID NO: 2891 - RNA, 23 nt, synthetic construct
  source 1..23: mol_type = other RNA
  modified_base 1: mod_base = OTHER; note = 2'-O-methyladenosine-3'-phosphorothioate
  modified_base 2: mod_base = OTHER; note = 2'-deoxy-2'-fluoroguanosine-3'-phosphorothioate
  modified_base 3: mod_base = OTHER; note = 2'-O-methylcytidine-3'-phosphate
  modified_base 4: mod_base = OTHER; note = 2'-O-methyluridine-3'-phosphate
  modified_base 5: mod_base = OTHER; note = 2'-O-methyluridine-3'-phosphate
  modified_base 6: mod_base = OTHER; note = 2'-deoxy-2'-fluorocytidine-3'-phosphate
  modified_base 7: mod_base = OTHER; note = 2'-O-methyluridine-3'-phosphate
  modified_base 8: mod_base = OTHER; note = 2'-deoxy-2'-fluorouridine-3'-phosphate
  modified_base 9: mod_base = OTHER; note = 2'-deoxy-2'-fluoroguanosine-3'-phosphate
  modified_base 10: mod_base = OTHER; note = 2'-O-methylguanosine-3'-phosphate
  modified_base 11: mod_base = OTHER; note = 2'-O-methyluridine-3'-phosphate
  modified_base 12: mod_base = OTHER; note = 2'-O-methylguanosine-3'-phosphate
  modified_base 13: mod_base = OTHER; note = 2'-O-methyladenosine-3'-phosphate
  modified_base 14: mod_base = OTHER; note = 2'-deoxy-2'-fluorocytidine-3'-phosphate
  modified_base 15: mod_base = OTHER; note = 2'-O-methyluridine-3'-phosphate
  modified_base 16: mod_base = OTHER; note = 2'-deoxy-2'-fluorouridine-3'-phosphate
  modified_base 17: mod_base = OTHER; note = 2'-O-methylcytidine-3'-phosphate
  modified_base 18: mod_base = OTHER; note = 2'-O-methyluridine-3'-phosphate
  modified_base 19: mod_base = OTHER; note = 2'-O-methylcytidine-3'-phosphate
  modified_base 20: mod_base = OTHER; note = 2'-O-methylguanosine-3'-phosphate
  modified_base 21: mod_base = OTHER; note = 2'-O-methylguanosine-3'-phosphorothioate
  modified_base 22: mod_base = OTHER; note = 2'-O-methyluridine-3'-phosphorothioate
  modified_base 23: mod_base = OTHER; note = 2'-O-methylcytidine
agcttcttggtgacttctcggtc

SEQ ID NO: 2892 - RNA, 21 nt, synthetic construct
  source 1..21: mol_type = other RNA
  modified_base 1: mod_base = OTHER; note = 2'-O-methylcytidine-3'-phosphorothioate
  modified_base 2: mod_base = OTHER; note = 2'-O-methylguanosine-3'-phosphorothioate
  modified_base 3: mod_base = OTHER; note = 2'-O-methyladenosine-3'-phosphate
  modified_base 4: mod_base = OTHER; note = 2'-O-methylguanosine-3'-phosphate
  modified_base 5: mod_base = OTHER; note = 2'-O-methyladenosine-3'-phosphate
  modified_base 6: mod_base = OTHER; note = 2'-O-methyladenosine-3'-phosphate
  modified_base 7: mod_base = OTHER; note = 2'-deoxy-2'-fluoroguanosine-3'-phosphate
  modified_base 8: mod_base = OTHER; note = 2'-O-methyluridine-3'-phosphate
  modified_base 9: mod_base = OTHER; note = 2'-deoxy-2'-fluorocytidine-3'-phosphate
  modified_base 10: mod_base = OTHER; note = 2'-deoxy-2'-fluoroadenosine-3'-phosphate
  modified_base 11: mod_base = OTHER; note = 2'-deoxy-2'-fluorocytidine-3'-phosphate
  modified_base 12: mod_base = OTHER; note = 2'-O-methylcytidine-3'-phosphate
  modified_base 13: mod_base = OTHER; note = 2'-O-methyladenosine-3'-phosphate
  modified_base 14: mod_base = OTHER; note = 2'-O-methyladenosine-3'-phosphate
  modified_base 15: mod_base = OTHER; note = 2'-O-methylguanosine-3'-phosphate
  modified_base 16: mod_base = OTHER; note = 2'-O-methyladenosine-3'-phosphate
  modified_base 17: mod_base = OTHER; note = 2'-O-methyladenosine-3'-phosphate
  modified_base 18: mod_base = OTHER; note = 2'-O-methylguanosine-3'-phosphate
  modified_base 19: mod_base = OTHER; note = 2'-O-methylcytidine-3'-phosphate
  modified_base 20: mod_base = OTHER; note = 2'-O-methyluridine-3'-phosphate
  modified_base 21: mod_base = OTHER; note = 2'-O-methyladenosine-3'-phosphate ((2S,4R)-1-[29-[[2-(acetylamino)-2-deoxy-beta-D-galactopyra nosyl]oxy]-14,14-bis[[3-[[3-[[5-[[2-(acetylamino)-2-deoxy-b eta-D-galactopyranosyl]oxy]-1-oxopentyl]amino]propyl]amino] -3-oxopropoxy]methyl]-1,12,19,25-tetraoxo-16-oxa-13,20,24-t riazanonacos-1-yl]-4-hydroxy-2-pyrrolidinyl)methyl ester
cgagaagtcaccaagaagcta

SEQ ID NO: 2893 - RNA, 23 nt, synthetic construct
  source 1..23: mol_type = other RNA
  modified_base 1: mod_base = OTHER; note = 2'-O-methyluridine-3'-phosphorothioate
  modified_base 2: mod_base = OTHER; note = 2'-deoxy-2'-fluoroadenosine-3'-phosphorothioate
  modified_base 3: mod_base = OTHER; note = 2'-O-methylguanosine-3'-phosphate
  modified_base 4: mod_base = OTHER; note = 2'-O-methylcytidine-3'-phosphate
  modified_base 5: mod_base = OTHER; note = 2'-O-methyluridine-3'-phosphate
  modified_base 6: mod_base = OTHER; note = 2'-deoxy-2'-fluorouridine-3'-phosphate
  modified_base 7: mod_base = OTHER; note = 2'-O-methylcytidine-3'-phosphate
  modified_base 8: mod_base = OTHER; note = 2'-deoxy-2'-fluorouridine-3'-phosphate
  modified_base 9: mod_base = OTHER; note = 2'-deoxy-2'-fluorouridine-3'-phosphate
  modified_base 10: mod_base = OTHER; note = 2'-O-methylguanosine-3'-phosphate
  modified_base 11: mod_base = OTHER; note = 2'-O-methylguanosine-3'-phosphate
  modified_base 12: mod_base = OTHER; note = 2'-O-methyluridine-3'-phosphate
  modified_base 13: mod_base = OTHER; note = 2'-O-methylguanosine-3'-phosphate
  modified_base 14: mod_base = OTHER; note = 2'-deoxy-2'-fluoroadenosine-3'-phosphate
  modified_base 15: mod_base = OTHER; note = 2'-O-methylcytidine-3'-phosphate
  modified_base 16: mod_base = OTHER; note = 2'-deoxy-2'-fluorouridine-3'-phosphate
  modified_base 17: mod_base = OTHER; note = 2'-O-methyluridine-3'-phosphate
  modified_base 18: mod_base = OTHER; note = 2'-O-methylcytidine-3'-phosphate
  modified_base 19: mod_base = OTHER; note = 2'-O-methyluridine-3'-phosphate
  modified_base 20: mod_base = OTHER; note = 2'-O-methylcytidine-3'-phosphate
  modified_base 21: mod_base = OTHER; note = 2'-O-methylguanosine-3'-phosphorothioate
  modified_base 22: mod_base = OTHER; note = 2'-O-methylguanosine-3'-phosphorothioate
  modified_base 23: mod_base = OTHER; note = 2'-O-methyluridine
tagcttcttggtgacttctcggt

SEQ ID NO: 2894 - RNA, 21 nt, synthetic construct
  source 1..21: mol_type = other RNA
  modified_base 1: mod_base = OTHER; note = 2'-O-methyladenosine-3'-phosphorothioate
  modified_base 2: mod_base = OTHER; note = 2'-O-methylguanosine-3'-phosphorothioate
  modified_base 3: mod_base = OTHER; note = 2'-O-methylguanosine-3'-phosphate
  modified_base 4: mod_base = OTHER; note = 2'-O-methyladenosine-3'-phosphate
  modified_base 5: mod_base = OTHER; note = 2'-O-methylcytidine-3'-phosphate
  modified_base 6: mod_base = OTHER; note = 2'-O-methylcytidine-3'-phosphate
  modified_base 7: mod_base = OTHER; note = 2'-deoxy-2'-fluoroguanosine-3'-phosphate
  modified_base 8: mod_base = OTHER; note = 2'-O-methyladenosine-3'-phosphate
  modified_base 9: mod_base = OTHER; note = 2'-deoxy-2'-fluoroguanosine-3'-phosphate
  modified_base 10: mod_base = OTHER; note = 2'-deoxy-2'-fluoroadenosine-3'-phosphate
  modified_base 11: mod_base = OTHER; note = 2'-deoxy-2'-fluoroadenosine-3'-phosphate
  modified_base 12: mod_base = OTHER; note = 2'-O-methylguanosine-3'-phosphate
  modified_base 13: mod_base = OTHER; note = 2'-O-methyluridine-3'-phosphate
  modified_base 14: mod_base = OTHER; note = 2'-O-methylcytidine-3'-phosphate
  modified_base 15: mod_base = OTHER; note = 2'-O-methyladenosine-3'-phosphate
  modified_base 16: mod_base = OTHER; note = 2'-O-methylcytidine-3'-phosphate
  modified_base 17: mod_base = OTHER; note = 2'-O-methylcytidine-3'-phosphate
  modified_base 18: mod_base = OTHER; note = 2'-O-methyladenosine-3'-phosphate
  modified_base 19: mod_base = OTHER; note = 2'-O-methyladenosine-3'-phosphate
  modified_base 20: mod_base = OTHER; note = 2'-O-methylguanosine-3'-phosphate
  modified_base 21: mod_base = OTHER; note = 2'-O-methyladenosine-3'-phosphate ((2S,4R)-1-[29-[[2-(acetylamino)-2-deoxy-beta-D-galactopyra nosyl]oxy]-14,14-bis[[3-[[3-[[5-[[2-(acetylamino)-2-deoxy-b eta-D-galactopyranosyl]oxy]-1-oxopentyl]amino]propyl]amino] -3-oxopropoxy]methyl]-1,12,19,25-tetraoxo-16-oxa-13,20,24-t riazanonacos-1-yl]-4-hydroxy-2-pyrrolidinyl)methyl ester
aggaccgagaagtcaccaaga

SEQ ID NO: 2895 - RNA, 23 nt, synthetic construct
  source 1..23: mol_type = other RNA
  modified_base 1: mod_base = OTHER; note = 2'-O-methyluridine-3'-phosphorothioate
  modified_base 2: mod_base = OTHER; note = 2'-deoxy-2'-fluorocytidine-3'-phosphorothioate
  modified_base 3: mod_base = OTHER; note = 2'-O-methyluridine-3'-phosphate
  modified_base 4: mod_base = OTHER; note = 2'-O-methyluridine-3'-phosphate
  modified_base 5: mod_base = OTHER; note = 2'-O-methylguanosine-3'-phosphate
  modified_base 6: mod_base = OTHER; note = 2'-deoxy-2'-fluoroguanosine-3'-phosphate
  modified_base 7: mod_base = OTHER; note = 2'-O-methyluridine-3'-phosphate
  modified_base 8: mod_base = OTHER; note = 2'-deoxy-2'-fluoroguanosine-3'-phosphate
  modified_base 9: mod_base = OTHER; note = 2'-deoxy-2'-fluoroadenosine-3'-phosphate
  modified_base 10: mod_base = OTHER; note = 2'-O-methylcytidine-3'-phosphate
  modified_base 11: mod_base = OTHER; note = 2'-O-methyluridine-3'-phosphate
  modified_base 12: mod_base = OTHER; note = 2'-O-methyluridine-3'-phosphate
  modified_base 13: mod_base = OTHER; note = 2'-O-methylcytidine-3'-phosphate
  modified_base 14: mod_base = OTHER; note = 2'-deoxy-2'-fluorouridine-3'-phosphate
  modified_base 15: mod_base = OTHER; note = 2'-O-methylcytidine-3'-phosphate
  modified_base 16: mod_base = OTHER; note = 2'-deoxy-2'-fluoroguanosine-3'-phosphate
  modified_base 17: mod_base = OTHER; note = 2'-O-methylguanosine-3'-phosphate
  modified_base 18: mod_base = OTHER; note = 2'-O-methyluridine-3'-phosphate
  modified_base 19: mod_base = OTHER; note = 2'-O-methylcytidine-3'-phosphate
  modified_base 20: mod_base = OTHER; note = 2'-O-methylcytidine-3'-phosphate
  modified_base 21: mod_base = OTHER; note = 2'-O-methyluridine-3'-phosphorothioate
  modified_base 22: mod_base = OTHER; note = 2'-O-methyluridine-3'-phosphorothioate
  modified_base 23: mod_base = OTHER; note = 2'-O-methylguanosine
tcttggtgacttctcggtccttg

SEQ ID NO: 2896 - RNA, 21 nt, synthetic construct
  source 1..21: mol_type = other RNA
  modified_base 1: mod_base = OTHER; note = 2'-O-methyladenosine-3'-phosphorothioate
  modified_base 2: mod_base = OTHER; note = 2'-O-methyladenosine-3'-phosphorothioate
  modified_base 3: mod_base = OTHER; note = 2'-O-methylguanosine-3'-phosphate
  modified_base 4: mod_base = OTHER; note = 2'-O-methylguanosine-3'-phosphate
  modified_base 5: mod_base = OTHER; note = 2'-O-methyladenosine-3'-phosphate
  modified_base 6: mod_base = OTHER; note = 2'-O-methylcytidine-3'-phosphate
  modified_base 7: mod_base = OTHER; note = 2'-deoxy-2'-fluorocytidine-3'-phosphate
  modified_base 8: mod_base = OTHER; note = 2'-O-methylguanosine-3'-phosphate
  modified_base 9: mod_base = OTHER; note = 2'-deoxy-2'-fluoroadenosine-3'-phosphate
  modified_base 10: mod_base = OTHER; note = 2'-deoxy-2'-fluoroguanosine-3'-phosphate
  modified_base 11: mod_base = OTHER; note = 2'-deoxy-2'-fluoroadenosine-3'-phosphate
  modified_base 12: mod_base = OTHER; note = 2'-O-methyladenosine-3'-phosphate
  modified_base 13: mod_base = OTHER; note = 2'-O-methylguanosine-3'-phosphate
  modified_base 14: mod_base = OTHER; note = 2'-O-methyluridine-3'-phosphate
  modified_base 15: mod_base = OTHER; note = 2'-O-methylcytidine-3'-phosphate
  modified_base 16: mod_base = OTHER; note = 2'-O-methyladenosine-3'-phosphate
  modified_base 17: mod_base = OTHER; note = 2'-O-methylcytidine-3'-phosphate
  modified_base 18: mod_base = OTHER; note = 2'-O-methylcytidine-3'-phosphate
  modified_base 19: mod_base = OTHER; note = 2'-O-methyladenosine-3'-phosphate
  modified_base 20: mod_base = OTHER; note = 2'-O-methyladenosine-3'-phosphate
  modified_base 21: mod_base = OTHER; note = 2'-O-methylguanosine-3'-phosphate ((2S,4R)-1-[29-[[2-(acetylamino)-2-deoxy-beta-D-galactopyra nosyl]oxy]-14,14-bis[[3-[[3-[[5-[[2-(acetylamino)-2-deoxy-b eta-D-galactopyranosyl]oxy]-1-oxopentyl]amino]propyl]amino] -3-oxopropoxy]methyl]-1,12,19,25-tetraoxo-16-oxa-13,20,24-t riazanonacos-1-yl]-4-hydroxy-2-pyrrolidinyl)methyl ester
aaggaccgagaagtcaccaag

(The sequence listing continues in the following parts.)

1. A method for treating a pediatric subject having primary hyperoxaluria, comprising administering to the subject a therapeutically effective amount of a double stranded RNAi agent that inhibits expression of HAO1, or salt thereof,
wherein the pediatric subject is between about 0 to about 1 year of age and/or has a body weight of less than about 10 kg,
wherein the double stranded RNAi agent, or salt thereof, is administered in a dosing regimen comprising a loading phase followed by a maintenance phase,
wherein the loading phase comprises administering a dose of about 4 mg/kg to about 8 mg/kg of the double stranded RNAi agent, or salt thereof, to the subject about once a month for about three months, and the maintenance phase comprises administering a dose of about 1 mg/kg to about 5 mg/kg of the double stranded RNAi agent, or salt thereof, to the subject about once a month,
wherein the double stranded RNAi agent comprises a sense strand and an antisense strand forming a double stranded region, and wherein the antisense strand comprises at least 15 contiguous nucleotides from the nucleotide sequence of
(SEQ ID NO: 706)
5′-UAUAUUUCCAGGAUGAAAGUCCA-3′,
thereby treating the pediatric subject having primary hyperoxaluria.

2. The method of claim 1,
(a) wherein the subject is further administered a dose of about 4 mg/kg to about 8 mg/kg of the double stranded RNAi agent, or salt thereof, about once every three months when the subject has become between about 1 year to about 6 years of age and/or has a body weight of about 10 kg to about 20 kg; or
(b) wherein the subject is further administered a dose of about 1 mg/kg to about 5 mg/kg of the double stranded RNAi agent, or salt thereof, about once every three months when the subject has become older than about 6 years of age and/or has a body weight of about 20 kg or greater.

3. (canceled)

4. A method of treating a pediatric subject having primary hyperoxaluria, comprising administering to the subject a therapeutically effective amount of a double stranded RNAi agent that inhibits expression of HAO1, or salt thereof,
wherein the pediatric subject is between about 1 year to about 6 years of age and/or has a body weight of about 10 kg to about 20 kg,
wherein the double stranded RNAi agent, or salt thereof, is administered in a dosing regimen comprising a loading phase followed by a maintenance phase,
wherein the loading phase comprises administering a dose of about 4 mg/kg to about 8 mg/kg of the double stranded RNAi agent, or salt thereof, to the subject about once a month for about three months, and the maintenance phase comprises administering a dose of about 4 mg/kg to about 8 mg/kg of the double stranded RNAi agent, or salt thereof, to the subject about once every three months,
wherein the double stranded RNAi agent comprises a sense strand and an antisense strand forming a double stranded region, and wherein the antisense strand comprises at least 15 contiguous nucleotides from the nucleotide sequence of
(SEQ ID NO: 706)
5′-UAUAUUUCCAGGAUGAAAGUCCA-3′,
thereby treating the pediatric subject having primary hyperoxaluria.

5. The method of claim 4, wherein the subject is further administered a dose of about 1 mg/kg to about 5 mg/kg of the double stranded RNAi agent, or salt thereof, about once every three months when the subject has become older than about 6 years of age and/or has a body weight of about 20 kg or greater.

6. A method of preventing at least one symptom in a pediatric subject having primary hyperoxaluria, comprising administering to the subject a prophylactically effective amount of a double stranded RNAi agent that inhibits expression of HAO1, or salt thereof,
wherein the pediatric subject is between about 0 to about 1 year of age and/or has a body weight of less than about 10 kg,
wherein the double stranded RNAi agent, or salt thereof, is administered in a dosing regimen comprising a loading phase followed by a maintenance phase,
wherein the loading phase comprises administering a dose of about 4 mg/kg to about 8 mg/kg of the double stranded RNAi agent, or salt thereof, to the subject about once a month for about three months, and the maintenance phase comprises administering a dose of about 1 mg/kg to about 5 mg/kg of the double stranded RNAi agent, or salt thereof, to the subject about once a month,
wherein the double stranded RNAi agent comprises a sense strand and an antisense strand forming a double stranded region, and wherein the antisense strand comprises at least 15 contiguous nucleotides from the nucleotide sequence of
(SEQ ID NO: 706)
5′-UAUAUUUCCAGGAUGAAAGUCCA-3′,
thereby preventing at least one symptom in the pediatric subject having primary hyperoxaluria.

7. The method of claim 6,
(a) wherein the subject is further administered a dose of about 4 mg/kg to about 8 mg/kg of the double stranded RNAi agent, or salt thereof, about once every three months when the subject has become between about 1 year to about 6 years of age and/or has a body weight of about 10 kg to about 20 kg; or
(b) wherein the subject is further administered a dose of about 1 mg/kg to about 5 mg/kg of the double stranded RNAi agent, or salt thereof, about once every three months when the subject has become older than about 6 years of age and/or has a body of about 20 kg or greater.

8. (canceled)

9. A method of preventing at least one symptom in a pediatric subject having primary hyperoxaluria, comprising administering to the subject a prophylactically effective amount of a double stranded RNAi agent that inhibits expression of HAO1, or salt thereof,
wherein the pediatric subject is between about 1 year to about 6 years of age and/or has a body weight of about 10 kg to about 20 kg,
wherein the double stranded RNAi agent, or salt thereof, is administered in a dosing regimen comprising a loading phase followed by a maintenance phase,
wherein the loading phase comprises administering a dose of about 4 mg/kg to about 8 mg/kg of the double stranded RNAi agent, or salt thereof, to the subject about once a month for about three months, and the maintenance phase comprises administering a dose of about 4 mg/kg to about 8 mg/kg of the double stranded RNAi agent, or salt thereof, to the subject about once every three months,
wherein the double stranded RNAi agent comprises a sense strand and an antisense strand forming a double stranded region, and wherein the antisense strand comprises at least 15 contiguous nucleotides from the nucleotide sequence of
(SEQ ID NO: 706)
5′-UAUAUUUCCAGGAUGAAAGUCCA-3′,
thereby preventing at least one symptom in the pediatric subject having primary hyperoxaluria.

10. The method of claim 9, wherein the subject is further administered a dose of about 1 mg/kg to about 5 mg/kg of the double stranded RNAi agent, or salt thereof, about once every three months when the subject has become older than about 6 years of age and/or has a body weight of about 20 kg or greater.

11. The method of claim 1 or 6, wherein the loading phase dose administered to the subject is about 6 mg/kg of the double stranded RNAi agent and the maintenance phase dose administered to the pediatric subject is about 3 mg/kg of the double stranded RNAi agent.

12. The method of claim 4 or 9, wherein the loading phase dose administered to the subject is about 6 mg/kg of the double stranded RNAi agent and the maintenance phase dose administered to the pediatric subject is about 6 mg/kg of the double stranded RNAi agent.

13. The method of claim 2 or 7, wherein the dose administered to the subject is about 6 mg/kg of the double stranded RNAi agent.

14. The method of any one of claims 2, 5, 7, and 10, wherein the dose administered to the subject is about 3 mg/kg of the double stranded RNAi agent.

15-24. (canceled)

25. The method of claim 1, wherein all of the nucleotides of the sense strand and all of the nucleotides of the antisense strand comprise a modification.

26-47. (canceled)

48. The method of claim 1, wherein the double stranded RNAi agent comprises a ligand attached at the 3′-terminus of said sense strand.

49. The method of claim 48, wherein the ligand is one or more GalNAc derivatives attached through a bivalent or trivalent branched linker.

50. The method of claim 49, wherein the ligand is

[chemical structure]

51. The method of claim 50, wherein the RNAi agent is conjugated to the ligand as shown in the following schematic [chemical structure]
wherein X is O or S.

52-63. (canceled)
